(19) United States
(12) Patent Application Publication
(10) Pub. No.: US 2004/0072154 A1
(43) Pub. Date: Apr. 15, 2004

(54) Novel compositions and methods for cancer

(76) Inventors: David W. Morris, Davis, CA (US); Eric K. Engelhard, Davis, CA (US)

Correspondence Address: Gladys H. Monroy, Morrison & Foerster LLP, 755 Page Mill Road, Palo Alto, CA, 94304-1018, US

(21) Appl. No.: 09/997,722

(22) Filed: Nov. 30, 2001

Related U.S. Application Data
(63) Continuation-in-part of application No. 09/747,377, filed on Dec. 22, 2000, now abandoned.
(63) Continuation-in-part of application No. 09/798,586, filed on Mar. 2, 2001, now abandoned.

(51) Int. Cl. C12Q 1/68; G01N 33/574; C07H 21/04; C12P 21/02; C12N 5/06; C07K 14/47

(52) U.S. Cl. 435/6; 435/7.23; 435/69.1; 435/320.1; 435/325; 530/350; 536/23.2

(57) ABSTRACT

The present invention relates to novel sequences for use in diagnosis and treatment of carcinomas, especially lymphoma carcinomas. In addition, the present invention describes the use of novel compositions for use in screening methods.

[0001] The present application is a continuing application of U.S. Ser. No. 09/747,377, filed Dec. 22, 2000 and Ser. No. 09/798,586, filed Mar. 2, 2001, both of which are expressly incorporated herein by reference.

### FIELD OF THE INVENTION

[0002] The present invention relates to novel sequences for use in diagnosis and treatment of cancer, especially carcinomas, as well as the use of the novel compositions in screening methods.

### BACKGROUND OF THE INVENTION

[0003] Oncogenes are genes that can cause cancer. Carcinogenesis can occur by a wide variety of mechanisms, including infection of cells by viruses containing oncogenes, activation of protooncogenes in the host genome, and mutations of protooncogenes and tumor suppressor genes.

[0004] There are a number of viruses known to be involved in human cancer as well as in animal cancer. Of particular interest here are viruses that do not contain oncogenes themselves; these are slow-transforming retroviruses. They induce tumors by integrating into the host genome and affecting neighboring protooncogenes in a variety of ways, including promoter insertion, enhancer insertion, and/or truncation of a protooncogene or tumor suppressor gene. The analysis of sequences at or near the insertion sites led to the identification of a number of new protooncogenes.

[0005] With respect to lymphoma and leukemia, murine leukemia retrovirus (MuLV), such as SL3-3 or Akv, is a potent inducer of tumors when inoculated into susceptible newborn mice, or when carried in the germline. A number of sequences have been identified as relevant in the induction of lymphoma and leukemia by analyzing the insertion sites; see Sorensen et al., J. of Virology 74:2161 (2000); Hansen et al., Genome Res. 10(2):237-43 (2000); Sorensen et al., J. Virology 70:4063 (1996); Sorensen et al., J. Virology 67:7118 (1993); Joosten et al., Virology 268:308 (2000); and Li et al., Nature Genetics 23:348 (1999); all of which are expressly incorporated by reference herein.

[0006] Accordingly, it is an object of the invention to provide sequences involved in cancer and in particular in oncogenesis.

### SUMMARY OF THE INVENTION

[0007] In accordance with the objects outlined above, the present invention provides methods for screening for compositions which modulate carcinomas, especially lymphoma and leukemia. Also provided herein are methods of inhibiting proliferation of a cell, preferably a lymphoma cell. Methods of treatment of carcinomas, including diagnosis, are also provided herein.

[0008] In one aspect, a method of screening drug candidates comprises providing a cell that expresses a carcinoma associated (CA) gene or fragments thereof. Preferred embodiments of CA genes are genes which are differentially expressed in cancer cells, preferably lymphatic, breast, prostate or epithelial cells, compared to other cells. Preferred embodiments of CA genes used in the methods herein include, but are not limited to the nucleic acids selected from Tables 1-50. The method further includes adding a drug candidate to the cell and determining the effect of the drug candidate on the expression of the CA gene.

[0009] In one embodiment, the method of screening drug candidates includes comparing the level of expression in the absence of the drug candidate to the level of expression in the presence of the drug candidate.

[0010] Also provided herein is a method of screening for a bioactive agent capable of binding to a CA protein (CAP), the method comprising combining the CAP and a candidate bioactive agent, and determining the binding of the candidate agent to the CAP.

[0011] Further provided herein is a method for screening for a bioactive agent capable of modulating the activity of a CAP. In one embodiment, the method comprises combining the CAP and a candidate bioactive agent, and determining the effect of the candidate agent on the bioactivity of the CAP.

[0012] Also provided is a method of evaluating the effect of a candidate carcinoma drug comprising administering the drug to a patient and removing a cell sample from the patient. The expression profile of the cell is then determined. This method may further comprise comparing the expression profile of the patient to an expression profile of a heathy individual.

[0013] In a further aspect, a method for inhibiting the activity of an CA protein is provided. In one embodiment, the method comprises administering to a patient an inhibitor of a CA protein preferably selected from the group consisting of the sequences outlined in Tables 1-50 or their complements.

[0014] A method of neutralizing the effect of a CA protein, preferably a protein encoded by a nucleic acid selected from the group of sequences outlined in Tables 1-50, is also provided. Preferably, the method comprises contacting an agent specific for said protein with said protein in an amount sufficient to effect neutralization.

[0015] Moreover, provided herein is a biochip comprising a nucleic acid segment which encodes a CA protein, preferably selected from the sequences outlined in Tables 1-50.

[0016] Also provided herein is a method for diagnosing or determining the propensity to carcinomas, especially lymphoma or leukemia by sequencing at least one carcinoma or lymphoma gene of an individual. In yet another aspect of the invention, a method is provided for determining carcinoma including lymphoma and leukemia gene copy number in an individual.

[0017] Novel sequences are also provided herein. Other aspects of the invention will become apparent to the skilled artisan by the following description of the invention.

### DETAILED DESCRIPTION OF THE INVENTION

[0018] The present invention is directed to a number of sequences associated with carcinomas, especially lymphoma, breast cancer or prostate cancer. The relatively tight linkage between clonally-integrated proviruses and protooncogenes forms “provirus tagging”, in which slow-transforming retroviruses that act by an insertion mutation mechanism are used to isolate protooncogenes. In some models, uninfected animals have low cancer rates, and infected animals have high cancer rates. It is known that many of the retroviruses involved do not carry transduced host protooncogenes or pathogenic trans-acting viral genes, and thus the cancer incidence must therefor be a direct consequence of proviral integration effects into host protooncogenes. Since proviral integration is random, rare integrants will “activate” host protooncogenes that provide a selective growth advantage, and these rare events result in new proviruses at clonal stoichiometries in tumors.

[0019] The use of oncogenic retroviruses, whose sequences insert into the genome of the host organism resulting in carcinoma, allows the identification of host sequences involved in carcinoma. These sequences may then be used in a number of different ways, including diagnosis, prognosis, screening for modulators (including both agonists and antagonists), antibody generation (for immunotherapy and imaging), etc. However, as will be appreciated by those in the art, oncogenes that are identified in one type of cancer such as lymphoma or leukemia have a strong likelihood of being involved in other types of cancers as well. Thus, while the sequences outlined herein are initially identified as correlated with lymphoma, they can also be found in other types of cancers as well, outlined below.

[0020] Accordingly, the present invention provides nucleic acid and protein sequences that are associated with carcinoma, herein termed “carcinoma associated” or “CA” sequences. In a preferred embodiment, the present invention provides nucleic acid and protein sequences that are associated with carcinomas which originate in lymphatic tissue, herein termed “lymphoma associated”, “leukemia associated” or “LA” sequences.

[0021] Suitable cancers which can be diagnosed or screened for using the methods of the present invention include cancers classified by site or by histological type. Cancers classified by site include cancer of the oral cavity and pharynx (lip, tongue, salivary gland, floor of mouth, gum and other mouth, nasopharynx, tonsil, oropharynx, hypopharynx, other oral/pharynx); cancers of the digestive system (esophagus; stomach; small intestine; colon and rectum; anus, anal canal, and anorectum; liver; intrahepatic bile duct; gallbladder; other biliary; pancreas; retroperitoneum; peritoneum, omentum, and mesentery; other digestive); cancers of the respiratory system (nasal cavity, middle ear, and sinuses; larynx; lung and bronchus; pleura; trachea, mediastinum, and other respiratory); cancers of the mesothelioma; bones and joints; and soft tissue, including heart; skin cancers, including melanomas and other non-epithelial skin cancers; Kaposi's sarcoma and breast cancer; cancer of the female genital system (cervix uteri; corpus uteri; uterus, nos; ovary; vagina; vulva; and other female genital); cancers of the male genital system (prostate gland; testis; penis; and other male genital); cancers of the urinary system (urinary bladder; kidney and renal pelvis; ureter; and other urinary); cancers of the eye and orbit; cancers of the brain and nervous system (brain; and other nervous system); cancers of the endocrine system (thyroid gland and other endocrine, including thymus); cancers of the lymphomas (hodgkin's disease and non-hodgkin's lymphoma), multiple myeloma, and leukemias (lymphocytic leukemia; myeloid leukemia; monocytic leukemia; and other leukemias).

[0022] Other cancers, classified by histological type, that may be associated with the sequences of the invention include, but are not limited to, Neoplasm, malignant; Carcinoma, NOS; Carcinoma, undifferentiated, NOS; Giant and spindle cell carcinoma; Small cell carcinoma, NOS; Papillary carcinoma, NOS; Squamous cell carcinoma, NOS; Lymphoepithelial carcinoma; Basal cell carcinoma, NOS; Pilomatrix carcinoma; Transitional cell carcinoma, NOS; Papillary transitional cell carcinoma; Adenocarcinoma, NOS; Gastrinoma, malignant; Cholangiocarcinoma; Hepatocellular carcinoma, NOS; Combined hepatocellular carcinoma and cholangiocarcinoma; Trabecular adenocarcinoma; Adenoid cystic carcinoma; Adenocarcinoma in adenomatous polyp; Adenocarcinoma, familial polyposis coli; Solid carcinoma, NOS; Carcinoid tumor, malignant; Branchiolo-alveolar adenocarcinoma; Papillary adenocarcinoma, NOS; Chromophobe carcinoma; Acidophil carcinoma; Oxyphilic adenocarcinoma; Basophil carcinoma; Clear cell adenocarcinoma, NOS; Granular cell carcinoma; Follicular adenocarcinoma, NOS; Papillary and follicular adenocarcinoma; Nonencapsulating sclerosing carcinoma; Adrenal cortical carcinoma; Endometroid carcinoma; Skin appendage carcinoma; Apocrine adenocarcinoma; Sebaceous adenocarcinoma; Ceruminous adenocarcinoma; Mucoepidermoid carcinoma; Cystadenocarcinoma, NOS; Papillary cystadenocarcinoma, NOS; Papillary serous cystadenocarcinoma; Mucinous cystadenocarcinoma, NOS; Mucinous adenocarcinoma; Signet ring cell carcinoma; Infiltrating duct carcinoma; Medullary carcinoma, NOS; Lobular carcinoma; Inflammatory carcinoma; Paget's disease, mammary; Acinar cell carcinoma; Adenosquamous carcinoma; Adenocarcinoma w/squamous metaplasia; Thymoma, malignant; Ovarian stromal tumor, malignant; Thecoma, malignant; Granulosa cell tumor, malignant; Androblastoma, malignant; Sertoli cell carcinoma; Leydig cell tumor, malignant; Lipid cell tumor, malignant; Paraganglioma, malignant; Extra-mammary paraganglioma, malignant; Pheochromocytoma; Glomangiosarcoma; Malignant melanoma, NOS; Amelanotic melanoma; Superficial spreading melanoma; Malig melanoma in giant pigmented nevus; Epithelioid cell melanoma; Blue nevus, malignant; Sarcoma, NOS; Fibrosarcoma, NOS; Fibrous histiocytoma, malignant; Myxosarcoma; Liposarcoma, NOS; Leiomyosarcoma, NOS; Rhabdomyosarcoma, NOS; Embryonal rhabdomyosarcoma; Alveolar rhabdomyosarcoma; Stromal sarcoma, NOS; Mixed tumor, malignant, NOS; Mullerian mixed tumor; Nephroblastoma; Hepatoblastoma; Carcinosarcoma, NOS; Mesenchymoma, malignant; Brenner tumor, malignant; Phyllodes tumor, malignant; Synovial sarcoma, NOS; Mesothelioma, malignant; Dysgerminoma; Embryonal carcinoma, NOS; Teratoma, malignant, NOS; Struma ovarii, malignant; Choriocarcinoma; Mesonephroma, malignant; Hemangiosarcoma; Hemangioendothelioma, malignant; Kaposi's sarcoma; Hemangiopericytoma, malignant; Lymphangiosarcoma; Osteosarcoma, NOS; Juxtacortical osteosarcoma; Chondrosarcoma, NOS; Chondroblastoma, malignant; Mesenchymal chondrosarcoma; Giant cell tumor of bone; Ewing's sarcoma; Odontogenic tumor, malignant; Ameloblastic odontosarcoma; Ameloblastoma, malignant; Ameloblastic fibrosarcoma; Pinealoma, malignant; Chordoma; Glioma, malignant; Ependymoma, NOS; Astrocytoma, NOS; Protoplasmic astrocytoma; Fibrillary astrocytoma; Astroblastoma; Glioblastoma, NOS; Oligodendroglioma, NOS; Oligodendroblastoma; Primitive neuroectodermal; Cerebellar sarcoma, NOS; Ganglioneuroblastoma; Neuroblastoma, NOS; Retinoblastoma, NOS; Olfactory neurogenic tumor; Meningioma, malignant; Neurofibrosarcoma; Neurilemmoma, malignant; Granular cell tumor, malignant; Malignant lymphoma, NOS; Hodgkin's disease, NOS; Hodgkin's; paragranuloma, NOS; Malignant lymphoma, small lymphocytic; Malignant lymphoma, large cell, diffuse; Malignant lymphoma, follicular, NOS; Mycosis fungoides; Other specified non-Hodgkin's lymphomas; Malignant histiocytosis; Multiple myeloma; Mast cell sarcoma; Immunoproliferative small intestinal disease; Leukemia, NOS; Lymphoid leukemia, NOS; Plasma cell leukemia; Erythroleukemia; Lymphosarcoma cell leukemia; Myeloid leukemia, NOS; Basophilic leukemia; Eosinophilic leukemia; Monocytic leukemia, NOS; Mast cell leukemia; Megakaryoblastic leukemia; Myeloid sarcoma; and Hairy cell leukemia.

[0023] In addition, the genes may be involved in other diseases, such as but not limited to diseases associated with aging or neurodegenerative diseases.

[0024] Association in this context means that the nucleotide or protein sequences are either differentially expressed, activated, inactivated or altered in carcinomas as compared to normal tissue. As outlined below, CA sequences include those that are up-regulated (i.e. expressed at a higher level), as well as those that are down-regulated (i.e. expressed at a lower level), in carcinomas. CA sequences also include sequences which have been altered (i.e., truncated sequences or sequences with substitutions, deletions or insertions, including point mutations) and show either the same expression profile or an altered profile. In a preferred embodiment, the CA sequences are from humans; however, as will be appreciated by those in the art, CA sequences from other organisms may be useful in animal models of disease and drug evaluation; thus, other CA sequences are provided, from vertebrates, including mammals, including rodents (rats, mice, hamsters, guinea pigs, etc.), primates, farm animals (including sheep, goats, pigs, cows, horses, etc). In some cases, prokaryotic CA sequences may be useful. CA sequences from other organisms may be obtained using the techniques outlined below.

[0025] CA sequences can include both nucleic acid and amino acid sequences. In a preferred embodiment, the CA sequences are recombinant nucleic acids. By the term “recombinant nucleic acid” herein is meant nucleic acid, originally formed in vitro, in general, by the manipulation of nucleic acid by polymerases and endonucleases, in a form not normally found in nature. Thus an isolated nucleic acid, in a linear form, or an expression vector formed in vitro by ligating DNA molecules that are not normally joined, are both considered recombinant for the purposes of this invention. It is understood that once a recombinant nucleic acid is made and reintroduced into a host cell or organism, it will replicate non-recombinantly, i.e. using the in vivo cellular machinery of the host cell rather than in vitro manipulations; however, such nucleic acids, once produced recombinantly, although subsequently replicated non-recombinantly, are still considered recombinant for the purposes of the invention.

[0026] Similarly, a “recombinant protein” is a protein made using recombinant techniques, i.e. through the expression of a recombinant nucleic acid as depicted above. A recombinant protein is distinguished from naturally occurring protein by at least one or more characteristics. For example, the protein may be isolated or purified away from some or all of the proteins and compounds with which it is normally associated in its wild type host, and thus may be substantially pure. For example, an isolated protein is unaccompanied by at least some of the material with which it is normally associated in its natural state, preferably constituting at least about 0.5%, more preferably at least about 5% by weight of the total protein in a given sample. A substantially pure protein comprises at least about 75% by weight of the total protein, with at least about 80% being preferred, and at least about 90% being particularly preferred. The definition includes the production of an CA protein from one organism in a different organism or host cell. Alternatively, the protein may be made at a significantly higher concentration than is normally seen, through the use of an inducible promoter or high expression promoter, such that the protein is made at increased concentration levels. Alternatively, the protein may be in a form not normally found in nature, as in the addition of an epitope tag or amino acid substitutions, insertions and deletions, as discussed below.

[0027] In a preferred embodiment, the CA sequences are nucleic acids. As will be appreciated by those in the art and is more fully outlined below, CA sequences are useful in a variety of applications, including diagnostic applications, which will detect naturally occurring nucleic acids, as well as screening applications; for example, biochips comprising nucleic acid probes to the CA sequences can be generated. In the broadest sense, then, by “nucleic acid” or “oligonucleotide” or grammatical equivalents herein means at least two nucleotides covalently linked together. A nucleic acid of the present invention will generally contain phosphodiester bonds, although in some cases, as outlined below (for example in antisense applications or when a candidate agent is a nucleic acid), nucleic acid analogs may be used that have alternate backbones, comprising, for example, phosphoramidate (Beaucage et al., Tetrahedron 49(10):1925 (1993) and references therein; Letsinger, J. Org. Chem. 35:3800 (1970); Sprinzl et al., Eur. J. Biochem. 81:579 (1977); Letsinger et al., Nucl. Acids Res. 14:3487 (1986); Sawai et al, Chem. Lett. 805 (1984), Letsinger et al., J. Am. Chem. Soc. 110:4470 (1988); and Pauwels et al., Chemica Scripta 26:141 91986)), phosphorothioate (Mag et al., Nucleic Acids Res. 19:1437 (1991); and U.S. Pat. No. 5,644,048), phosphorodithioate (Briu et al., J. Am. Chem. Soc. 111:2321 (1989), O-methylphophoroamidite linkages (see Eckstein, Oligonucleotides and Analogues: A Practical Approach, Oxford University Press), and peptide nucleic acid backbones and linkages (see Egholm, J. Am. Chem. Soc. 114:1895 (1992); Meier et al., Chem. Int. Ed. Engl. 31:1008 (1992); Nielsen, Nature, 365:566 (1993); Carlsson et al., Nature 380:207 (1996), all of which are incorporated by reference). Other analog nucleic acids include those with positive backbones (Denpcy et al., Proc. Natl. Acad. Sci. USA 92:6097 (1995); non-ionic backbones (U.S. Pat. Nos. 5,386,023, 5,637,684, 5,602,240, 5,216,141 and 4,469,863; Kiedrowshi et al., Angew. Chem. Intl. Ed. English 30:423 (1991); Letsinger et al., J. Am. Chem. Soc. 110:4470 (1988); Letsinger et al., Nucleoside & Nucleotide 13:1597 (1994); Chapters 2 and 3, ASC Symposium Series 580, “Carbohydrate Modifications in Antisense Research”, Ed. Y. S. Sanghui and P. Dan Cook; Mesmaeker et al., Bioorganic & Medicinal Chem. Lett. 4:395 (1994); Jeffs et al., J. Biomolecular NMR 34:17 (1994); Tetrahedron Lett. 37:743 (1996)) and non-ribose backbones, including those described in U.S. Pat. Nos. 5,235,033 and 5,034,506, and Chapters 6 and 7, ASC Symposium Series 580, “Carbohydrate Modifications in Antisense Research”, Ed. Y. S. Sanghui and P. Dan Cook. Nucleic acids containing one or more carbocyclic sugars are also included within one definition of nucleic acids (see Jenkins et al., Chem. Soc. Rev. (1995) pp169-176). Several nucleic acid analogs are described in Rawls, C & E News Jun. 2, 1997 page 35. All of these references are hereby expressly incorporated by reference. These modifications of the ribose-phosphate backbone may be done for a variety of reasons, for example to increase the stability and half-life of such molecules in physiological environments for use in anti-sense applications or as probes on a biochip.

[0028] As will be appreciated by those in the art, all of these nucleic acid analogs may find use in the present invention. In addition, mixtures of naturally occurring nucleic acids and analogs can be made; alternatively, mixtures of different nucleic acid analogs, and mixtures of naturally occurring nucleic acids and analogs may be made.

[0029] The nucleic acids may be single stranded or double stranded, as specified, or contain portions of both double stranded or single stranded sequence. As will be appreciated by those in the art, the depiction of a single strand “Watson” also defines the sequence of the other strand “Crick”; thus the sequences described herein also includes the complement of the sequence. The nucleic acid may be DNA, both genomic and cDNA, RNA or a hybrid, where the nucleic acid contains any combination of deoxyribo- and ribo-nucleotides, and any combination of bases, including uracil, adenine, thymine, cytosine, guanine, inosine, xanthine hypoxanthine, isocytosine, isoguanine, etc. As used herein, the term “nucleoside” includes nucleotides and nucleoside and nucleotide analogs, and modified nucleosides such as amino modified nucleosides. In addition, “nucleoside” includes non-naturally occurring analog structures. Thus for example the individual units of a peptide nucleic acid, each containing a base, are referred to herein as a nucleoside.

[0030] An CA sequence can be initially identified by substantial nucleic acid and/or amino acid sequence homology to the CA sequences outlined herein. Such homology can be based upon the overall nucleic acid or amino acid sequence, and is generally determined as outlined below, using either homology programs or hybridization conditions.

[0031] The CA sequences of the invention were initially identified as described herein; basically, infection of mice with murine leukemia viruses (MLV) resulted in lymphoma, although many of these sequences will also be involved in other cancers as is generally outlined herein.

[0032] The CA sequences outlined herein comprise the insertion sites for the virus. In general, the retrovirus can cause carcinomas in three basic ways: first of all, by inserting upstream of a normally silent host gene and activating it (e.g. promoter insertion); secondly, by truncating a host gene that leads to oncogenesis; or by enhancing the transcription of a neighboring gene. For example, retrovirus enhancers, including SL3-3, are known to act on genes up to approximately 200 kilobases of the insertion site.

[0033] In a preferred embodiment, CA sequences are those that are up-regulated in carcinomas; that is, the expression of these genes is higher in carcinoma tissue as compared to normal tissue of the same differentiation stage. “Up-regulation” as used herein means at least about 50%, more preferably at least about 100%, more preferably at least about 150%, more preferably, at least about 200%, with from 300 to at least 1000% being especially preferred.

[0034] In a preferred embodiment, CA sequences are those that are down-regulated in carcinomas; that is, the expression of these genes is lower in carcinoma tissue as compared to normal I tissue of the same differentiation stage. “Down-regulation” as used herein means at least about 50%, more preferably at least about 100%, more preferably at least about 150%, more preferably, at least about 200%, with from 300 to at least 1000% being especially preferred.

[0035] In a preferred embodiment, CA sequences are those that are altered but show either the same expression profile or an altered profile as compared to normal lymphoid tissue of the same differentiation stage. “Altered CA sequences” as used herein refers to sequences which are truncated, contain insertions or contain point mutations.

[0036] CA proteins of the present invention may be classified as secreted proteins, transmembrane proteins or intracellular proteins.

[0037] In a preferred embodiment the CA protein is an intracellular protein. Intracellular proteins may be found in the cytoplasm and/or in the nucleus. Intracellular proteins are involved in all aspects of cellular function and replication (including, for example, signaling pathways); aberrant expression of such proteins results in unregulated or disregulated cellular processes. For example, many intracellular proteins have enzymatic activity such as protein kinase activity, protein phosphatase activity, protease activity, nucleotide cyclase activity, polymerase activity and the like. Intracellular proteins also serve as docking proteins that are involved in organizing complexes of proteins, or targeting proteins to various subcellular localizations, and are involved in maintaining the structural integrity of organelles.

[0038] An increasingly appreciated concept in characterizing intracellular proteins is the presence in the proteins of one or more motifs for which defined functions have been attributed. In addition to the highly conserved sequences found in the enzymatic domain of proteins, highly conserved sequences have been identified in proteins that are involved in protein-protein interaction. For example, Src-homology-2 (SH2) domains bind tyrosine-phosphorylated targets in a sequence dependent manner. PTB domains, which are distinct from SH2 domains, also bind tyrosine phosphorylated targets. SH3 domains bind to proline-rich targets. In addition, PH domains, tetratricopeptide repeats and WD domains to name only a few, have been shown to mediate protein-protein interactions. Some of these may also be involved in binding to phospholipids or other second messengers. As will be appreciated by one of ordinary skill in the art, these motifs can be identified on the basis of primary sequence; thus, an analysis of the sequence of proteins may provide insight into both the enzymatic potential of the molecule and/or molecules with which the protein may associate.

[0039] In a preferred embodiment, the CA sequences are transmembrane proteins. Transmembrane proteins are molecules that span the phospholipid bilayer of a cell. They may have an intracellular domain, an extracellular domain, or both. The intracellular domains of such proteins may have a number of functions including those already described for intracellular proteins. For example, the intracellular domain may have enzymatic activity and/or may serve as a binding site for additional proteins. Frequently the intracellular domain of transmembrane proteins serves both roles. For example certain receptor tyrosine kinases have both protein kinase activity and SH2 domains. In addition, autophosphorylation of tyrosines on the receptor molecule itself, creates binding sites for additional SH2 domain containing proteins.

[0040] Transmembrane proteins may contain from one to many transmembrane domains. For example, receptor tyrosine kinases, certain cytokine receptors, receptor guanylyl cyclases and receptor serine/threonine protein kinases contain a single transmembrane domain. However, various other proteins including channels and adenylyl cyclases contain numerous transmembrane domains. Many important cell surface receptors are classified as “seven transmembrane domain” proteins, as they contain 7 membrane spanning regions. Important transmembrane protein receptors include, but are not limited to insulin receptor, insulin-like growth factor receptor, human growth hormone receptor, glucose transporters, transferrin receptor, epidermal growth factor receptor, low density lipoprotein receptor, epidermal growth factor receptor, leptin receptor, interleukin receptors, e.g. IL-1 receptor, IL-2 receptor, etc.

[0041] Characteristics of transmembrane domains include approximately 20 consecutive hydrophobic amino acids that may be followed by charged amino acids. Therefore, upon analysis of the amino acid sequence of a particular protein, the localization and number of transmembrane domains within the protein may be predicted.

[0042] The extracellular domains of transmembrane proteins are diverse; however, conserved motifs are found repeatedly among various extracellular domains. Conserved structure and/or functions have been ascribed to different extracellular motifs. For example, cytokine receptors are characterized by a cluster of cysteines and a WSXWS (W=tryptophan, S=serine, X=any amino acid) motif. Immunoglobulin-like domains are highly conserved. Mucin-like domains may be involved in cell adhesion and leucine-rich repeats participate in protein-protein interactions.

[0043] Many extracellular domains are involved in binding to other molecules. In one aspect, extracellular domains are receptors. Factors that bind the receptor domain include circulating ligands, which may be peptides, proteins, or small molecules such as adenosine and the like. For example, growth factors such as EGF, FGF and PDGF are circulating growth factors that bind to their cognate receptors to initiate a variety of cellular responses. Other factors include cytokines, mitogenic factors, neurotrophic factors and the like. Extracellular domains also bind to cell-associated molecules. In this respect, they mediate cell-cell interactions. Cell-associated ligands can be tethered to the cell for example via a glycosylphosphatidylinositol (GPI) anchor, or may themselves be transmembrane proteins. Extracellular domains also associate with the extracellular matrix and contribute to the maintenance of the cell structure.

[0044] CA proteins that are transmembrane are particularly preferred in the present invention as they are good targets for immunotherapeutics, as are described herein. In addition, as outlined below, transmembrane proteins can be also useful in imaging modalities.

[0045] It will also be appreciated by those in the art that a transmembrane protein can be made soluble by removing transmembrane sequences, for example through recombinant methods. Furthermore, transmembrane proteins that have been made soluble can be made to be secreted through recombinant means by adding an appropriate signal sequence.

[0046] In a preferred embodiment, the CA proteins are secreted proteins; the secretion of which can be either constitutive or regulated. These proteins have a signal peptide or signal sequence that targets the molecule to the secretory pathway. Secreted proteins are involved in numerous physiological events; by virtue of their circulating nature, they serve to transmit signals to various other cell types. The secreted protein may function in an autocrine manner (acting on the cell that secreted the factor), a paracrine manner (acting on cells in close proximity to the cell that secreted the factor) or an endocrine manner (acting on cells at a distance). Thus secreted molecules find use in modulating or altering numerous aspects of physiology. CA proteins that are secreted proteins are particularly preferred in the present invention as they serve as good targets for diagnostic markers, for example for blood tests.

[0047] An CA sequence is initially identified by substantial nucleic acid and/or amino acid sequence homology to the CA sequences outlined herein. Such homology can be based upon the overall nucleic acid or amino acid sequence, and is generally determined as outlined below, using either homology programs or hybridization conditions.

[0048] As used herein, a nucleic acid is a “CA nucleic acid” if the overall homology of the nucleic acid sequence to one of the nucleic acids of Tables 1-50 is preferably greater than about 75%, more preferably greater than about 80%, even more preferably greater than about 85% and most preferably greater than 90%. In some embodiments the homology will be as high as about 93 to 95 or 98%. In a preferred embodiment, the sequences which are used to determine sequence identity or similarity are selected from those of the nucleic acids of Tables 1-50. In another embodiment, the sequences are naturally occurring allelic variants of the sequences of the nucleic acids of Tables 1-50. In another embodiment, the sequences are sequence variants as further described herein.

[0049] Homology in this context means sequence similarity or identity, with identity being preferred. A preferred comparison for homology purposes is to compare the sequence containing sequencing errors to the correct sequence. This homology will be determined using standard techniques known in the art, including, but not limited to, the local homology algorithm of Smith & Waterman, Adv. Appl. Math. 2:482 (1981), by the homology alignment algorithm of Needleman & Wunsch, J. Mol. Biol. 48:443 (1970), by the search for similarity method of Pearson & Lipman, PNAS USA 85:2444 (1988), by computerized implementations of these algorithms (GAP, BESTFIT, FASTA, and TFASTA in the Wisconsin Genetics Software Package, Genetics Computer Group, 575 Science Drive, Madison, Wis.), the Best Fit sequence program described by Devereux et al., Nucl. Acid Res. 12:387-395 (1984), preferably using the default settings, or by inspection.

[0050] One example of a useful algorithm is PILEUP. PILEUP creates a multiple sequence alignment from a group of related sequences using progressive, pairwise alignments. It can also plot a tree showing the clustering relationships used to create the alignment. PILEUP uses a simplification of the progressive alignment method of Feng & Doolittle, J. Mol. Evol. 35:351-360 (1987); the method is similar to that described by Higgins & Sharp CABIOS 5:151-153 (1989). Useful PILEUP parameters including a default gap weight of 3.00, a default gap length weight of 0.10, and weighted end gaps.

[0051] Another example of a useful algorithm is the BLAST algorithm, described in Altschul et al., J. Mol. Biol. 215, 403-410, (1990) and Karlin et al., PNAS USA 90:5873-5787 (1993). A particularly useful BLAST program is the WU-BLAST-2 program which was obtained from Altschul et al., Methods in Enzymology, 266: 460-480 (1996); http://blast.wust]. WU-BLAST-2 uses several search parameters, most of which are set to the default values. The adjustable parameters are set with the following values: overlap span=1, overlap fraction=0.125, word threshold (T)=11. The HSP S and HSP S2 parameters are dynamic values and are established by the program itself depending upon the composition of the particular sequence and composition of the particular database against which the sequence of interest is being searched; however, the values may be adjusted to increase sensitivity. A % amino acid sequence identity value is determined by the number of matching identical residues divided by the total number of residues of the “longer” sequence in the aligned region. The “longer” sequence is the one having the most actual residues in the aligned region (gaps introduced by WU-Blast-2 to maximize the alignment score are ignored).

[0052] Thus, “percent (%) nucleic acid sequence identity” is defined as the percentage of nucleotide residues in a candidate sequence that are identical with the nucleotide residues of the nucleic acids of Tables 1-50. A preferred method utilizes the BLASTN module of WU-BLAST-2 set to the default parameters, with overlap span and overlap fraction set to 1 and 0.125, respectively.

[0053] The alignment may include the introduction of gaps in the sequences to be aligned. In addition, for sequences which contain either more or fewer nucleotides than those of the nucleic acids of Tables 1-50, it is understood that the percentage of homology will be determined based on the number of homologous nucleosides in relation to the total number of nucleosides. Thus, for example, homology of sequences shorter than those of the sequences identified herein and as discussed below, will be determined using the number of nucleosides in the shorter sequence.

[0054] In one embodiment, the nucleic acid homology is determined through hybridization studies. Thus, for example, nucleic acids which hybridize under high stringency to the nucleic acids identified in the figures, or their complements, are considered CA sequences. High stringency conditions are known in the art; see for example Maniatis et al., Molecular Cloning: A Laboratory Manual, 2d Edition, 1989, and Short Protocols in Molecular Biology, ed. Ausubel, et al., both of which are hereby incorporated by reference. Stringent conditions are sequence-dependent and will be different in different circumstances. Longer sequences hybridize specifically at higher temperatures. An extensive guide to the hybridization of nucleic acids is found in Tijssen, Techniques in Biochemistry and Molecular Biology—Hybridization with Nucleic Acid Probes, “Overview of principles of hybridization and the strategy of nucleic acid assays” (1993). Generally, stringent conditions are selected to be about 5-10° C. lower than the thermal melting point (Tm) for the specific sequence at a defined ionic strength pH. The Tm is the temperature (under defined ionic strength, pH and nucleic acid concentration) at which 50% of the probes complementary to the target hybridize to the target sequence at equilibrium (as the target sequences are present in excess, at Tm, 50% of the probes are occupied at equilibrium). Stringent conditions will be those in which the salt concentration is less than about 1.0 M sodium ion, typically about 0.01 to 1.0 M sodium ion concentration (or other salts) at pH 7.0 to 8.3 and the temperature is at least about 30° C. for short probes (e.g. 10 to 50 nucleotides) and at least about 60° C. for long probes (e.g. greater than 50 nucleotides). Stringent conditions may also be achieved with the addition of destabilizing agents such as formamide.

[0055] In another embodiment, less stringent hybridization conditions are used; for example, moderate or low stringency conditions may be used, as are known in the art; see Maniatis and Ausubel, supra, and Tijssen, supra.

[0056] In addition, the CA nucleic acid sequences of the invention are fragments of larger genes, i.e. they are nucleic acid segments. Alternatively, the CA nucleic acid sequences can serve as indicators of oncogene position, for example, the CA sequence may be an enhancer that activates a protooncogene. “Genes” in this context includes coding regions, non-coding regions, and mixtures of coding and non-coding regions. Accordingly, as will be appreciated by those in the art, using the sequences provided herein, additional sequences of the CA genes can be obtained, using techniques well known in the art for cloning either longer sequences or the full length sequences; see Maniatis et al., and Ausubel, et al., supra, hereby expressly incorporated by reference. In general, this is done using PCR, for example, kinetic PCR.

[0057] Once the CA nucleic acid is identified, it can be cloned and, if necessary, its constituent parts recombined to form the entire CA nucleic acid. Once isolated from its natural source, e.g., contained within a plasmid or other vector or excised therefrom as a linear nucleic acid segment, the recombinant CA nucleic acid can be further used as a probe to identify and isolate other CA nucleic acids, for example additional coding regions. It can also be used as a “precursor” nucleic acid to make modified or variant CA nucleic acids and proteins.

[0058] The CA nucleic acids of the present invention are used in several ways. In a first embodiment, nucleic acid probes to the CA nucleic acids are made and attached to biochips to be used in screening and diagnostic methods, as outlined below, or for administration, for example for gene therapy and/or antisense applications. Alternatively, the CA nucleic acids that include coding regions of CA proteins can be put into expression vectors for the expression of CA proteins, again either for screening purposes or for administration to a patient.

[0059] In a preferred embodiment, nucleic acid probes to CA nucleic acids (both the nucleic acid sequences outlined in the figures and/or the complements thereof) are made. The nucleic acid probes attached to the biochip are designed to be substantially complementary to the CA nucleic acids, i.e. the target sequence (either the target sequence of the sample or to other probe sequences, for example in sandwich assays), such that hybridization of the target sequence and the probes of the present invention occurs. As outlined below, this complementarity need not be perfect; there may be any number of base pair mismatches which will interfere with hybridization between the target sequence and the single stranded nucleic acids of the present invention. However, if the number of mutations is so great that no hybridization can occur under even the least stringent of hybridization conditions, the sequence is not a complementary target sequence. Thus, by “substantially complementary” herein is meant that the probes are sufficiently complementary to the target sequences to hybridize under normal reaction conditions, particularly high stringency conditions, as outlined herein.

[0060] A nucleic acid probe is generally single stranded but can be partially single and partially double stranded. The strandedness of the probe is dictated by the structure, composition, and properties of the target sequence. In general, the nucleic acid probes range from about 8 to about 100 bases long, with from about 10 to about 80 bases being preferred, and from about 30 to about 50 bases being particularly preferred. That is, generally whole genes are not used. In some embodiments, much longer nucleic acids can be used, up to hundreds of bases.

[0061] In a preferred embodiment, more than one probe per sequence is used, with either overlapping probes or probes to different sections of the target being used. That is, two, three, four or more probes, with three being preferred, are used to build in a redundancy for a particular target. The probes can be overlapping (i.e. have some sequence in common), or separate.

[0062] As will be appreciated by those in the art, nucleic acids can be attached or immobilized to a solid support in a wide variety of ways. By “immobilized” and grammatical equivalents herein is meant the association or binding between the nucleic acid probe and the solid support is sufficient to be stable under the conditions of binding, washing, analysis, and removal as outlined below. The binding can be covalent or non-covalent. By “non-covalent binding” and grammatical equivalents herein is meant one or more of either electrostatic, hydrophilic, and hydrophobic interactions. Included in non-covalent binding is the covalent attachment of a molecule, such as, streptavidin to the support and the non-covalent binding of the biotinylated probe to the streptavidin. By “covalent binding” and grammatical equivalents herein is meant that the two moieties, the solid support and the probe, are attached by at least one bond, including sigma bonds, pi bonds and coordination bonds. Covalent bonds can be formed directly between the probe and the solid support or can be formed by a cross linker or by inclusion of a specific reactive group on either the solid support or the probe or both molecules. Immobilization may also involve a combination of covalent and non-covalent interactions.

[0063] In general, the probes are attached to the biochip in a wide variety of ways, as will be appreciated by those in the art. As described herein, the nucleic acids can either be synthesized first, with subsequent attachment to the biochip, or can be directly synthesized on the biochip.

[0064] The biochip comprises a suitable solid substrate. By “substrate” or “solid support” or other grammatical equivalents herein is meant any material that can be modified to contain discrete individual sites appropriate for the attachment or association of the nucleic acid probes and is amenable to at least one detection method. As will be appreciated by those in the art, the number of possible substrates are very large, and include, but are not limited to, glass and modified or functionalized glass, plastics (including acrylics, polystyrene and copolymers of styrene and other materials, polypropylene, polyethylene, polybutylene, polyurethanes, Teflon™, etc.), polysaccharides, nylon or nitrocellulose, resins, silica or silica-based materials including silicon and modified silicon, carbon, metals, inorganic glasses, etc. In general, the substrates allow optical detection and do not appreciably fluoresce.

[0065] In a preferred embodiment, the surface of the biochip and the probe may be derivatized with chemical functional groups for subsequent attachment of the two. Thus, for example, the biochip is derivatized with a chemical functional group including, but not limited to, amino groups, carboxy groups, oxo groups and thiol groups, with amino groups being particularly preferred. Using these functional groups, the probes can be attached using functional groups on the probes. For example, nucleic acids containing amino groups can be attached to surfaces comprising amino groups, for example using linkers as are known in the art; for example, homo-or hetero-bifunctional linkers as are well known (see 1994 Pierce Chemical Company catalog, technical section on cross-linkers, pages 155-200, incorporated herein by reference). In addition, in some cases, additional linkers, such as alkyl groups (including substituted and heteroalkyl groups) may be used.

[0066] In this embodiment, the oligonucleotides are synthesized as is known in the art, and then attached to the surface of the solid support. As will be appreciated by those skilled in the art, either the 5′ or 3′ terminus may be attached to the solid support, or attachment may be via an internal nucleoside.

[0067] In an additional embodiment, the immobilization to the solid support may be very strong, yet non-covalent. For example, biotinylated oligonucleotides can be made, which bind to surfaces covalently coated with streptavidin, resulting in attachment.

[0068] Alternatively, the oligonucleotides may be synthesized on the surface, as is known in the art. For example, photoactivation techniques utilizing photopolymerization compounds and techniques are used. In a preferred embodiment, the nucleic acids can be synthesized in situ, using well known photolithographic techniques, such as those described in WO 95/25116; WO 95/35505; U.S. Pat. Nos. 5,700,637 and 5,445,934; and references cited within, all of which are expressly incorporated by reference; these methods of attachment form the basis of the Affymetrix GeneChip technology.

[0069] In addition to the solid-phase technology represented by biochip arrays, gene expression can also be quantified using liquid-phase arrays. One such system is kinetic polymerase chain reaction (PCR). Kinetic PCR allows for the simultaneous amplification and quantification of specific nucleic acid sequences. The specificity is derived from synthetic oligonucleotide primers designed to preferentially adhere to single-stranded nucleic acid sequences bracketing the target site. This pair of oligonucleotide primers form specific, non-covalently bound complexes on each strand of the target sequence. These complexes facilitate in vitro transcription of double-stranded DNA in opposite orientations. Temperature cycling of the reaction mixture creates a continuous cycle of primer binding, transcription, and re-melting of the nucleic acid to individual strands. The result is an exponential increase of the target dsDNA product. This product can be quantified in real time either through the use of an intercalating dye or a sequence specific probe. SYBR® Greene I, is an example of an intercalating dye, that preferentially binds to dsDNA resulting in a concomitant increase in the fluorescent signal. Sequence specific probes, such as used with TaqMan® technology, consist of a fluorochrome and a quenching molecule covalently bound to opposite ends of an oligonucleotide. The probe is designed to selectively bind the target DNA sequence between the two primers. When the DNA strands are synthesized during the PCR reaction, the fluorochrome is cleaved from the probe by the exonuclease activity of the polymerase resulting in signal dequenching. The probe signaling method can be more specific than the intercalating dye method, but in each case, signal strength is proportional to the dsDNA product produced. Each type of quantification method can be used in multi-well liquid phase arrays with each well representing primers and/or probes specific to nucleic acid sequences of interest. When used with messenger RNA preparations of tissues or cell lines, and an array of probe/primer reactions can simultaneously quantify the expression of multiple gene products of interest. See Germer, S., et al., Genome Res. 10:258-266 (2000); Heid, C. A., et al., Genome Res. 6, 986-994 (1996).

[0070] In a preferred embodiment, CA nucleic acids encoding CA proteins are used to make a variety of expression vectors to express CA proteins which can then be used in screening assays, as described below. The expression vectors may be either self-replicating extrachromosomal vectors or vectors which integrate into a host genome. Generally, these expression vectors include transcriptional and translational regulatory nucleic acid operably linked to the nucleic acid encoding the CA protein. The term “control sequences” refers to DNA sequences necessary for the expression of an operably linked coding sequence in a particular host organism. The control sequences that are suitable for prokaryotes, for example, include a promoter, optionally an operator sequence, and a ribosome binding site. Eukaryotic cells are known to utilize promoters, polyadenylation signals, and enhancers. Nucleic acid is “operably linked” when it is placed into a functional relationship with another nucleic acid sequence. For example, DNA for a presequence or secretory leader is operably linked to DNA for a polypeptide if it is expressed as a preprotein that participates in the secretion of the polypeptide; a promoter or enhancer is operably linked to a coding sequence if it affects the transcription of the sequence; or a ribosome binding site is operably linked to a coding sequence if it is positioned so as to facilitate translation. Generally, “operably linked” means that the DNA sequences being linked are contiguous, and, in the case of a secretory leader, contiguous and in reading phase. However, enhancers do not have to be contiguous. Linking is accomplished by ligation at convenient restriction sites. If such sites do not exist, synthetic oligonucleotide adaptors or linkers are used in accordance with conventional practice. The transcriptional and translational regulatory nucleic acid will generally be appropriate to the host cell used to express the CA protein; for example, transcriptional and translational regulatory nucleic acid sequences from Bacillus are preferably used to express the CA protein in Bacillus. Numerous types of appropriate expression vectors, and suitable regulatory sequences are known in the art for a variety of host cells.

[0071] In general, the transcriptional and translational regulatory sequences may include, but are not limited to, promoter sequences, ribosomal binding sites, transcriptional start and stop sequences, translational start and stop sequences, and enhancer or activator sequences. In a preferred embodiment, the regulatory sequences include a promoter and transcriptional start and stop sequences.

[0072] Promoter sequences encode either constitutive or inducible promoters. The promoters may be either naturally occurring promoters or hybrid promoters. Hybrid promoters, which combine elements of more than one promoter, are also known in the art, and are useful in the present invention.

[0073] In addition, the expression vector may comprise additional elements. For example, the expression vector may have two replication systems, thus allowing it to be maintained in two organisms, for example in mammalian or insect cells for expression and in a procaryotic host for cloning and amplification. Furthermore, for integrating expression vectors, the expression vector contains at least one sequence homologous to the host cell genome, and preferably two homologous sequences which flank the expression construct. The integrating vector may be directed to a specific locus in the host cell by selecting the appropriate homologous sequence for inclusion in the vector. Constructs for integrating vectors are well known in the art.

[0074] In addition, in a preferred embodiment, the expression vector contains a selectable marker gene to allow the selection of transformed host cells. Selection genes are well known in the art and will vary with the host cell used.

[0075] The CA proteins of the present invention are produced by culturing a host cell transformed with an expression vector containing nucleic acid encoding an CA protein, under the appropriate conditions to induce or cause expression of the CA protein. The conditions appropriate for CA protein expression will vary with the choice of the expression vector and the host cell, and will be easily ascertained by one skilled in the art through routine experimentation. For example, the use of constitutive promoters in the expression vector will require optimizing the growth and proliferation of the host cell, while the use of an inducible promoter requires the appropriate growth conditions for induction. In addition, in some embodiments, the timing of the harvest is important. For example, the baculoviral systems used in insect cell expression are lytic viruses, and thus harvest time selection can be crucial for product yield.

[0076] Appropriate host cells include yeast, bacteria, archaebacteria, fungi, and insect, plant and animal cells, including mammalian cells. Of particular interest are Drosophila melanogaster cells, Saccharomyces cerevisiae and other yeasts, E. coli, Bacillus subtilis, Sf9 cells, C129 cells, 293 cells, Neurospora, BHK, CHO, COS, HeLa cells, THP1 cell line (a macrophage cell line) and human cells and cell lines.

[0077] In a preferred embodiment, the CA proteins are expressed in mammalian cells. Mammalian expression systems are also known in the art, and include retroviral systems. A preferred expression vector system is a retroviral vector system such as is generally described in PCT/US97/01019 and PCT/US97/01048, both of which are hereby expressly incorporated by reference. Of particular use as mammalian promoters are the promoters from mammalian viral genes, since the viral genes are often highly expressed and have a broad host range. Examples include the SV40 early promoter, mouse mammary tumor virus LTR promoter, adenovirus major late promoter, herpes simplex virus promoter, and the CMV promoter. Typically, transcription termination and polyadenylation sequences recognized by mammalian cells are regulatory regions located 3′ to the translation stop codon and thus, together with the promoter elements, flank the coding sequence. Examples of transcription terminator and polyadenlytion signals include those derived form SV40.

[0078] The methods of introducing exogenous nucleic acid into mammalian hosts, as well as other hosts, is well known in the art, and will vary with the host cell used. Techniques include dextran-mediated transfection, calcium phosphate precipitation, polybrene mediated transfection, protoplast fusion, electroporation, viral infection, encapsulation of the polynucleotide(s) in liposomes, and direct microinjection of the DNA into nuclei.

[0079] In a preferred embodiment, CA proteins are expressed in bacterial systems. Bacterial expression systems are well known in the art. Promoters from bacteriophage may also be used and are known in the art. In addition, synthetic promoters and hybrid promoters are also useful; for example, the tac promoter is a hybrid of the trp and lac promoter sequences. Furthermore, a bacterial promoter can include naturally occurring promoters of non-bacterial origin that have the ability to bind bacterial RNA polymerase and initiate transcription. In addition to a functioning promoter sequence, an efficient ribosome binding site is desirable. The expression vector may also include a signal peptide sequence that provides for secretion of the CA protein in bacteria. The protein is either secreted into the growth media (gram-positive bacteria) or into the periplasmic space, located between the inner and outer membrane of the cell (gram-negative bacteria). The bacterial expression vector may also include a selectable marker gene to allow for the selection of bacterial strains that have been transformed. Suitable selection genes include genes which render the bacteria resistant to drugs such as ampicillin, chloramphenicol, erythromycin, kanamycin, neomycin and tetracycline. Selectable markers also include biosynthetic genes, such as those in the histidine, tryptophan and leucine biosynthetic pathways. These components are assembled into expression vectors. Expression vectors for bacteria are well known in the art, and include vectors for Bacillus subtilis, E. coli, Streptococcus cremoris, and Streptococcus lividans, among others. The bacterial expression vectors are transformed into bacterial host cells using techniques well known in the art, such as calcium chloride treatment, electroporation, and others.

[0080] In one embodiment, CA proteins are produced in insect cells. Expression vectors for the transformation of insect cells, and in particular, baculovirus-based expression vectors, are well known in the art.

[0081] In a preferred embodiment, CA protein is produced in yeast cells. Yeast expression systems are well known in the art, and include expression vectors for Saccharomyces cerevisiae, Candida albicans and C. maltosa, Hansenula polymorpha, Kluyveromyces fragilis and K. lactis, Pichia guillerimondii and P. pastoris, Schizosaccharomyces pombe, and Yarrowia lipolytica.

[0082] The CA protein may also be made as a fusion protein, using techniques well known in the art. Thus, for example, for the creation of monoclonal antibodies. If the desired epitope is small, the CA protein may be fused to a carrier protein to form an immunogen. Alternatively, the CA protein may be made as a fusion protein to increase expression, or for other reasons. For example, when the CA protein is an CA peptide, the nucleic acid encoding the peptide may be linked to other nucleic acid for expression purposes.

[0083] In one embodiment, the CA nucleic acids, proteins and antibodies of the invention are labeled. By “labeled” herein is meant that a compound has at least one element, isotope or chemical compound attached to enable the detection of the compound. In general, labels fall into three classes: a) isotopic labels, which may be radioactive or heavy isotopes; b) immune labels, which may be antibodies or antigens; and c) colored or fluorescent dyes. The labels may be incorporated into the CA nucleic acids, proteins and antibodies at any position. For example, the label should be capable of producing, either directly or indirectly, a detectable signal. The detectable moiety may be a radioisotope, such as ³H, ¹⁴C, ³²P, ³⁵S, or ¹²⁵I, a fluorescent or chemiluminescent compound, such as fluorescein isothiocyanate, rhodamine, or luciferin, or an enzyme, such as alkaline phosphatase, beta-galactosidase or horseradish peroxidase. Any method known in the art for conjugating the antibody to the label may be employed, including those methods described by Hunter et al., Nature, 144:945 (1962); David et al., Biochemistry, 13:1014 (1974); Pain et al., J. Immunol. Meth., 40:219 (1981); and Nygren, J. Histochem. and Cytochem., 30:407 (1982).

[0084] Accordingly, the present invention also provides CA protein sequences. An CA protein of the present invention may be identified in several ways. “Protein” in this sense includes proteins, polypeptides, and peptides. As will be appreciated by those in the art, the nucleic acid sequences of the invention can be used to generate protein sequences. There are a variety of ways to do this, including cloning the entire gene and verifying its frame and amino acid sequence, or by comparing it to known sequences to search for homology to provide a frame, assuming the CA protein has homology to some protein in the database being used. Generally, the nucleic acid sequences are input into a program that will search all three frames for homology. This is done in a preferred embodiment using the following NCBI Advanced BLAST parameters. The program is blastx or blastn. The database is nr. The input data is as “Sequence in FASTA format”. The organism list is “none”. The “expect” is 10; the filter is default. The “descriptions” is 500, the “alignments” is 500, and the “alignment view” is pairwise. The “query Genetic Codes” is standard (1). The matrix is BLOSUM62; gap existence cost is 11, per residue gap cost is 1; and the lambda ratio is 0.85 default. This results in the generation of a putative protein sequence.

[0085] Also included within one embodiment of CA proteins are amino acid variants of the naturally occurring sequences, as determined herein. Preferably, the variants are preferably greater than about 75% homologous to the wild-type sequence, more preferably greater than about 80%, even more preferably greater than about 85% and most preferably greater than 90%. In some embodiments the homology will be as high as about 93 to 95 or 98%. As for nucleic acids, homology in this context means sequence similarity or identity, with identity being preferred. This homology will be determined using standard techniques known in the art as are outlined above for the nucleic acid homologies.

[0086] CA proteins of the present invention may be shorter or longer than the wild type amino acid sequences. Thus, in a preferred embodiment, included within the definition of CA proteins are portions or fragments of the wild type sequences herein. In addition, as outlined above, the CA nucleic acids of the invention may be used to obtain additional coding regions, and thus additional protein sequence, using techniques known in the art.

[0087] In a preferred embodiment, the CA proteins are derivative or variant CA proteins as compared to the wild-type sequence. That is, as outlined more fully below, the derivative CA peptide will contain at least one amino acid substitution, deletion or insertion, with amino acid substitutions being particularly preferred. The amino acid substitution, insertion or deletion may occur at any residue within the CA peptide.

[0088] Also included in an embodiment of CA proteins of the present invention are amino acid sequence variants. These variants fall into one or more of three classes: substitutional, insertional or deletional variants. These variants ordinarily are prepared by site specific mutagenesis of nucleotides in the DNA encoding the CA protein, using cassette or PCR mutagenesis or other techniques well known in the art, to produce DNA encoding the variant, and thereafter expressing the DNA in recombinant cell culture as outlined above. However, variant CA protein fragments having up to about 100-150 residues may be prepared by in vitro synthesis using established techniques. Amino acid sequence variants are characterized by the predetermined nature of the variation, a feature that sets them apart from naturally occurring allelic or interspecies variation of the CA protein amino acid sequence. The variants typically exhibit the same qualitative biological activity as the naturally occurring analogue, although variants can also be selected which have modified characteristics as will be more fully outlined below.

[0089] While the site or region for introducing an amino acid sequence variation is predetermined, the mutation per se need not be predetermined. For example, in order to optimize the performance of a mutation at a given site, random mutagenesis may be conducted at the target codon or region and the expressed CA variants screened for the optimal combination of desired activity. Techniques for making substitution mutations at predetermined sites in DNA having a known sequence are well known, for example, M13 primer mutagenesis and LAR mutagenesis. Screening of the mutants is done using assays of CA protein activities.

[0090] Amino acid substitutions are typically of single residues; insertions usually will be on the order of from about 1 to 20 amino acids, although considerably larger insertions may be tolerated. Deletions range from about 1 to about 20 residues, although in some cases deletions may be much larger.

[0091] Substitutions, deletions, insertions or any combination thereof may be used to arrive at a final derivative. Generally these changes are done on a few amino acids to minimize the alteration of the molecule. However, larger changes may be tolerated in certain circumstances. When small alterations in the characteristics of the CA protein are desired, substitutions are generally made in accordance with the following chart:

Chart I

| Original Residue | Exemplary Substitutions |
|---|---|
| Ala | Ser |
| Arg | Lys |
| Asn | Gln, His |
| Asp | Glu |
| Cys | Ser |
| Gln | Asn |
| Glu | Asp |
| Gly | Pro |
| His | Asn, Gln |
| Ile | Leu, Val |
| Leu | Ile, Val |
| Lys | Arg, Gln, Glu |
| Met | Leu, Ile |
| Phe | Met, Leu, Tyr |
| Ser | Thr |
| Thr | Ser |
| Trp | Tyr |
| Tyr | Trp, Phe |
| Val | Ile, Leu |

[0092] Substantial changes in function or immunological identity are made by selecting substitutions that are less conservative than those shown in Chart I. For example, substitutions may be made which more significantly affect: the structure of the polypeptide backbone in the area of the alteration, for example the alpha-helical or beta-sheet structure; the charge or hydrophobicity of the molecule at the target site; or the bulk of the side chain. The substitutions which in general are expected to produce the greatest changes in the polypeptide's properties are those in which (a) a hydrophilic residue, e.g. seryl or threonyl is substituted for (or by) a hydrophobic residue, e.g. leucyl, isoleucyl, phenylalanyl, valyl or alanyl; (b) a cysteine or proline is substituted for (or by) any other residue; (c) a residue having an electropositive side chain, e.g. lysyl, arginyl, or histidyl, is substituted for (or by) an electronegative residue, e.g. glutamyl or aspartyl; or (d) a residue having a bulky side chain, e.g. phenylalanine, is substituted for (or by) one not having a side chain, e.g. glycine.

[0093] The variants typically exhibit the same qualitative biological activity and will elicit the same immune response as the naturally-occurring analogue, although variants also are selected to modify the characteristics of the CA proteins as needed. Alternatively, the variant may be designed such that the biological activity of the CA protein is altered. For example, glycosylation sites may be altered or removed, dominant negative mutations created, etc.

[0094] Covalent modifications of CA polypeptides are included within the scope of this invention, for example for use in screening. One type of covalent modification includes reacting targeted amino acid residues of an CA polypeptide with an organic derivatizing agent that is capable of reacting with selected side chains or the N-or C-terminal residues of an CA polypeptide. Derivatization with bifunctional agents is useful, for instance, for crosslinking CA polypeptides to a water-insoluble support matrix or surface for use in the method for purifying anti-CA antibodies or screening assays, as is more fully described below. Commonly used crosslinking agents include, e.g., 1,1-bis(diazoacetyl)-2-phenylethane, glutaraldehyde, N-hydroxysuccinimide esters, for example, esters with 4-azidosalicylic acid, homobifunctional imidoesters, including disuccinimidyl esters such as 3,3′-dithiobis(succinimidylpropionate), bifunctional maleimides such as bis-N-maleimido-1,8-octane and agents such as methyl-3-[(p-azidophenyl)dithio]propioimidate.

[0095] Other modifications include deamidation of glutaminyl and asparaginyl residues to the corresponding glutamyl and aspartyl residues, respectively, hydroxylation of proline and lysine, phosphorylation of hydroxyl groups of seryl, threonyl or tyrosyl residues, methylation of the a-amino groups of lysine, arginine, and histidine side chains [T. E. Creighton, Proteins: Structure and Molecular Properties, W. H. Freeman & Co., San Francisco, pp. 79-86 (1983)], acetylation of the N-terminal amine, and amidation of any C-terminal carboxyl group.

[0096] Another type of covalent modification of the CA polypeptide included within the scope of this invention comprises altering the native glycosylation pattern of the polypeptide. “Altering the native glycosylation pattern” is intended for purposes herein to mean deleting one or more carbohydrate moieties found in native sequence CA polypeptide, and/or adding one or more glycosylation sites that are not present in the native sequence CA polypeptide.

[0097] Addition of glycosylation sites to CA polypeptides may be accomplished by altering the amino acid sequence thereof. The alteration may be made, for example, by the addition of, or substitution by, one or more serine or threonine residues to the native sequence CA polypeptide (for O-linked glycosylation sites). The CA amino acid sequence may optionally be altered through changes at the DNA level, particularly by mutating the DNA encoding the CA polypeptide at preselected bases such that codons are generated that will translate into the desired amino acids.

[0098] Another means of increasing the number of carbohydrate moieties on the CA polypeptide is by chemical or enzymatic coupling of glycosides to the polypeptide. Such methods are described in the art, e.g., in WO 87/05330 published Sep. 11, 1987, and in Aplin and Wriston, LA Crit. Rev. Biochem., pp. 259-306 (1981).

[0099] Removal of carbohydrate moieties present on the CA polypeptide may be accomplished chemically or enzymatically or by mutational substitution of codons encoding for amino acid residues that serve as targets for glycosylation. Chemical deglycosylation techniques are known in the art and described, for instance, by Hakimuddin, et al., Arch. Biochem. Biophys., 259:52 (1987) and by Edge et al., Anal. Biochem., 118:131 (1981). Enzymatic cleavage of carbohydrate moieties on polypeptides can be achieved by the use of a variety of endo-and exo-glycosidases as described by Thotakura et al., Meth. Enzymol., 138:350 (1987).

[0100] Another type of covalent modification of CA comprises linking the CA polypeptide to one of a variety of nonproteinaceous polymers, e.g., polyethylene glycol, polypropylene glycol, or polyoxyalkylenes, in the manner set forth in U.S. Pat. Nos. 4,640,835; 4,496,689; 4,301,144; 4,670,417; 4,791,192 or 4,179,337.

[0101] CA polypeptides of the present invention may also be modified in a way to form chimeric molecules comprising an CA polypeptide fused to another, heterologous polypeptide or amino acid sequence. In one embodiment, such a chimeric molecule comprises a fusion of an CA polypeptide with a tag polypeptide which provides an epitope to which an anti-tag antibody can selectively bind. The epitope tag is generally placed at the amino-or carboxyl-terminus of the CA polypeptide, although internal fusions may also be tolerated in some instances. The presence of such epitope-tagged forms of an CA polypeptide can be detected using an antibody against the tag polypeptide. Also, provision of the epitope tag enables the CA polypeptide to be readily purified by affinity purification using an anti-tag antibody or another type of affinity matrix that binds to the epitope tag. In an alternative embodiment, the chimeric molecule may comprise a fusion of an CA polypeptide with an immunoglobulin or a particular region of an immunoglobulin. For a bivalent form of the chimeric molecule, such a fusion could be to the Fc region of an IgG molecule.

[0102] Various tag polypeptides and their respective antibodies are well known in the art. Examples include poly-histidine (poly-his) or poly-histidine-glycine (poly-his-gly) tags; the flu HA tag polypeptide and its antibody 12CA5 [Field et al., Mol. Cell. Biol., 8:2159-2165 (1988)]; the c-myc tag and the 8F9, 3C7, 6E10, G4, B7 and 9E10 antibodies thereto [Evan et al., Molecular and Cellular Biology, 5:3610-3616 (1985)]; and the Herpes Simplex virus glycoprotein D (gD) tag and its antibody [Paborsky et al., Protein Engineering, 3(6):547-553 (1990)]. Other tag polypeptides include the Flag-peptide [Hopp et al., BioTechnology, 6:1204-1210 (1988)]; the KT3 epitope peptide [Martin et al., Science, 255:192-194 (1992)]; tubulin epitope peptide [Skinner et al., J. Biol. Chem., 266:15163-15166 (1991)]; and the T7 gene 10 protein peptide tag [Lutz-Freyermuth et al., Proc. Natl. Acad. Sci. USA, 87:6393-6397 (1990)].

[0103] Also included with the definition of CA protein in one embodiment are other CA proteins of the CA family, and CA proteins from other organisms, which are cloned and expressed as outlined below. Thus, probe or degenerate polymerase chain reaction (PCR) primer sequences may be used to find other related CA proteins from humans or other organisms. As will be appreciated by those in the art, particularly useful probe and/or PCR primer sequences include the unique areas of the CA nucleic acid sequence. As is generally known in the art, preferred PCR primers are from about 15 to about 35 nucleotides in length, with from about 20 to about 30 being preferred, and may contain inosine as needed. The conditions for the PCR reaction are well known in the art.

[0104] In addition, as is outlined herein, CA proteins can be made that are longer than those encoded by the nucleic acids of the figures, for example, by the elucidation of additional sequences, the addition of epitope or purification tags, the addition of other fusion sequences, etc.

[0105] CA proteins may also be identified as being encoded by CA nucleic acids. Thus, CA proteins are encoded by nucleic acids that will hybridize to the sequences of the sequence listings, or their complements, as outlined herein.

[0106] In a preferred embodiment, the invention provides CA antibodies. In a preferred embodiment, when the CA protein is to be used to generate antibodies, for example for immunotherapy, the CA protein should share at least one epitope or determinant with the full length protein. By “epitope” or “determinant” herein is meant a portion of a protein which will generate and/or bind an antibody or T-cell receptor in the context of MHC. Thus, in most instances, antibodies made to a smaller CA protein will be able to bind to the full length protein. In a preferred embodiment, the epitope is unique; that is, antibodies generated to a unique epitope show little or no cross-reactivity.

[0107] In one embodiment, the term “antibody” includes antibody fragments, as are known in the art, including Fab, Fab₂, single chain antibodies (Fv for example), chimeric antibodies, etc., either produced by the modification of whole antibodies or those synthesized de novo using recombinant DNA technologies.

[0108] Methods of preparing polyclonal antibodies are known to the skilled artisan. Polyclonal antibodies can be raised in a mammal, for example, by one or more injections of an immunizing agent and, if desired, an adjuvant. Typically, the immunizing agent and/or adjuvant will be injected in the mammal by multiple subcutaneous or intraperitoneal injections. The immunizing agent may include a protein encoded by a nucleic acid of the figures or fragment thereof or a fusion protein thereof. It may be useful to conjugate the immunizing agent to a protein known to be immunogenic in the mammal being immunized. Examples of such immunogenic proteins include but are not limited to keyhole limpet hemocyanin, serum albumin, bovine thyroglobulin, and soybean trypsin inhibitor. Examples of adjuvants which may be employed include Freund's complete adjuvant and MPL-TDM adjuvant (monophosphoryl Lipid A, synthetic trehalose dicorynomycolate). The immunization protocol may be selected by one skilled in the art without undue experimentation.

[0109] The antibodies may, alternatively, be monoclonal antibodies. Monoclonal antibodies may be prepared using hybridoma methods, such as those described by Kohler and Milstein, Nature, 256:495 (1975). In a hybridoma method, a mouse, hamster, or other appropriate host animal, is typically immunized with an immunizing agent to elicit lymphocytes that produce or are capable of producing antibodies that will specifically bind to the immunizing agent. Alternatively, the lymphocytes may be immunized in vitro. The immunizing agent will typically include a polypeptide encoded by a nucleic acid of Tables 1-50, or fragment thereof or a fusion protein thereof. Generally, either peripheral blood lymphocytes (“PBLs”) are used if cells of human origin are desired, or spleen cells or lymph node cells are used if non-human mammalian sources are desired. Th e lymphocytes are then fused with an immortalized cell line using a suitable fusing agent, such as polyethylene glycol, to form a hybridoma cell [Goding, Monoclonal Antibodies: Principles and Practice, Academic Press, (1986) pp. 59-103]. Immortalized cell lines are usually transformed mammalian cells, particularly myeloma cells of rodent, bovine and human origin. Usually, rat or mouse myeloma cell lines are employed. The hybridoma cells may be cultured in a suitable culture medium that preferably contains one or more substances that inhibit the growth or survival of the unfused, immortalized cells. For example, if the parental cells lack the enzyme hypoxanthine guanine phosphoribosyl transferase (HGPRT or HPRT), the culture medium for the hybridomas typically will include hypoxanthine, aminopterin, and thymidine (“HAT medium”), which substances prevent the growth of HGPRT-deficient cells.

[0110] In one embodiment, the antibodies are bispecific antibodies. Bispecific antibodies are monoclonal, preferably human or humanized, antibodies that have binding specificities for at least two different antigens. In the present case, one of the binding specificities is for a protein encoded by a nucleic acid of Tables 1-50, or a fragment thereof, the other one is for any other antigen, and preferably for a cell-surface protein or receptor or receptor subunit, preferably one that is tumor specific.

[0111] In a preferred embodiment, the antibodies to CA are capable of reducing or eliminating the biological function of CA, as is described below. That is, the addition of anti-CA antibodies (either polyclonal or preferably monoclonal) to CA (or cells containing CA) may reduce or eliminate the CA activity.

[0112] Generally, at least a 25% decrease in activity is preferred, with at least about 50% being particularly preferred and about a 95-100% decrease being especially preferred.

[0113] In a preferred embodiment the antibodies to the CA proteins are humanized antibodies. Humanized forms of non-human (e.g., murine) antibodies are chimeric molecules of immunoglobulins, immunoglobulin chains or fragments thereof (such as Fv, Fab, Fab′, F(ab′)₂ or other antigen binding subsequences of antibodies) which contain minimal sequence derived from non-human immunoglobulin. Humanized antibodies include human immunoglobulins (recipient antibody) in which residues form a complementary determining region (CDR) of the recipient are replaced by residues from a CDR of a non-human species (donor antibody) such as mouse, rat or rabbit having the desired specificity, affinity and capacity. In some instances, Fv framework residues of the human immunoglobulin are replaced by corresponding non-human residues. Humanized antibodies may also comprise residues which are found neither in the recipient antibody nor in the imported CDR or framework sequences. In general, the humanized antibody will comprise substantially all of at least one, and typically two, variable domains, in which all or substantially all of the CDR regions correspond to those of a non-human immunoglobulin and all or substantially all of the framework residues (FR) regions are those of a human immunoglobulin consensus sequence. The humanized antibody optimally also will comprise at least a portion of an immunoglobulin constant region (Fc), typically that of a human immunoglobulin [Jones et al., Nature, 321:522-525 (1986); Riechmann et al., Nature, 332:323-329 (1988); and Presta, Curr. Op. Struct. Biol., 2:593-596 (1992)].

[0114] Methods for humanizing non-human antibodies are well known in the art. Generally, a humanized antibody has one or more amino acid residues introduced into it from a source which is non-human. These non-human amino acid residues are often referred to as import residues, which are typically taken from an import variable domain. Humanization can be essentially performed following the method of Winter and co-workers [Jones et al., Nature, 321:522-525 (1986); Riechmann et al., Nature, 332:323-327 (1988); Verhoeyen et al., Science, 239:1534-1536 (1988)], by substituting rodent CDRs or CDR sequences for the corresponding sequences of a human antibody. Accordingly, such humanized antibodies are chimeric antibodies (U.S. Pat. No. 4,816,567), wherein substantially less than an intact human variable domain has been substituted by the corresponding sequence from a non-human species. In practice, humanized antibodies are typically human antibodies in which some CDR residues and possibly some FR residues are substituted by residues from analogous sites in rodent antibodies.

[0115] Human antibodies can also be produced using various techniques known in the art, including phage display libraries [Hoogenboom and Winter, J. Mol. Biol., 227:381 (1991); Marks et al., J. Mol. Biol., 222:581 (1991)]. The techniques of Cole et al. and Boerner et al. are also available for the preparation of human monoclonal antibodies [Cole et al., Monoclonal Antibodies and Cancer Therapy, Alan R. Liss, p. 77 (1985) and Boerner et al., J. Immunol., 147(1):86-95 (1991)]. Similarly, human antibodies can be made by introducing human immunoglobulin loci into transgenic animals, e.g., mice in which the endogenous immunoglobulin genes have been partially or completely inactivated. Upon challenge, human antibody production is observed, which closely resembles that seen in humans in all respects, including gene rearrangement, assembly, and antibody repertoire. This approach is described, for example, in U.S. Pat. Nos. 5,545,807; 5,545,806; 5,569,825; 5,625,126; 5,633,425; 5,661,016, and in the following scientific publications: Marks et al., Bio/Technology 10, 779-783 (1992); Lonberg et al., Nature 368 856-859 (1994); Morrison, Nature 368, 812-13 (1994); Fishwild et al., Nature Biotechnology 14, 845-51 (1996); Neuberger, Nature Biotechnology 14, 826 (1996); Lonberg and Huszar, Intern. Rev. Immunol. 1365-93 (1995).

[0116] By immunotherapy is meant treatment of a carcinoma with an antibody raised against an CA protein. As used herein, immunotherapy can be passive or active. Passive immunotherapy as defined herein is the passive transfer of antibody to a recipient (patient). Active immunization is the induction of antibody and/or T-cell responses in a recipient (patient). Induction of an immune response is the result of providing the recipient with an antigen to which antibodies are raised. As appreciated by one of ordinary skill in the art, the antigen may be provided by injecting a polypeptide against which antibodies are desired to be raised into a recipient, or contacting the recipient with a nucleic acid capable of expressing the antigen and under conditions for expression of the antigen.

[0117] In a preferred embodiment, oncogenes which encode secreted growth factors may be inhibited by raising antibodies against CA proteins that are secreted proteins as described above. Without being bound by theory, antibodies used for treatment, bind and prevent the secreted protein from binding to its receptor, thereby inactivating the secreted CA protein.

[0118] In another preferred embodiment, the CA protein to which antibodies are raised is a transmembrane protein. Without being bound by theory, antibodies used for treatment, bind the extracellular domain of the CA protein and prevent it from binding to other proteins, such as circulating ligands or cell-associated molecules. The antibody may cause down-regulation of the transmembrane CA protein. As will be appreciated by one of ordinary skill in the art, the antibody may be a competitive, non-competitive or uncompetitive inhibitor of protein binding to the extracellular domain of the CA protein. The antibody is also an antagonist of the CA protein. Further, the antibody prevents activation of the transmembrane CA protein. In one aspect, when the antibody prevents the binding of other molecules to the CA protein, the antibody prevents growth of the cell. The antibody may also sensitize the cell to cytotoxic agents, including, but not limited to TNF-α, TNF-β, IL-1, INF-γand IL-2, or chemotherapeutic agents including 5FU, vinblastine, actinomycin D, cisplatin, methotrexate, and the like. In some instances the antibody belongs to a sub-type that activates serum complement when complexed with the transmembrane protein thereby mediating cytotoxicity. Thus, carcinomas may be treated by administering to a patient antibodies directed against the transmembrane CA protein.

[0119] In another preferred embodiment, the antibody is conjugated to a therapeutic moiety. In one aspect the therapeutic moiety is a small molecule that modulates the activity of the CA protein. In another aspect the therapeutic moiety modulates the activity of molecules associated with or in close proximity to the CA protein. The therapeutic moiety may inhibit enzymatic activity such as protease or protein kinase activity associated with carcinoma.

[0120] In a preferred embodiment, the therapeutic moiety may also be a cytotoxic agent. In this method, targeting the cytotoxic agent to tumor tissue or cells, results in a reduction in the number of afflicted cells, thereby reducing symptoms associated with carcinomas, including lymphoma. Cytotoxic agents are numerous and varied and include, but are not limited to, cytotoxic drugs or toxins or active fragments of such toxins. Suitable toxins and their corresponding fragments include diphtheria A chain, exotoxin A chain, ricin A chain, abrin A chain, curcin, crotin, phenomycin, enomycin and the like. Cytotoxic agents also include radiochemicals made by conjugating radioisotopes to antibodies raised against CA proteins, or binding of a radionuclide to a chelating agent that has been covalently attached to the antibody. Targeting the therapeutic moiety to transmembrane CA proteins not only serves to increase the local concentration of therapeutic moiety in the carcinoma of interest, i.e., lymphoma, but also serves to reduce deleterious side effects that may be associated with the therapeutic moiety.

[0121] In another preferred embodiment, the CA protein against which the antibodies are raised is an intracellular protein. In this case, the antibody may be conjugated to a protein which facilitates entry into the cell. In one case, the antibody enters the cell by endocytosis. In another embodiment, a nucleic acid encoding the antibody is administered to the individual or cell. Moreover, wherein the CA protein can be targeted within a cell, i.e., the nucleus, an antibody thereto contains a signal for that target localization, i.e., a nuclear localization signal.

[0122] The CA antibodies of the invention specifically bind to CA proteins. By “specifically bind” herein is meant that the antibodies bind to the protein with a binding constant in the range of at least 10⁻⁴-10⁻⁶ M⁻¹, with a preferred range being 10⁻⁷-10⁻⁹ M⁻¹.

[0123] In a preferred embodiment, the CA protein is purified or isolated after expression. CA proteins may be isolated or purified in a variety of ways known to those skilled in the art depending on what other components are present in the sample. Standard purification methods include electrophoretic, molecular, immunological and chromatographic techniques, including ion exchange, hydrophobic, affinity, and reverse-phase HPLC chromatography, and chromatofocusing. For example, the CA protein may be purified using a standard anti-CA antibody column. Ultrafiltration and diafiltration techniques, in conjunction with protein concentration, are also useful. For general guidance in suitable purification techniques, see Scopes, R., Protein Purification, Springer-Verlag, NY (1982). The degree of purification necessary will vary depending on the use of the CA protein. In some instances no purification will be necessary.

[0124] Once expressed and purified if necessary, the CA proteins and nucleic acids are useful in a number of applications.

[0125] In one aspect, the expression levels of genes are determined for different cellular states in the carcinoma phenotype; that is, the expression levels of genes in normal tissue and in carcinoma tissue (and in some cases, for varying severities of lymphoma that relate to prognosis, as outlined below) are evaluated to provide expression profiles. An expression profile of a particular cell state or point of development is essentially a “fingerprint” of the state; while two states may have any particular gene similarly expressed, the evaluation of a number of genes simultaneously allows the generation of a gene expression profile that is unique to the state of the cell. By comparing expression profiles of cells in different states, information regarding which genes are important (including both up- and down-regulation of genes) in each of these states is obtained. Then, diagnosis may be done or confirmed: does tissue from a particular patient have the gene expression profile of normal or carcinoma tissue.

[0126] “Differential expression,” or grammatical equivalents as used herein, refers to both qualitative as well as quantitative differences in the genes temporal and/or cellular expression patterns within and among the cells. Thus, a differentially expressed gene can qualitatively have its expression altered, including an activation or inactivation, in, for example, normal versus carcinoma tissue. That is, genes may be turned on or turned off in a particular state, relative to another state. As is apparent to the skilled artisan, any comparison of two or more states can be made. Such a qualitatively regulated gene will exhibit an expression pattern within a state or cell type which is detectable by standard techniques in one such state or cell type, but is not detectable in both. Alternatively, the determination is quantitative in that expression is increased or decreased; that is, the expression of the gene is either upregulated, resulting in an increased amount of transcript, or downregulated, resulting in a decreased amount of transcript. The degree to which expression differs need only be large enough to quantify via standard characterization techniques as outlined below, such as by use of Affymetrix GeneChip® expression arrays, Lockhart, Nature Biotechnology, 14:1675-1680 (1996), hereby expressly incorporated by reference. Other techniques include, but are not limited to, quantitative reverse transcriptase PCR, Northern analysis and RNase protection. As outlined above, preferably the change in expression (i.e. upregulation or downregulation) is at least about 50%, more preferably at least about 100%, more preferably at least about 150%, more preferably, at least about 200%, with from 300 to at least 1000% being especially preferred.

[0127] As will be appreciated by those in the art, this may be done by evaluation at either the gene transcript, or the protein level; that is, the amount of gene expression may be monitored using nucleic acid probes to the DNA or RNA equivalent of the gene transcript, and the quantification of gene expression levels, or, alternatively, the final gene product itself (protein) can be monitored, for example through the use of antibodies to the CA protein and standard immunoassays (ELISAs, etc.) or other techniques, including mass spectroscopy assays, 2D gel electrophoresis assays, etc. Thus, the proteins corresponding to CA genes, i.e. those identified as being important in a particular carcinoma phenotype, i.e., lymphoma, can be evaluated in a diagnostic test specific for that carcinoma.

[0128] In a preferred embodiment, gene expression monitoring is done and a number of genes, i.e. an expression profile, is monitored simultaneously, although multiple protein expression monitoring can be done as well. Similarly, these assays may be done on an individual basis as well.

[0129] In this embodiment, the CA nucleic acid probes may be attached to biochips as outlined herein for the detection and quantification of CA sequences in a particular cell. The assays are done as is known in the art. As will be appreciated by those in the art, any number of different CA sequences may be used as probes, with single sequence assays being used in some cases, and a plurality of the sequences described herein being used in other embodiments. In addition, while solid-phase assays are described, any number of solution based assays may be done as well.

[0130] In a preferred embodiment, both solid and solution based assays may be used to detect CA sequences that are up-regulated or down-regulated in carcinomas as compared to normal tissue. In instances where the CA sequence has been altered but shows the same expression profile or an altered expression profile, the protein will be detected as outlined herein.

[0131] In a preferred embodiment nucleic acids encoding the CA protein are detected. Although DNA or RNA encoding the CA protein may be detected, of particular interest are methods wherein the mRNA encoding a CA protein is detected. The presence of mRNA in a sample is an indication that the CA gene has been transcribed to form the mRNA, and suggests that the protein is expressed. Probes to detect the mRNA can be any nucleotide/deoxynucleotide probe that is complementary to and base pairs with the mRNA and includes but is not limited to oligonucleotides, cDNA or RNA. Probes also should contain a detectable label, as defined herein. In one method the mRNA is detected after immobilizing the nucleic acid to be examined on a solid support such as nylon membranes and hybridizing the probe with the sample. Following washing to remove the non-specifically bound probe, the label is detected. In another method detection of the mRNA is performed in situ. In this method permeabilized cells or tissue samples are contacted with a detectably labeled nucleic acid probe for sufficient time to allow the probe to hybridize with the target mRNA. Following washing to remove the non-specifically bound probe, the label is detected. For example a digoxygenin labeled riboprobe (RNA probe) that is complementary to the mRNA encoding a CA protein is detected by binding the digoxygenin with an anti-digoxygenin secondary antibody and developed with nitro blue tetrazolium and 5-bromo-4-chloro-3-indoyl phosphate.

[0132] In a preferred embodiment, any of the three classes of proteins as described herein (secreted, transmembrane or intracellular proteins) are used in diagnostic assays. The CA proteins, antibodies, nucleic acids, modified proteins and cells containing CA sequences are used in diagnostic assays.

[0133] This can be done on an individual gene or corresponding polypeptide level, or as sets of assays.

[0134] As described and defined herein, CA proteins find use as markers of carcinomas, including lymphomas such as, but not limited to, Hodgkin's and non-Hodgkin lymphoma. Detection of these proteins in putative carcinoma tissue or patients allows for a determination or diagnosis of the type of carcinoma. Numerous methods known to those of ordinary skill in the art find use in detecting carcinomas. In one embodiment, antibodies are used to detect CA proteins. A preferred method separates proteins from a sample or patient by electrophoresis on a gel (typically a denaturing and reducing protein gel, but may be any other type of gel including isoelectric focusing gels and the like). Following separation of proteins, the CA protein is detected by immunoblotting with antibodies raised against the CA protein. Methods of immunoblotting are well known to those of ordinary skill in the art.

[0135] In another preferred method, antibodies to the CA protein find use in in situ imaging techniques. In this method cells are contacted with from one to many antibodies to the CA protein(s). Following washing to remove non-specific antibody binding, the presence of the antibody or antibodies is detected. In one embodiment the antibody is detected by incubating with a secondary antibody that contains a detectable label. In another method the primary antibody to the CA protein(s) contains a detectable label. In another preferred embodiment each one of multiple primary antibodies contains a distinct and detectable label. This method finds particular use in simultaneous screening for a plurality of CA proteins. As will be appreciated by one of ordinary skill in the art, numerous other histological imaging techniques are useful in the invention.

[0136] In a preferred embodiment the label is detected in a fluorometer which has the ability to detect and distinguish emissions of different wavelengths. In addition, a fluorescence activated cell sorter (FACS) can be used in the method.

[0137] In another preferred embodiment, antibodies find use in diagnosing carcinomas from blood samples.

[0138] As previously described, certain CA proteins are secreted/circulating molecules. Blood samples, therefore, are useful as samples to be probed or tested for the presence of secreted CA proteins. Antibodies can be used to detect the CA proteins by any of the previously described immunoassay techniques including ELISA, immunoblotting (Western blotting), immunoprecipitation, BIACORE technology and the like, as will be appreciated by one of ordinary skill in the art.

[0139] In a preferred embodiment, in situ hybridization of labeled CA nucleic acid probes to tissue arrays is done. For example, arrays of tissue samples, including CA tissue and/or normal tissue, are made. In situ hybridization as is known in the art can then be done.

[0140] It is understood that when comparing the expression fingerprints between an individual and a standard, the skilled artisan can make a diagnosis as well as a prognosis. It is further understood that the genes which indicate the diagnosis may differ from those which indicate the prognosis.

[0141] In a preferred embodiment, the CA proteins, antibodies, nucleic acids, modified proteins and cells containing CA sequences are used in prognosis assays. As above, gene expression profiles can be generated that correlate to carcinoma, especially lymphoma, severity, in terms of long term prognosis. Again, this may be done on either a protein or gene level, with the use of genes being preferred. As above, the CA probes are attached to biochips for the detection and quantification of CA sequences in a tissue or patient. The assays proceed as outlined for diagnosis.

[0142] In a preferred embodiment, any of the CA sequences as described herein are used in drug screening assays. The CA proteins, antibodies, nucleic acids, modified proteins and cells containing CA sequences are used in drug screening assays or by evaluating the effect of drug candidates on a “gene expression profile” or expression profile of polypeptides. In one embodiment, the expression profiles are used, preferably in conjunction with high throughput screening techniques to allow monitoring for expression profile genes after treatment with a candidate agent, Zlokarnik, et al., Science 279, 84-8 (1998), Heid, et al., Genome Res., 6:986-994 (1996).

[0143] In a preferred embodiment, the CA proteins, antibodies, nucleic acids, modified proteins and cells containing the native or modified CA proteins are used in screening assays. That is, the present invention provides novel methods for screening for compositions which modulate the carcinoma phenotype. As above, this can be done by screening for modulators of gene expression or for modulators of protein activity. Similarly, this may be done on an individual gene or protein level or by evaluating the effect of drug candidates on a “gene expression profile”. In a preferred embodiment, the expression profiles are used, preferably in conjunction with high throughput screening techniques to allow monitoring for expression profile genes after treatment with a candidate agent, see Zlokarnik, supra.

[0144] Having identified the CA genes herein, a variety of assays to evaluate the effects of agents on gene expression may be executed. In a preferred embodiment, assays may be run on an individual gene or protein level. That is, having identified a particular gene as aberrantly regulated in carcinoma, candidate bioactive agents may be screened to modulate the genes response. “Modulation” thus includes both an increase and a decrease in gene expression or activity. The preferred amount of modulation will depend on the original change of the gene expression in normal versus tumor tissue, with changes of at least 10%, preferably 50%, more preferably 100-300%, and in some embodiments 300-1000% or greater. Thus, if a gene exhibits a 4 fold increase in tumor compared to normal tissue, a decrease of about four fold is desired; a 10 fold decrease in tumor compared to normal tissue gives a 10 fold increase in expression for a candidate agent is desired, etc. Alternatively, where the CA sequence has been altered but shows the same expression profile or an altered expression profile, the protein will be detected as outlined herein.

[0145] As will be appreciated by those in the art, this may be done by evaluation at either the gene or the protein level; that is, the amount of gene expression may be monitored using nucleic acid probes and the quantification of gene expression levels, or, alternatively, the level of the gene product itself can be monitored, for example through the use of antibodies to the CA protein and standard immunoassays. Alternatively, binding and bioactivity assays with the protein may be done as outlined below.

[0146] In a preferred embodiment, gene expression monitoring is done and a number of genes, i.e. an expression profile, is monitored simultaneously, although multiple protein expression monitoring can be done as well.

[0147] In this embodiment, the CA nucleic acid probes are attached to biochips as outlined herein for the detection and quantification of CA sequences in a particular cell. The assays are further described below.

[0148] Generally, in a preferred embodiment, a candidate bioactive agent is added to the cells prior to analysis. Moreover, screens are provided to identify a candidate bioactive agent which modulates a particular type of carcinoma, modulates CA proteins, binds to a CA protein, or interferes between the binding of a CA protein and an antibody.

[0149] The term “candidate bioactive agent” or “drug candidate” or grammatical equivalents as used herein describes any molecule, e.g., protein, oligopeptide, small organic or inorganic molecule, polysaccharide, polynucleotide, etc., to be tested for bioactive agents that are capable of directly or indirectly altering either the carcinoma phenotype, binding to and/or modulating the bioactivity of an CA protein, or the expression of a CA sequence, including both nucleic acid sequences and protein sequences. In a particularly preferred embodiment, the candidate agent suppresses a CA phenotype, for example to a normal tissue fingerprint. Similarly, the candidate agent preferably suppresses a severe CA phenotype. Generally a plurality of assay mixtures are run in parallel with different agent concentrations to obtain a differential response to the various concentrations. Typically, one of these concentrations serves as a negative control, i.e., at zero concentration or below the level of detection.

[0150] In one aspect, a candidate agent will neutralize the effect of an CA protein. By “neutralize” is meant that activity of a protein is either inhibited or counter acted against so as to have substantially no effect on a cell.

[0151] Candidate agents encompass numerous chemical classes, though typically they are organic or inorganic molecules, preferably small organic compounds having a molecular weight of more than 100 and less than about 2,500 daltons. Preferred small molecules are less than 2000, or less than 1500 or less than 1000 or less than 500 D. Candidate agents comprise functional groups necessary for structural interaction with proteins, particularly hydrogen bonding, and typically include at least an amine, carbonyl, hydroxyl or carboxyl group, preferably at least two of the functional chemical groups. The candidate agents often comprise cyclical carbon or heterocyclic structures and/or aromatic or polyaromatic structures substituted with one or more of the above functional groups. Candidate agents are also found among biomolecules including peptides, saccharides, fatty acids, steroids, purines, pyrimidines, derivatives, structural analogs or combinations thereof. Particularly preferred are peptides.

[0152] Candidate agents are obtained from a wide variety of sources including libraries of synthetic or natural compounds. For example, numerous means are available for random and directed synthesis of a wide variety of organic compounds and biomolecules, including expression of randomized oligonucleotides. Alternatively, libraries of natural compounds in the form of bacterial, fungal, plant and animal extracts are available or readily produced. Additionally, natural or synthetically produced libraries and compounds are readily modified through conventional chemical, physical and biochemical means. Known pharmacological agents may be subjected to directed or random chemical modifications, such as acylation, alkylation, esterification, amidification to produce structural analogs.

[0153] In a preferred embodiment, the candidate bioactive agents are proteins. By “protein” herein is meant at least two covalently attached amino acids, which includes proteins, polypeptides, oligopeptides and peptides. The protein may be made up of naturally occurring amino acids and peptide bonds, or synthetic peptidomimetic structures. Thus “amino acid”, or “peptide residue”, as used herein means both naturally occurring and synthetic amino acids. For example, homo-phenylalanine, citrulline and noreleucine are considered amino acids for the purposes of the invention. “Amino acid” also includes imino acid residues such as proline and hydroxyproline. The side chains may be in either the (R) or the (S) configuration. In the preferred embodiment, the amino acids are in the (S) or L-configuration. If non-naturally occurring side chains are used, non-amino acid substituents may be used, for example to prevent or retard in vivo degradations.

[0154] In a preferred embodiment, the candidate bioactive agents are naturally occurring proteins or fragments of naturally occurring proteins. Thus, for example, cellular extracts containing proteins, or random or directed digests of proteinaceous cellular extracts, may be used. In this way libraries of procaryotic and eucaryotic proteins may be made for screening in the methods of the invention. Particularly preferred in this embodiment are libraries of bacterial, fungal, viral, and mammalian proteins, with the latter being preferred, and human proteins being especially preferred.

[0155] In a preferred embodiment, the candidate bioactive agents are peptides of from about 5 to about 30 amino acids, with from about 5 to about 20 amino acids being preferred, and from about 7 to about 15 being particularly preferred. The peptides may be digests of naturally occurring proteins as is outlined above, random peptides, or “biased” random peptides. By “randomized” or grammatical equivalents herein is meant that each nucleic acid and peptide consists of essentially random nucleotides and amino acids, respectively. Since generally these random peptides (or nucleic acids, discussed below) are chemically synthesized, they may incorporate any nucleotide or amino acid at any position. The synthetic process can be designed to generate randomized proteins or nucleic acids, to allow the formation of all or most of the possible combinations over the length of the sequence, thus forming a library of randomized candidate bioactive proteinaceous agents.

[0156] In one embodiment, the library is fully randomized, with no sequence preferences or constants at any position. In a preferred embodiment, the library is biased. That is, some positions within the sequence are either held constant, or are selected from a limited number of possibilities. For example, in a preferred embodiment, the nucleotides or amino acid residues are randomized within a defined class, for example, of hydrophobic amino acids, hydrophilic residues, sterically biased (either small or large) residues, towards the creation of nucleic acid binding domains, the creation of cysteines, for cross-linking, prolines for SH-3 domains, serines, threonines, tyrosines or histidines for phosphorylation sites, etc., or to purines, etc.

[0157] In a preferred embodiment, the candidate bioactive agents are nucleic acids, as defined above.

[0158] As described above generally for proteins, nucleic acid candidate bioactive agents may be naturally occurring nucleic acids, random nucleic acids, or “biased” random nucleic acids. For example, digests of procaryotic or eucaryotic genomes may be used as is outlined above for proteins.

[0159] In a preferred embodiment, the candidate bioactive agents are organic chemical moieties, a wide variety of which are available in the literature.

[0160] In assays for altering the expression profile of one or more CA genes, after the candidate agent has been added and the cells allowed to incubate for some period of time, the sample containing the target sequences to be analyzed is added to the biochip. If required, the target sequence is prepared using known techniques. For example, the sample may be treated to lyse the cells, using known lysis buffers, electroporation, etc., with purification and/or amplification such as PCR occurring as needed, as will be appreciated by those in the art. For example, an in vitro transcription with labels covalently attached to the nucleosides is done. Generally, the nucleic acids are labeled with a label as defined herein, with biotin-FITC or PE, cy3 and cy5 being particularly preferred.

[0161] In a preferred embodiment, the target sequence is labeled with, for example, a fluorescent, chemiluminescent, chemical, or radioactive signal, to provide a means of detecting the target sequence's specific binding to a probe. The label also can be an enzyme, such as, alkaline phosphatase or horseradish peroxidase, which when provided with an appropriate substrate produces a product that can be detected. Alternatively, the label can be a labeled compound or small molecule, such as an enzyme inhibitor, that binds but is not catalyzed or altered by the enzyme. The label also can be a moiety or compound, such as, an epitope tag or biotin which specifically binds to streptavidin.

[0162] For the example of biotin, the streptavidin is labeled as described above, thereby, providing a detectable signal for the bound target sequence. As known in the art, unbound labeled streptavidin is removed prior to analysis.

[0163] As will be appreciated by those in the art, these assays can be direct hybridization assays or can comprise “sandwich assays”, which include the use of multiple probes, as is generally outlined in U.S. Pat. Nos. 5,681,702, 5,597,909, 5,545,730, 5,594,117, 5,591,584, 5,571,670, 5,580,731, 5,571,670, 5,591,584, 5,624,802, 5,635,352, 5,594,118, 5,359,100, 5,124,246 and 5,681,697, all of which are hereby incorporated by reference. In this embodiment, in general, the target nucleic acid is prepared as outlined above, and then added to the biochip comprising a plurality of nucleic acid probes, under conditions that allow the formation of a hybridization complex.

[0164] A variety of hybridization conditions may be used in the present invention, including high, moderate and low stringency conditions as outlined above. The assays are generally run under stringency conditions which allows formation of the label probe hybridization complex only in the presence of target. Stringency can be controlled by altering a step parameter that is a thermodynamic variable, including, but not limited to, temperature, formamide concentration, salt concentration, chaotropic salt concentration pH, organic solvent concentration, etc.

[0165] These parameters may also be used to control non-specific binding, as is generally outlined in U.S. Pat. No. 5,681,697. Thus it may be desirable to perform certain steps at higher stringency conditions to reduce non-specific binding.

[0166] The reactions outlined herein may be accomplished in a variety of ways, as will be appreciated by those in the art. Components of the reaction may be added simultaneously, or sequentially, in any order, with preferred embodiments outlined below. In addition, the reaction may include a variety of other reagents may be included in the assays. These include reagents like salts, buffers, neutral proteins, e.g. albumin, detergents, etc which may be used to facilitate optimal hybridization and detection, and/or reduce non-specific or background interactions. Also reagents that otherwise improve the efficiency of the assay, such as protease inhibitors, nuclease inhibitors, anti-microbial agents, etc., may be used, depending on the sample preparation methods and purity of the target. In addition, either solid phase or solution based (i.e., kinetic PCR) assays may be used.

[0167] Once the assay is run, the data is analyzed to determine the expression levels, and changes in expression levels as between states, of individual genes, forming a gene expression profile.

[0168] In a preferred embodiment, as for the diagnosis and prognosis applications, having identified the differentially expressed gene(s) or mutated gene(s) important in any one state, screens can be run to alter the expression of the genes individually. That is, screening for modulation of regulation of expression of a single gene can be done. Thus, for example, particularly in the case of target genes whose presence or absence is unique between two states, screening is done for modulators of the target gene expression.

[0169] In addition, screens can be done for novel genes that are induced in response to a candidate agent.

[0170] After identifying a candidate agent based upon its ability to suppress a CA expression pattern leading to a normal expression pattern, or modulate a single CA gene expression profile so as to mimic the expression of the gene from normal tissue, a screen as described above can be performed to identify genes that are specifically modulated in response to the agent. Comparing expression profiles between normal tissue and agent treated CA tissue reveals genes that are not expressed in normal tissue or CA tissue, but are expressed in agent treated tissue. These agent specific sequences can be identified and used by any of the methods described herein for CA genes or proteins. In particular these sequences and the proteins they encode find use in marking or identifying agent treated cells. In addition, antibodies can be raised against the agent induced proteins and used to target novel therapeutics to the treated CA tissue sample.

[0171] Thus, in one embodiment, a candidate agent is administered to a population of CA cells, that thus has an associated CA expression profile. By “administration” or “contacting” herein is meant that the candidate agent is added to the cells in such a manner as to allow the agent to act upon the cell, whether by uptake and intracellular action, or by action at the cell surface. In some embodiments, nucleic acid encoding a proteinaceous candidate agent (i.e. a peptide) may be put into a viral construct such as a retroviral construct and added to the cell, such that expression of the peptide agent is accomplished; see PCT US97/01019, hereby expressly incorporated by reference.

[0172] Once the candidate agent has been administered to the cells, the cells can be washed if desired and are allowed to incubate under preferably physiological conditions for some period of time. The cells are then harvested and a new gene expression profile is generated, as outlined herein.

[0173] Thus, for example, CA tissue may be screened for agents that reduce or suppress the CA phenotype. A change in at least one gene of the expression profile indicates that the agent has an effect on CA activity. By defining such a signature for the CA phenotype, screens for new drugs that alter the phenotype can be devised. With this approach, the drug target need not be known and need not be represented in the original expression screening platform, nor does the level of transcript for the target protein need to change.

[0174] In a preferred embodiment, as outlined above, screens may be done on individual genes and gene products (proteins). That is, having identified a particular differentially expressed gene as important in a particular state, screening of modulators of either the expression of the gene or the gene product itself can be done. The gene products of differentially expressed genes are sometimes referred to herein as “CA proteins” or an “CAP”. The CAP may be a fragment, or alternatively, be the full length protein to the fragment encoded by the nucleic acids of Tables 1-50. Preferably, the CAP is a fragment. In another embodiment, the sequences are sequence variants as further described herein.

[0175] Preferably, the CAP is a fragment of approximately 14 to 24 amino acids long. More preferably the fragment is a soluble fragment. Preferably, the fragment includes a non-transmembrane region. In a preferred embodiment, the fragment has an N-terminal Cys to aid in solubility. In one embodiment, the c-terminus of the fragment is kept as a free acid and the n-terminus is a free amine to aid in coupling, i.e., to cysteine.

[0176] In one embodiment the CA proteins are conjugated to an immunogenic agent as discussed herein. In one embodiment the CA protein is conjugated to BSA.

[0177] In a preferred embodiment, screening is done to alter the biological function of the expression product of the CA gene. Again, having identified the importance of a gene in a particular state, screening for agents that bind and/or modulate the biological activity of the gene product can be run as is more fully outlined below.

[0178] In a preferred embodiment, screens are designed to first find candidate agents that can bind to CA proteins, and then these agents may be used in assays that evaluate the ability of the candidate agent to modulate the CAP activity and the carcinoma phenotype. Thus, as will be appreciated by those in the art, there are a number of different assays which may be run; binding assays and activity assays.

[0179] In a preferred embodiment, binding assays are done. In general, purified or isolated gene product is used; that is, the gene products of one or more CA nucleic acids are made. In general, this is done as is known in the art. For example, antibodies are generated to the protein gene products, and standard immunoassays are run to determine the amount of protein present. Alternatively, cells comprising the CA proteins can be used in the assays.

[0180] Thus, in a preferred embodiment, the methods comprise combining a CA protein and a candidate bioactive agent, and determining the binding of the candidate agent to the CA protein. Preferred embodiments utilize the human or mouse CA protein, although other mammalian proteins may also be used, for example for the development of animal models of human disease. In some embodiments, as outlined herein, variant or derivative CA proteins may be used.

[0181] Generally, in a preferred embodiment of the methods herein, the CA protein or the candidate agent is non-diffusably bound to an insoluble support having isolated sample receiving areas (e.g. a microtiter plate, an array, etc.). The insoluble supports may be made of any composition to which the compositions can be bound, is readily separated from soluble material, and is otherwise compatible with the overall method of screening. The surface of such supports may be solid or porous and of any convenient shape. Examples of suitable insoluble supports include microtiter plates, arrays, membranes and beads. These are typically made of glass, plastic (e.g., polystyrene), polysaccharides, nylon or nitrocellulose, Teflon TM, etc. Microtiter plates and arrays are especially convenient because a large number of assays can be carried out simultaneously, using small amounts of reagents and samples. The particular manner of binding of the composition is not crucial so long as it is compatible with the reagents and overall methods of the invention, maintains the activity of the composition and is nondiffusable. Preferred methods of binding include the use of antibodies (which do not sterically block either the ligand binding site or activation sequence when the protein is bound to the support), direct binding to “sticky” or ionic supports, chemical crosslinking, the synthesis of the protein or agent on the surface, etc. Following binding of the protein or agent, excess unbound material is removed by washing. The sample receiving areas may then be blocked through incubation with bovine serum albumin (BSA), casein or other innocuous protein or other moiety.

[0182] In a preferred embodiment, the CA protein is bound to the support, and a candidate bioactive agent is added to the assay. Alternatively, the candidate agent is bound to the support and the CA protein is added. Novel binding agents include specific antibodies, non-natural binding agents identified in screens of chemical libraries, peptide analogs, etc. Of particular interest are screening assays for agents that have a low toxicity for human cells. A wide variety of assays may be used for this purpose, including labeled in vitro protein-protein binding assays, electrophoretic mobility shift assays, immunoassays for protein binding, functional assays (phosphorylation assays, etc.) and the like.

[0183] The determination of the binding of the candidate bioactive agent to the CA protein may be done in a number of ways. In a preferred embodiment, the candidate bioactive agent is labeled, and binding determined directly. For example, this may be done by attaching all or a portion of the CA protein to a solid support, adding a labeled candidate agent (for example a fluorescent label), washing off excess reagent, and determining whether the label is present on the solid support. Various blocking and washing steps may be utilized as is known in the art.

[0184] By “labeled” herein is meant that the compound is either directly or indirectly labeled with a label which provides a detectable signal, e.g. radioisotope, fluorescers, enzyme, antibodies, particles such as magnetic particles, chemiluminescers, or specific binding molecules, etc. Specific binding molecules include pairs, such as biotin and streptavidin, digoxin and antidigoxin etc. For the specific binding members, the complementary member would normally be labeled with a molecule which provides for detection, in accordance with known procedures, as outlined above. The label can directly or indirectly provide a detectable signal.

[0185] In some embodiments, only one of the components is labeled. For example, the proteins (or proteinaceous candidate agents) may be labeled at tyrosine positions using ¹²⁵I, or with fluorophores.

[0186] Alternatively, more than one component may be labeled with different labels; using ¹²⁵I for the proteins, for example, and a fluorophor for the candidate agents.

[0187] In a preferred embodiment, the binding of the candidate bioactive agent is determined through the use of competitive binding assays. In this embodiment, the competitor is a binding moiety known to bind to the target molecule (i.e. CA protein), such as an antibody, peptide, binding partner, ligand, etc. Under certain circumstances, there may be competitive binding as between the bioactive agent and the binding moiety, with the binding moiety displacing the bioactive agent.

[0188] In one embodiment, the candidate bioactive agent is labeled. Either the candidate bioactive agent, or the competitor, or both, is added first to the protein for a time sufficient to allow binding, if present. Incubations may be performed at any temperature which facilitates optimal activity, typically between 4 and 40° C. Incubation periods are selected for optimum activity, but may also be optimized to facilitate rapid high through put screening. Typically between 0.1 and 1 hour will be sufficient. Excess reagent is generally removed or washed away. The second component is then added, and the presence or absence of the labeled component is followed, to indicate binding.

[0189] In a preferred embodiment, the competitor is added first, followed by the candidate bioactive agent. Displacement of the competitor is an indication that the candidate bioactive agent is binding to the CA protein and thus is capable of binding to, and potentially modulating, the activity of the CA protein. In this embodiment, either component can be labeled. Thus, for example, if the competitor is labeled, the presence of label in the wash solution indicates displacement by the agent. Alternatively, if the candidate bioactive agent is labeled, the presence of the label on the support indicates displacement.

[0190] In an alternative embodiment, the candidate bioactive agent is added first, with incubation and washing, followed by the competitor. The absence of binding by the competitor may indicate that the bioactive agent is bound to the CA protein with a higher affinity. Thus, if the candidate bioactive agent is labeled, the presence of the label on the support, coupled with a lack of competitor binding, may indicate that the candidate agent is capable of binding to the CA protein.

[0191] In a preferred embodiment, the methods comprise differential screening to identity bioactive agents that are capable of modulating the activity of the CA proteins. In this embodiment, the methods comprise combining a CA protein and a competitor in a first sample. A second sample comprises a candidate bioactive agent, a CA protein and a competitor. The binding of the competitor is determined for both samples, and a change, or difference in binding between the two samples indicates the presence of an agent capable of binding to the CA protein and potentially modulating its activity. That is, if the binding of the competitor is different in the second sample relative to the first sample, the agent is capable of binding to the CA protein.

[0192] Alternatively, a preferred embodiment utilizes differential screening to identify drug candidates that bind to the native CA protein, but cannot bind to modified CA proteins. The structure of the CA protein may be modeled, and used in rational drug design to synthesize agents that interact with that site. Drug candidates that affect CA bioactivity are also identified by screening drugs for the ability to either enhance or reduce the activity of the protein.

[0193] Positive controls and negative controls may be used in the assays. Preferably all control and test samples are performed in at least triplicate to obtain statistically significant results. Incubation of all samples is for a time sufficient for the binding of the agent to the protein. Following incubation, all samples are washed free of non-specifically bound material and the amount of bound, generally labeled agent determined. For example, where a radiolabel is employed, the samples may be counted in a scintillation counter to determine the amount of bound compound.

[0194] A variety of other reagents may be included in the screening assays. These include reagents like salts, neutral proteins, e.g. albumin, detergents, etc which may be used to facilitate optimal protein-protein binding and/or reduce non-specific or background interactions. Also reagents that otherwise improve the efficiency of the assay, such as protease inhibitors, nuclease inhibitors, anti-microbial agents, etc., may be used. The mixture of components may be added in any order that provides for the requisite binding.

[0195] Screening for agents that modulate the activity of CA proteins may also be done. In a preferred embodiment, methods for screening for a bioactive agent capable of modulating the activity of CA proteins comprise the steps of adding a candidate bioactive agent to a sample of CA proteins, as above, and determining an alteration in the biological activity of CA proteins. “Modulating the activity of an CA protein” includes an increase in activity, a decrease in activity, or a change in the type or kind of activity present. Thus, in this embodiment, the candidate agent should both bind to CA proteins (although this may not be necessary), and alter its biological or biochemical activity as defined herein. The methods include both in vitro screening methods, as are generally outlined above, and in vivo screening of cells for alterations in the presence, distribution, activity or amount of CA proteins.

[0196] Thus, in this embodiment, the methods comprise combining a CA sample and a candidate bioactive agent, and evaluating the effect on CA activity. By “CA activity” or grammatical equivalents herein is meant one of the CA protein's biological activities, including, but not limited to, its role in tumorigenesis, including cell division, preferably in lymphatic tissue, cell proliferation, tumor growth and transformation of cells. In one embodiment, CA activity includes activation of or by a protein encoded by a nucleic acid of Tables 1-50. An inhibitor of CA activity is the inhibition of any one or more CA activities.

[0197] In a preferred embodiment, the activity of the CA protein is increased; in another preferred embodiment, the activity of the CA protein is decreased. Thus, bioactive agents that are antagonists are preferred in some embodiments, and bioactive agents that are agonists may be preferred in other embodiments.

[0198] In a preferred embodiment, the invention provides methods for screening for bioactive agents capable of modulating the activity of a CA protein. The methods comprise adding a candidate bioactive agent, as defined above, to a cell comprising CA proteins. Preferred cell types include almost any cell. The cells contain a recombinant nucleic acid that encodes a CA protein. In a preferred embodiment, a library of candidate agents are tested on a plurality of cells.

[0199] In one aspect, the assays are evaluated in the presence or absence or previous or subsequent exposure of physiological signals, for example hormones, antibodies, peptides, antigens, cytokines, growth factors, action potentials, pharmacological agents including chemotherapeutics, radiation, carcinogenics, or other cells (i.e. cell-cell contacts). In another example, the determinations are determined at different stages of the cell cycle process.

[0200] In this way, bioactive agents are identified. Compounds with pharmacological activity are able to enhance or interfere with the activity of the CA protein.

[0201] In one embodiment, a method of inhibiting carcinoma cancer cell division, is provided. The method comprises administration of a carcinoma cancer inhibitor.

[0202] In a preferred embodiment, a method of inhibiting lymphoma carcinoma cell division is provided comprising administration of a lymphoma carcinoma inhibitor.

[0203] In another embodiment, a method of inhibiting tumor growth is provided. The method comprises administration of a carcinoma cancer inhibitor. In a particularly preferred embodiment, a method of inhibiting tumor growth in lymphatic tissue is provided comprising administration of a lymphoma inhibitor.

[0204] In a further embodiment, methods of treating cells or individuals with cancer are provided. The method comprises administration of a carcinoma cancer inhibitor. Preferably, the carcinoma is a lymphoma carcinoma.

[0205] In one embodiment, a carcinoma cancer inhibitor is an antibody as discussed above. In another embodiment, the carcinoma cancer inhibitor is an antisense molecule. Antisense molecules as used herein include antisense or sense oligonucleotides comprising a singe-stranded nucleic acid sequence (either RNA or DNA) capable of binding to target mRNA (sense) or DNA (antisense) sequences for carcinoma cancer molecules. Antisense or sense oligonucleotides, according to the present invention, comprise a fragment generally at least about 14 nucleotides, preferably from about 14 to 30 nucleotides. The ability to derive an antisense or a sense oligonucleotide, based upon a cDNA sequence encoding a given protein is described in, for example, Stein and Cohen, Cancer Res. 48:2659, (1988) and van der Krol et al., BioTechniques 6:958, (1988).

[0206] Antisense molecules may be introduced into a cell containing the target nucleotide sequence by formation of a conjugate with a ligand binding molecule, as described in WO 91/04753. Suitable ligand binding molecules include, but are not limited to, cell surface receptors, growth factors, other cytokines, or other ligands that bind to cell surface receptors. Preferably, conjugation of the ligand binding molecule does not substantially interfere with the ability of the ligand binding molecule to bind to its corresponding molecule or receptor, or block entry of the sense or antisense oligonucleotide or its conjugated version into the cell. Alternatively, a sense or an antisense oligonucleotide may be introduced into a cell containing the target nucleic acid sequence by formation of an oligonucleotide-lipid complex, as described in WO 90/10448. It is understood that the use of antisense molecules or knock out and knock in models may also be used in screening assays as discussed above, in addition to methods of treatment.

[0207] The compounds having the desired pharmacological activity may be administered in a physiologically acceptable carrier to a host, as previously described. The agents may be administered in a variety of ways, orally, parenterally e.g., subcutaneously, intraperitoneally, intravascularly, etc. Depending upon the manner of introduction, the compounds may be formulated in a variety of ways. The concentration of therapeutically active compound in the formulation may vary from about 0.1-100% wgt/vol. The agents may be administered alone or in combination with other treatments, i.e., radiation.

[0208] The pharmaceutical compositions can be prepared in various forms, such as granules, tablets, pills, suppositories, capsules, suspensions, salves, lotions and the like. Pharmaceutical grade organic or inorganic carriers and/or diluents suitable for oral and topical use can be used to make up compositions containing the therapeutically-active compounds. Diluents known to the art include aqueous media, vegetable and animal oils and fats. Stabilizing agents, wetting and emulsifying agents, salts for varying the osmotic pressure or buffers for securing an adequate pH value, and skin penetration enhancers can be used as auxiliary agents.

[0209] Without being bound by theory, it appears that the various CA sequences are important in carcinomas. Accordingly, disorders based on mutant or variant CA genes may be determined. In one embodiment, the invention provides methods for identifying cells containing variant CA genes comprising determining all or part of the sequence of at least one endogenous CA genes in a cell. As will be appreciated by those in the art, this may be done using any number of sequencing techniques. In a preferred embodiment, the invention provides methods of identifying the CA genotype of an individual comprising determining all or part of the sequence of at least one CA gene of the individual. This is generally done in at least one tissue of the individual, and may include the evaluation of a number of tissues or different samples of the same tissue. The method may include comparing the sequence of the sequenced CA gene to a known CA gene, i.e., a wild-type gene. As will be appreciated by those in the art, alterations in the sequence of some oncogenes can be an indication of either the presence of the disease, or propensity to develop the disease, or prognosis evaluations.

[0210] The sequence of all or part of the CA gene can then be compared to the sequence of a known CA gene to determine if any differences exist. This can be done using any number of known homology programs, such as Bestfit, etc. In a preferred embodiment, the presence of a difference in the sequence between the CA gene of the patient and the known CA gene is indicative of a disease state or a propensity for a disease state, as outlined herein.

[0211] In a preferred embodiment, the CA genes are used as probes to determine the number of copies of the CA gene in the genome. For example, some cancers exhibit chromosomal deletions or insertions, resulting in an alteration in the copy number of a gene.

[0212] In another preferred embodiment CA genes are used as probes to determine the chromosomal location of the CA genes. Information such as chromosomal location finds use in providing a diagnosis or prognosis in particular when chromosomal abnormalities such as translocations, and the like are identified in CA gene loci.

[0213] Thus, in one embodiment, methods of modulating CA in cells or organisms are provided. In one embodiment, the methods comprise administering to a cell an anti-CA antibody that reduces or eliminates the biological activity of an endogenous CA protein. Alternatively, the methods comprise administering to a cell or organism a recombinant nucleic acid encoding a CA protein. As will be appreciated by those in the art, this may be accomplished in any number of ways. In a preferred embodiment, for example when the CA sequence is down-regulated in carcinoma, the activity of the CA gene is increased by increasing the amount of CA in the cell, for example by overexpressing the endogenous CA or by administering a gene encoding the CA sequence, using known gene-therapy techniques, for example. In a preferred embodiment, the gene therapy techniques include the incorporation of the exogenous gene using enhanced homologous recombination (EHR), for example as described in PCT/US93/03868, hereby incorporated by reference in its entirety. Alternatively, for example when the CA sequence is up-regulated in carcinoma, the activity of the endogenous CA gene is decreased, for example by the administration of a CA antisense nucleic acid.

[0214] In one embodiment, the CA proteins of the present invention may be used to generate polyclonal and monoclonal antibodies to CA proteins, which are useful as described herein. Similarly, the CA proteins can be coupled, using standard technology, to affinity chromatography columns. These columns may then be used to purify CA antibodies. In a preferred embodiment, the antibodies are generated to epitopes unique to a CA protein; that is, the antibodies show little or no cross-reactivity to other proteins. These antibodies find use in a number of applications. For example, the CA antibodies may be coupled to standard affinity chromatography columns and used to purify CA proteins. The antibodies may also be used as blocking polypeptides, as outlined above, since they will specifically bind to the CA protein.

[0215] In one embodiment, a therapeutically effective dose of a CA or modulator thereof is administered to a patient. By “therapeutically effective dose” herein is meant a dose that produces the effects for which it is administered. The exact dose will depend on the purpose of the treatment, and will be ascertainable by one skilled in the art using known techniques. As is known in the art, adjustments for CA degradation, systemic versus localized delivery, and rate of new protease synthesis, as well as the age, body weight, general health, sex, diet, time of administration, drug interaction and the severity of the condition may be necessary, and will be ascertainable with routine experimentation by those skilled in the art.

[0216] A “patient” for the purposes of the present invention includes both humans and other animals, particularly mammals, and organisms. Thus the methods are applicable to both human therapy and veterinary applications. In the preferred embodiment the patient is a mammal, and in the most preferred embodiment the patient is human.

[0217] The administration of the CA proteins and modulators of the present invention can be done in a variety of ways as discussed above, including, but not limited to, orally, subcutaneously, intravenously, intranasally, transdermally, intraperitoneally, intramuscularly, intrapulmonary, vaginally, rectally, or intraocularly. In some instances, for example, in the treatment of wounds and inflammation, the CA proteins and modulators may be directly applied as a solution or spray.

[0218] The pharmaceutical compositions of the present invention comprise a CA protein in a form suitable for administration to a patient. In the preferred embodiment, the pharmaceutical compositions are in a water soluble form, such as being present as pharmaceutically acceptable salts, which is meant to include both acid and base addition salts. “Pharmaceutically acceptable acid addition salt” refers to those salts that retain the biological effectiveness of the free bases and that are not biologically or otherwise undesirable, formed with inorganic acids such as hydrochloric acid, hydrobromic acid, sulfuric acid, nitric acid, phosphoric acid and the like, and organic acids such as acetic acid, propionic acid, glycolic acid, pyruvic acid, oxalic acid, maleic acid, malonic acid, succinic acid, fumaric acid, tartaric acid, citric acid, benzoic acid, cinnamic acid, mandelic acid, methanesulfonic acid, ethanesulfonic acid, p-toluenesulfonic acid, salicylic acid and the like. “Pharmaceutically acceptable base addition salts” include those derived from inorganic bases such as sodium, potassium, lithium, ammonium, calcium, magnesium, iron, zinc, copper, manganese, aluminum salts and the like. Particularly preferred are the ammonium, potassium, sodium, calcium, and magnesium salts. Salts derived from pharmaceutically acceptable organic non-toxic bases include salts of primary, secondary, and tertiary amines, substituted amines including naturally occurring substituted amines, cyclic amines and basic ion exchange resins, such as isopropylamine, trimethylamine, diethylamine, triethylamine, tripropylamine, and ethanolamine.

[0219] The pharmaceutical compositions may also include one or more of the following: carrier proteins such as serum albumin; buffers; fillers such as microcrystalline cellulose, lactose, corn and other starches; binding agents; sweeteners and other flavoring agents; coloring agents; and polyethylene glycol. Additives are well known in the art, and are used in a variety of formulations.

[0220] In a preferred embodiment, CA proteins and modulators are administered as therapeutic agents, and can be formulated as outlined above. Similarly, CA genes (including both the full-length sequence, partial sequences, or regulatory sequences of the CA coding regions) can be administered in gene therapy applications, as is known in the art. These CA genes can include antisense applications, either as gene therapy (i.e. for incorporation into the genome) or as antisense compositions, as will be appreciated by those in the art.

[0221] In a preferred embodiment, CA genes are administered as DNA vaccines, either single genes or combinations of CA genes. Naked DNA vaccines are generally known in the art. Brower, Nature Biotechnology, 16:1304-1305 (1998).

[0222] In one embodiment, CA genes of the present invention are used as DNA vaccines. Methods for the use of genes as DNA vaccines are well known to one of ordinary skill in the art, and include placing a CA gene or portion of a CA gene under the control of a promoter for expression in a patient with carcinoma. The CA gene used for DNA vaccines can encode full-length CA proteins, but more preferably encodes portions of the CA proteins including peptides derived from the CA protein. In a preferred embodiment a patient is immunized with a DNA vaccine comprising a plurality of nucleotide sequences derived from a CA gene. Similarly, it is possible to immunize a patient with a plurality of CA genes or portions thereof as defined herein. Without being bound by theory, expression of the polypeptide encoded by the DNA vaccine, cytotoxic T-cells, helper T-cells and antibodies are induced which recognize and destroy or eliminate cells expressing CA proteins.

[0223] In a preferred embodiment, the DNA vaccines include a gene encoding an adjuvant molecule with the DNA vaccine. Such adjuvant molecules include cytokines that increase the immunogenic response to the CA polypeptide encoded by the DNA vaccine. Additional or alternative adjuvants are known to those of ordinary skill in the art and find use in the invention.

[0224] In another preferred embodiment CA genes find use in generating animal models of carcinomas, particularly lymphoma carcinomas. As is appreciated by one of ordinary skill in the art, when the CA gene identified is repressed or diminished in CA tissue, gene therapy technology wherein antisense RNA directed to the CA gene will also diminish or repress expression of the gene. An animal generated as such serves as an animal model of CA that finds use in screening bioactive drug candidates. Similarly, gene knockout technology, for example as a result of homologous recombination with an appropriate gene targeting vector, will result in the absence of the CA protein. When desired, tissue-specific expression or knockout of the CA protein may be necessary.

[0225] It is also possible that the CA protein is overexpressed in carcinoma. As such, transgenic animals can be generated that overexpress the CA protein. Depending on the desired expression level, promoters of various strengths can be employed to express the transgene. Also, the number of copies of the integrated transgene can be determined and compared for a determination of the expression level of the transgene. Animals generated by such methods find use as animal models of CA and are additionally useful in screening for bioactive molecules to treat carcinoma.

[0226] The CA nucleic acid sequences of the invention are depicted in Tables 1-50. The sequences in each Table include genomic sequence, mRNA and coding sequences for both mouse and human. N/A indicates a gene that has been identified, but for which there has not been a name ascribed. The different sequences are assigned the following SEQ ID Nos:

TABLE 1
(mouse gene: Ccnd2; human gene CCND2)

Mouse genomic sequence (SEQ ID NO: 1)
Mouse mRNA sequence (SEQ ID NO: 2)
Mouse coding sequence (SEQ ID NO: 3)
Human genomic sequence (SEQ ID NO: 4)
Human mRNA sequence (SEQ ID NO: 5)
Human coding sequence (SEQ ID NO: 6)

[0227] TABLE 2
(mouse gene Tnfrsf6; human gene TNFRSF6)

Mouse genomic sequence (SEQ ID NO: 7)
Mouse mRNA sequence (SEQ ID NO: 8)
Mouse coding sequence (SEQ ID NO: 9)
Human genomic sequence (SEQ ID NO: 10)
Human mRNA sequence (SEQ ID NO: 11)
Human coding sequence (SEQ ID NO: 12)

[0228] TABLE 3
(mouse gene Irf2; human gene IRF2)

Mouse genomic sequence (SEQ ID NO: 13)
Mouse mRNA sequence (SEQ ID NO: 14)
Mouse coding sequence (SEQ ID NO: 15)
Human genomic sequence (SEQ ID NO: 16)
Human mRNA sequence (SEQ ID NO: 17)
Human coding sequence (SEQ ID NO: 18)

[0229] TABLE 4
(mouse gene Morf; human gene: MORF)

Mouse genomic sequence (SEQ ID NO: 19)
Mouse mRNA sequence (SEQ ID NO: 20)
Mouse coding sequence (SEQ ID NO: 21)
Human genomic sequence (SEQ ID NO: 22)
Human mRNA sequence (SEQ ID NO: 23)
Human coding sequence (SEQ ID NO: 24)

[0230] TABLE 5
(mouse gene: Runx3; human gene: RUNX3)

Mouse genomic sequence (SEQ ID NO: 25)
Mouse mRNA sequence (SEQ ID NO: 26)
Mouse coding sequence (SEQ ID NO: 27)
Human genomic sequence (SEQ ID NO: 28)
Human mRNA sequence (SEQ ID NO: 29)
Human coding sequence (SEQ ID NO: 30)

[0231] TABLE 6
(mouse gene: Bcl11b; human gene: BCL11B)

Mouse genomic sequence (SEQ ID NO: 31)
Mouse mRNA sequence (SEQ ID NO: 32)
Mouse coding sequence (SEQ ID NO: 33)
Human genomic sequence (SEQ ID NO: 34)
Human mRNA sequence (SEQ ID NO: 35)
Human coding sequence (SEQ ID NO: 36)

[0232] TABLE 7
(mouse gene: Arhgef1; human gene: ARHGEF1)

Mouse genomic sequence (SEQ ID NO: 37)
Mouse mRNA sequence (SEQ ID NO: 38)
Mouse coding sequence (SEQ ID NO: 39)
Human genomic sequence (SEQ ID NO: 40)
Human mRNA sequence (SEQ ID NO: 41)
Human coding sequence (SEQ ID NO: 42)

[0233] TABLE 8
(mouse gene: Ptprk; human gene: PTPRK)

Mouse genomic sequence (SEQ ID NO: 43)
Mouse mRNA sequence (SEQ ID NO: 44)
Mouse coding sequence (SEQ ID NO: 45)
Human genomic sequence (SEQ ID NO: 46)
Human mRNA sequence (SEQ ID NO: 47)
Human coding sequence (SEQ ID NO: 48)

[0234] TABLE 9
(mouse gene: Mcmd5; human gene: MCM5)

Mouse genomic sequence (SEQ ID NO: 49)
Mouse mRNA sequence (SEQ ID NO: 50)
Mouse coding sequence (SEQ ID NO: 51)
Human genomic sequence (SEQ ID NO: 52)
Human mRNA sequence (SEQ ID NO: 53)
Human coding sequence (SEQ ID NO: 54)

[0235] TABLE 10
(mouse gene: Matn4; human gene: MATN4)

Mouse genomic sequence (SEQ ID NO: 55)
Mouse mRNA sequence (SEQ ID NO: 56)
Mouse coding sequence (SEQ ID NO: 57)
Human genomic sequence (SEQ ID NO: 58)
Human mRNA sequence (SEQ ID NO: 59)
Human coding sequence (SEQ ID NO: 60)

[0236] TABLE 11
(mouse gene: Tnfsf11; human gene TNFSF11)

Mouse genomic sequence (SEQ ID NO: 61)
Mouse mRNA sequence (SEQ ID NO: 62)
Mouse coding sequence (SEQ ID NO: 63)
Human genomic sequence (SEQ ID NO: 64)
Human mRNA sequence (SEQ ID NO: 65)
Human coding sequence (SEQ ID NO: 66)

[0237] TABLE 12
(mouse gene: Itk; human gene ITK)

Mouse genomic sequence (SEQ ID NO: 67)
Mouse mRNA sequence (SEQ ID NO: 68)
Mouse coding sequence (SEQ ID NO: 69)
Human genomic sequence (SEQ ID NO: 70)
Human mRNA sequence (SEQ ID NO: 71)
Human coding sequence (SEQ ID NO: 72)

[0238] TABLE 13
(mouse gene: Fish; human gene: N/A)

Mouse genomic sequence (SEQ ID NO: 73)
Mouse mRNA sequence (SEQ ID NO: 74)
Mouse coding sequence (SEQ ID NO: 75)
Human genomic sequence (SEQ ID NO: 76)
Human mRNA sequence (SEQ ID NO: 77)
Human coding sequence (SEQ ID NO: 78)

[0239] TABLE 14
(mouse gene: Egr2; human gene EGR2)

Mouse genomic sequence (SEQ ID NO: 79)
Mouse mRNA sequence (SEQ ID NO: 80)
Mouse coding sequence (SEQ ID NO: 81)
Human genomic sequence (SEQ ID NO: 82)
Human mRNA sequence (SEQ ID NO: 83)
Human coding sequence (SEQ ID NO: 84)

[0240] TABLE 15
(mouse gene: Sos1; human gene SOS1)

Mouse genomic sequence (SEQ ID NO: 85)
Mouse mRNA sequence (SEQ ID NO: 86)
Mouse coding sequence (SEQ ID NO: 87)
Human genomic sequence (SEQ ID NO: 88)
Human mRNA sequence (SEQ ID NO: 89)
Human coding sequence (SEQ ID NO: 90)

[0241] TABLE 16
(mouse gene: Pou2af1; human gene POU2AF1)

Mouse genomic sequence (SEQ ID NO: 91)
Mouse mRNA sequence (SEQ ID NO: 92)
Mouse coding sequence (SEQ ID NO: 93)
Human genomic sequence (SEQ ID NO: 94)
Human mRNA sequence (SEQ ID NO: 95)
Human coding sequence (SEQ ID NO: 96)

[0242] TABLE 17
(mouse gene: Mef2c; human gene MEF2C)

Mouse genomic sequence (SEQ ID NO: 97)
Mouse mRNA sequence (SEQ ID NO: 98)
Mouse coding sequence (SEQ ID NO: 99)
Human genomic sequence (SEQ ID NO: 100)
Human mRNA sequence (SEQ ID NO: 101)
Human coding sequence (SEQ ID NO: 102)

[0243] TABLE 18
(mouse gene: Map3k8; human gene MAP3K8)

Mouse genomic sequence (SEQ ID NO: 103)
Mouse mRNA sequence (SEQ ID NO: 104)
Mouse coding sequence (SEQ ID NO: 105)
Human genomic sequence (SEQ ID NO: 106)
Human mRNA sequence (SEQ ID NO: 107)
Human coding sequence (SEQ ID NO: 108)

[0244] TABLE 19
(mouse gene: Fgfr3; human gene FGFR3)

Mouse genomic sequence (SEQ ID NO: 109)
Mouse mRNA sequence (SEQ ID NO: 110)
Mouse coding sequence (SEQ ID NO: 111)
Human genomic sequence (SEQ ID NO: 112)
Human mRNA sequence (SEQ ID NO: 113)
Human coding sequence (SEQ ID NO: 114)

[0245] TABLE 20
(mouse gene: Cbx8; human gene CBX8)

Mouse genomic sequence (SEQ ID NO: 115)
Mouse mRNA sequence (SEQ ID NO: 116)
Mouse coding sequence (SEQ ID NO: 117)
Human genomic sequence (SEQ ID NO: 118)
Human mRNA sequence (SEQ ID NO: 119)
Human coding sequence (SEQ ID NO: 120)

[0246] TABLE 21
(mouse gene: Lmo2; human gene LMO2)

Mouse genomic sequence (SEQ ID NO: 121)
Mouse mRNA sequence (SEQ ID NO: 122)
Mouse coding sequence (SEQ ID NO: 123)
Human genomic sequence (SEQ ID NO: 124)
Human mRNA sequence (SEQ ID NO: 125)
Human coding sequence (SEQ ID NO: 126)

[0247] TABLE 22
(mouse gene: Itpr1; human gene ITPR1)

Mouse genomic sequence (SEQ ID NO: 127)
Mouse mRNA sequence (SEQ ID NO: 128)
Mouse coding sequence (SEQ ID NO: 129)
Human genomic sequence (SEQ ID NO: 130)
Human mRNA sequence (SEQ ID NO: 131)
Human coding sequence (SEQ ID NO: 132)

[0248] TABLE 23
(mouse gene: Sell; human gene SELL)

Mouse genomic sequence (SEQ ID NO: 133)
Mouse mRNA sequence (SEQ ID NO: 134)
Mouse coding sequence (SEQ ID NO: 135)
Human genomic sequence (SEQ ID NO: 136)
Human mRNA sequence (SEQ ID NO: 137)
Human coding sequence (SEQ ID NO: 138)

[0249] TABLE 24
(mouse gene: Dpt; human gene DPT)

Mouse genomic sequence (SEQ ID NO: 139)
Mouse mRNA sequence (SEQ ID NO: 140)
Mouse coding sequence (SEQ ID NO: 141)
Human genomic sequence (SEQ ID NO: 142)
Human mRNA sequence (SEQ ID NO: 143)
Human coding sequence (SEQ ID NO: 144)

[0250] TABLE 25
(mouse gene: Pap; human gene PAP)

Mouse genomic sequence (SEQ ID NO: 145)
Mouse mRNA sequence (SEQ ID NO: 146)
Mouse coding sequence (SEQ ID NO: 147)
Human genomic sequence (SEQ ID NO: 148)
Human mRNA sequence (SEQ ID NO: 149)
Human coding sequence (SEQ ID NO: 150)

[0251] TABLE 26
(mouse gene: Blm; human gene BLM)

Mouse genomic sequence (SEQ ID NO: 151)
Mouse mRNA sequence (SEQ ID NO: 152)
Mouse coding sequence (SEQ ID NO: 153)
Human genomic sequence (SEQ ID NO: 154)
Human mRNA sequence (SEQ ID NO: 155)
Human coding sequence (SEQ ID NO: 156)

[0252] TABLE 27
(mouse gene: Blr1; human gene BLR1)

Mouse genomic sequence (SEQ ID NO: 157)
Mouse mRNA sequence (SEQ ID NO: 158)
Mouse coding sequence (SEQ ID NO: 159)
Human genomic sequence (SEQ ID NO: 160)
Human mRNA sequence (SEQ ID NO: 161)
Human coding sequence (SEQ ID NO: 162)

[0253] TABLE 28
(mouse gene: Ptp4a2; human gene PTP4A2)

Mouse genomic sequence (SEQ ID NO: 163)
Mouse mRNA sequence (SEQ ID NO: 164)
Mouse coding sequence (SEQ ID NO: 165)
Human genomic sequence (SEQ ID NO: 166)
Human mRNA sequence (SEQ ID NO: 167)
Human coding sequence (SEQ ID NO: 168)

[0254] TABLE 29
(mouse gene: Mcm3ap; human gene MCM3AP)

Mouse genomic sequence (SEQ ID NO: 169)
Mouse mRNA sequence (SEQ ID NO: 170)
Mouse coding sequence (SEQ ID NO: 171)
Human genomic sequence (SEQ ID NO: 172)
Human mRNA sequence (SEQ ID NO: 173)
Human coding sequence (SEQ ID NO: 174)

[0255] TABLE 30
(mouse gene: Jak2; human gene JAK2)

Mouse genomic sequence (SEQ ID NO: 175)
Mouse mRNA sequence (SEQ ID NO: 176)
Mouse coding sequence (SEQ ID NO: 177)
Human genomic sequence (SEQ ID NO: 178)
Human mRNA sequence (SEQ ID NO: 179)
Human coding sequence (SEQ ID NO: 180)

[0256] TABLE 31
(mouse gene: Fus1; human gene FUS1)

Mouse genomic sequence (SEQ ID NO: 181)
Mouse mRNA sequence (SEQ ID NO: 182)
Mouse coding sequence (SEQ ID NO: 183)
Human genomic sequence (SEQ ID NO: 184)
Human mRNA sequence (SEQ ID NO: 185)
Human coding sequence (SEQ ID NO: 186)

[0257] TABLE 32
(mouse gene: Rassf1; human gene RASSF1)

Mouse genomic sequence (SEQ ID NO: 187)
Mouse mRNA sequence (SEQ ID NO: 188)
Mouse coding sequence (SEQ ID NO: 189)
Human genomic sequence (SEQ ID NO: 190)
Human mRNA sequence (SEQ ID NO: 191)
Human coding sequence (SEQ ID NO: 192)

[0258] TABLE 33
(mouse gene: Pik3r1; human gene PIK3R1)

Mouse genomic sequence (SEQ ID NO: 193)
Mouse mRNA sequence (SEQ ID NO: 194)
Mouse coding sequence (SEQ ID NO: 195)
Human genomic sequence (SEQ ID NO: 196)
Human mRNA sequence (SEQ ID NO: 197)
Human coding sequence (SEQ ID NO: 198)

[0259] TABLE 34
(mouse gene: Braf; human gene BRAF)

Mouse genomic sequence (SEQ ID NO: 199)
Mouse mRNA sequence (SEQ ID NO: 200)
Mouse coding sequence (SEQ ID NO: 201)
Human genomic sequence (SEQ ID NO: 202)
Human mRNA sequence (SEQ ID NO: 203)
Human coding sequence (SEQ ID NO: 204)

[0260] TABLE 35
(mouse gene: Tle3; human gene: TLE3)

Mouse genomic sequence (SEQ ID NO: 205)
Mouse mRNA sequence (SEQ ID NO: 206)
Mouse coding sequence (SEQ ID NO: 207)
Human genomic sequence (SEQ ID NO: 208)
Human mRNA sequence (SEQ ID NO: 209)
Human coding sequence (SEQ ID NO: 210)

[0261] TABLE 36
(mouse gene: Nek2; human gene NEK2)

Mouse genomic sequence (SEQ ID NO: 211)
Mouse mRNA sequence (SEQ ID NO: 212)
Mouse coding sequence (SEQ ID NO: 213)
Human genomic sequence (SEQ ID NO: 214)
Human mRNA sequence (SEQ ID NO: 215)
Human coding sequence (SEQ ID NO: 216)

[0262] TABLE 37
(mouse gene: Nr3c1; human gene NR3C1)

Mouse genomic sequence (SEQ ID NO: 217)
Mouse mRNA sequence (SEQ ID NO: 218)
Mouse coding sequence (SEQ ID NO: 219)
Human genomic sequence (SEQ ID NO: 220)
Human mRNA sequence (SEQ ID NO: 221)
Human coding sequence (SEQ ID NO: 222)

[0263] TABLE 38
(mouse gene: Dad1; human gene DAD1)

Mouse genomic sequence (SEQ ID NO: 223)
Mouse mRNA sequence (SEQ ID NO: 224)
Mouse coding sequence (SEQ ID NO: 225)
Human genomic sequence (SEQ ID NO: 226)
Human mRNA sequence (SEQ ID NO: 227)
Human coding sequence (SEQ ID NO: 228)

[0264] TABLE 39
(mouse gene: Lck; human gene LCK)

Mouse genomic sequence (SEQ ID NO: 229)
Mouse mRNA sequence (SEQ ID NO: 230)
Mouse coding sequence (SEQ ID NO: 231)
Human genomic sequence (SEQ ID NO: 232)
Human mRNA sequence (SEQ ID NO: 233)
Human coding sequence (SEQ ID NO: 234)

[0265] TABLE 40
(mouse gene: Git2; human gene GIT2)

Mouse genomic sequence (SEQ ID NO: 235)
Mouse mRNA sequence (SEQ ID NO: 236)
Mouse coding sequence (SEQ ID NO: 237)
Human genomic sequence (SEQ ID NO: 238)
Human mRNA sequence (SEQ ID NO: 239)
Human coding sequence (SEQ ID NO: 240).

[0266] TABLE 41
(mouse gene: Anp32; human gene N/A)

Mouse genomic sequence (SEQ ID NO: 241)
Mouse mRNA sequence (SEQ ID NO: 242)
Mouse coding sequence (SEQ ID NO: 243)
Human genomic sequence (SEQ ID NO: 244)
Human mRNA sequence (SEQ ID NO: 245)
Human coding sequence (SEQ ID NO: 246).

[0267] TABLE 42
(mouse gene: Map2k5; human gene MAP2K5)

Mouse genomic sequence (SEQ ID NO: 247)
Mouse mRNA sequence (SEQ ID NO: 248)
Mouse coding sequence (SEQ ID NO: 249)
Human genomic sequence (SEQ ID NO: 250)
Human mRNA sequence (SEQ ID NO: 251)
Human coding sequence (SEQ ID NO: 252).

[0268] TABLE 43
(mouse gene: Cd28; human gene CD28)

Mouse genomic sequence (SEQ ID NO: 253)
Mouse mRNA sequence (SEQ ID NO: 254)
Mouse coding sequence (SEQ ID NO: 255)
Human genomic sequence (SEQ ID NO: 256)
Human mRNA sequence (SEQ ID NO: 257)
Human coding sequence (SEQ ID NO: 258).

[0269] TABLE 44
(mouse gene: Sept9; human gene Msf)

Mouse genomic sequence (SEQ ID NO: 259)
Mouse mRNA sequence (SEQ ID NO: 260)
Mouse coding sequence (SEQ ID NO: 261)
Human genomic sequence (SEQ ID NO: 262)
Human mRNA sequence (SEQ ID NO: 263)
Human coding sequence (SEQ ID NO: 264).

[0270] TABLE 45
(mouse gene: Fzd10; human gene FZD10)

Mouse genomic sequence (SEQ ID NO: 265)
Mouse mRNA sequence (SEQ ID NO: 266)
Mouse coding sequence (SEQ ID NO: 267)
Human genomic sequence (SEQ ID NO: 268)
Human mRNA sequence (SEQ ID NO: 269)
Human coding sequence (SEQ ID NO: 270).

[0271] TABLE 45
(mouse gene: Calm2; human gene CALM2)

Mouse genomic sequence (SEQ ID NO: 271)
Mouse mRNA sequence (SEQ ID NO: 272)
Mouse coding sequence (SEQ ID NO: 273)
Human genomic sequence (SEQ ID NO: 274)
Human mRNA sequence (SEQ ID NO: 275)
Human coding sequence (SEQ ID NO: 276).

[0272] TABLE 47
(mouse gene: Ncf4; human gene NCF4)

Mouse genomic sequence (SEQ ID NO: 277)
Mouse mRNA sequence (SEQ ID NO: 278)
Mouse coding sequence (SEQ ID NO: 279)
Human genomic sequence (SEQ ID NO: 280)
Human mRNA sequence (SEQ ID NO: 281)
Human coding sequence (SEQ ID NO: 282).

[0273] TABLE 48
(mouse gene: Rac2; human gene RAC2)

Mouse genomic sequence (SEQ ID NO: 283)
Mouse mRNA sequence (SEQ ID NO: 284)
Mouse coding sequence (SEQ ID NO: 285)
Human genomic sequence (SEQ ID NO: 286)
Human mRNA sequence (SEQ ID NO: 287)
Human coding sequence (SEQ ID NO: 288).

[0274] TABLE 49
(mouse gene: Mbnl; human gene MBNL)

Mouse genomic sequence (SEQ ID NO: 289)
Mouse mRNA sequence (SEQ ID NO: 290)
Mouse coding sequence (SEQ ID NO: 291)
Human genomic sequence (SEQ ID NO: 292)
Human mRNA sequence (SEQ ID NO: 293)
Human coding sequence (SEQ ID NO: 294).

[0275] TABLE 50
(mouse gene: mCG10516; human gene N/A)

Mouse genomic sequence (SEQ ID NO: 295)
Mouse mRNA sequence (SEQ ID NO: 296)
Mouse coding sequence (SEQ ID NO: 297)
Human genomic sequence (SEQ ID NO: 298)
Human mRNA sequence (SEQ ID NO: 299)
Human coding sequence (SEQ ID NO: 300).

We claim:

1. A recombinant nucleic acid comprising a nucleotide sequence selected from the group consisting of the sequences outlined in Tables 1-50.

2. A host cell comprising the recombinant nucleic acid of claim 1.

3. An expression vector comprising the recombinant nucleic acid according to claim 2.

4. A host cell comprising the expression vector of claim 3.

5. A recombinant protein comprising an amino acid sequence encoded by a nucleic acid sequence comprising a sequence selected from the group consisting of the sequences outlined in Tables 1-50.

6. A method of screening drug candidates comprising:
a) providing a cell that expresses a carcinoma associated (CA) gene comprising a nucleic acid sequence selected from the group consisting of the sequences outlined in Tables 1-50 or fragment thereof;
b) adding a drug candidate to said cell; and
c) determining the effect of said drug candidate on the expression of said CA gene.

7. A method according to claim 6 wherein said determining comprises comparing the level of expression in the absence of said drug candidate to the level of expression in the presence of said drug candidate.

8. A method of screening for a bioactive agent capable of binding to an CA protein (CAP), wherein said CAP is encoded by a nucleic acid comprising a nucleic acid sequence selected from the group consisting of the sequences outlined in Tables 1-50, said method comprising:
a) combining said CAP and a candidate bioactive agent; and
b) determining the binding of said candidate agent to said CAP.

9. A method for screening for a bioactive agent capable of modulating the activity of an CA protein (CAP), wherein said CAP is encoded by a nucleic acid comprising a nucleic acid sequence selected from the group consisting of the sequences outlined in Tables 1-50, said method comprising:
a) combining said CAP and a candidate bioactive agent; and
b) determining the effect of said candidate agent on the bioactivity of said CAP.

10. A method of evaluating the effect of a candidate carcinoma drug comprising:
a) administering said drug to a patient;
b) removing a cell sample from said patient; and
c) determining alterations in the expression or activation of a gene comprising a nucleic acid sequence selected from the group consisting of the sequences outlined in Tables 1-50.

11. A method of diagnosing carcinoma comprising:
a) determining the expression of one or more genes comprising a nucleic acid sequence selected from the group consisting of the sequences outlined in Tables 1-50, in a first tissue type of a first individual; and
b) comparing said expression of said gene(s) from a second normal tissue type from said first individual or a second unaffected individual;
wherein a difference in said expression indicates that the first individual has carcinoma.

12. A method for inhibiting the activity of a CA protein (CAP), wherein said CAP is encoded by a nucleic acid comprising a nucleic acid sequence selected from the group consisting of the sequences outlined in Tables 1-50, said method comprising binding an inhibitor to said CAP.

13. A method of treating carcinomas comprising administering to a patient an inhibitor of an CA protein (CAP), wherein said CAP is encoded by a nucleic acid comprising a nucleic acid sequence selected from the group consisting of the sequences outlined in Tables 1-50.

14. A method of neutralizing the effect of an CA protein (CAP), wherein said CAP is encoded by a nucleic acid comprising a nucleic acid sequence selected from the group consisting of the sequences outlined in Tables 1-50, comprising contacting an agent specific for said CAP protein with said CAP protein in an amount sufficient to effect neutralization.

15. A polypeptide which specifically binds to a protein encoded by a nucleic acid comprising a nucleic acid selected from the group consisting of the sequences outlined in Tables 1-50.

16. A polypeptide according to claim 15 comprising an antibody which specifically binds to a protein encoded by a nucleic acid comprising a nucleic acid sequence selected from the group consisting of the sequences outlined in Tables 1-50.

17. A biochip comprising one or more nucleic acid segments selected from the group consisting of a nucleic acid of the sequences outlined in Tables 1-50 or fragments thereof.

18. A method of diagnosing carcinoma or a propensity to carcinoma by sequencing at least one CA gene of an individual.

19. A method of determining CA gene copy number comprising adding an CA gene probe to a sample of genomic DNA from an individual under conditions suitable for hybridization.

The application's sequence listing, which the Patent Office published only in electronic form, follows.

SEQUENCE LISTING (301 sequences)

SEQ ID NO: 1 - DNA, 40545 bp, Mus musculus
  misc_feature (435)..(454): "n" at positions 435 through 454 can be any base.
  misc_feature (5796)..(6304): "n" at positions 5796 through 6304 can be any base.
  misc_feature (8692)..(8987): "n" at positions 8692 through 8987 can be any base.
  misc_feature (18464)..(18526): "n" at positions 18464 through 18526 can be any base.
  misc_feature (26666)..(27403): "n" at positions 26666 through 27403 can be any base.
  misc_feature (29717)..(29995): "n" at positions 29717 through 29995 can be any base.
  misc_feature (33859)..(33878): "n" at positions 33859 through 33878 can be any base.
  misc_feature (40256)..(40275): "n" at positions 40256 through 40275 can be any base.
ggagccaaacagccccttttctctacttacaagccaagcaggggcctccagtgttccattagagtgatggagacccaattaacctcacaggcagatgaggggtgggcacacctctcctgactgctggccagcactcttctcatgattccattaatccaaagacattttacagagagatgtttaggaagtataccaaatacaatagtttattgaccacatctccctttttcagtagccacactgaaaagcgccatgtttgtaattctaggaacaggtatcttgctggctttccctgaagcagagagtacccaaacaattagggtttctgatatagtcaaagcatcaatattgaatgagaaaaaaaaatgggacctagatatttcccctgcatgtcgctagatactaagacatgtcaaaaagagagagagggagggnnnnnnnnnnnnnnnnnnnnaaggaaggaaggaaggaaggaaggaaggaaggaaggaaggaaggaaggaagaaggatcctgtctaaatactgcaacgtggtggaatctgcgccattcttttgccaccaacagacctgacactgtgtgagttccacacagctcaaaattagcctcccttaaagaggctcactcaggctgtaaactgcctgtcacttaatcacttggaagaggatcttcaattcagaacccactccaaaacaggggtatatgctctaacaggatctgtcctgaacatgccaggatttccttaaaacatcccagaataacattatattccatacatcctcattctcaatatgcctttcagacttgactgtattctagtggccagggattagacaaagactactgcctctcagcagacagcaggtgaaaatgaataagaagactccagctgtcaaatgaggttaagagtctacaaactagtgagggagtgagaacatcggcaccgtttaagatctttatataaaagagagactacacagacgctgccgatgctgtgtggattggagtcccattttgtcagtgatggtaagggtgggtgatggtaagggtgggtgatggtaagggtgggtgatggtaagggtggtgcctacagagagctgaggagggatgtaaagatcccttattacagccagtggattctgtggatgagcaaactctgtcttggggtcacaaacgccaaccctaaggtcacaatagtagttgaggggacaccaggaagcagaataggagacctctgacttccaaggtagcgctgtctcacttacatgctgccgaggacaagtaccatgttctgatgacatgcaagctactaagactttctgccaggccagggagatggctcagtggttatgagcacagactgctcttccagaagacctgggttcaattccaagcacctacgtgatagcgcccaactatctgtaaccccagtttcaggacatccaacatggccacacagacaaacatgtgggcaaagcaccaagcacatgaaattaaaataaattttaaaaaatgtagtcttaatttaatctttaaacagggttggctgtgtctgtatgttgcaggatgagctattttaacctcaagtcacccctcaaaacaagaatggtacactaattaccatcctgtcagcttccaggacaagcagacactccgaaacacacagccactcaccaaaaaaccaggacgctcacagaatgaggggccaaagacacaggtcatctttaactagtctcaaaggactagttttcaatgtttgacatctcccatcctggtctctgctgtgcctctaacagattacaaattaagaacatgtttgcagagtggaattttaaaaccactgcataacccaggtaatagttcctggactcagtctaaagagaagacactgtatctccctggtacgagttactcaggtcagcacagtgtctccttctaaaccctttgacctacagactcattctggttcactctgggcattgtgcatgtcaggaaaaaaaaccactctatgaaacagctactctcatacccagactttattattttaaaataccactcattatctaatatgttaattctttcccacatgtaatcactagagaatgcactacttgactccaggagcccttctgtcaattcttttccttcatatcttccaacacatttactgactgtctatcagctatatgcccattatatcttaatataatatattaatatatatattatatccatagagctatccctgagttcagcttttagaaagatccagttttaatcaaataaatgaagtgcaaaagccagatgcatagaaatctctgccctgtcagctcatccattaacaccactcaaattctaccttacaagtccaaattaagccgccggcgagccctactgaatttgcacatagacctgtgatgttatcagcccagcacatatgcgatctctcagcatgaataaccctggcggatgctatgtaaaatttctacaacagactcctgaactcgggggcatatttgatgactgcccaaaacctcaggaggtccagccctaagcaagactgcatctaatctatggtccagatcaacgcttgtcttccgccaagtgaagcacacagtctgccaggcaaccttcagtgactggaggggaggtctaactctgtttctcaaggtaagtatggttttcgtctcaactgtaacaaatttcatgagtgttcctttcccgactcacttagagcctttgatagatgacataaaatctctggtgattatactacaaagagtaattatgtgaacgtttctcgtactgaagcaagtaaattggagccttattcaaaattctgccaaggaaattttaaattaaacacactagtctattctcaaaagaaaacagaagaatgtcttttcaggagggagtagggggcacaaaggtagttcttcttcagtttaccatgagacagtggggaccaggggctgcatctgacacaattaaaggtcctcagttgaatggtgtcagtgagaaccccacacatggtggcccgcagactccagcctcgatggaagtgtctgccatcgaaaaccattgtgttttgtggtttgtttttttttaaagattaagatttcagggtcctgaaacaattggtggccgtgggatgctaagtgtaagacatttcatgaggaacccctggcaaatcagcccaaaccctttgcctcacaacaccctttctgataccagggtagggcttgggtcctagtgtcggcatttccccattctactgactggctgctctcaagcaaacggaaacatacgtgggcatgatgaaggaacagggttctggaaataagtcaaagacattctcttactcatttaaaattctgtatgggttttctttctttcctttctcctcttcatctaggttgtgggtgacttaggtttcaaaaattgtcagaactgaatgttcttggtgctatgccctccaacaaaaacctaaccatatggtgataattttgaagcaaggaaggaagtgaaggcccctacatccaatcactgtgagaccgagactctctcctatcccttgtcaccatgactaccataactagcacacactggggcttgaagaagctgcctctacatgtcacaaagtcatctgacttacagccaataggaccacaatgaagagtgtgatctgaggcacttgagagcagagacatatttgaattttttatttttctgctctgatttcatccttcctacagagccttctgctccaggcttgtttgcacagcacatagacactgactgtcaaggtcatgcaaaggctgatgctctgacttaaaacggagccaagaggacatacattcctcataggggtccgagctagtgtgggcttagcttagcatacagtcacaaactgcacccttccaggatggttccagagcacagtttcttctccaaaggtgtacattttgaagaatgtaagactttgaaaacacccagcttcaaaatgcaaaactcaacctttcttgtttttaaatcctggttaaaaaaaaaaaaaaacaataccaagaaaataattttagaagtaaatttcaacctgcttctagaaaaaagggtttggaaaggctaaaagttcaagaagaaaatcatttttcctttaataccactgaattaattgcagaagggctggagagtgaatctggtatactgtgggattgtgggtaaactgtgctaacaaatgctgacagttcttatgcttaatgattgaaaaatatgatagaaaatagaaaatactgatgagaatgttttatacggctgcaatttggttgtagctgatatattgatacatagctcaataattacaataaaatagaaatgttcagtcacagagaaagtggatgttttttcagaggggaaaatgtctgcatttgaacaaaagtaagtatttagaaaacaaataaaatttaacttttgctttttaaaaaatctggtacgggtagtgttaaatgttttacagagagaatgtccacaatttaaagtgtcaaatgaagttgaagcaaaatttaaaggagacctgtcttttaggttcttaaacacttccttcagtacttttcttttaaaaatgtttaatactgtattctgtttttcttctttgtatacacaaaataaatgtttatcacattggtcacctgaaatgagccattcttcaataaaggtctcacacactgagcctcaaaagcaatttattgacatttttattaattataattccacccctgtcccagaagtcacaaaacaaagctgcttggatcagactagcaatcattaaacgaaaaagaactaaataataagttaaaaatagagaatgtgttcaaaggaagcaagaaagtgttgctcataatctctctgtcctcttcaaaatagacacctttccaagcctcacctcccattcaaactgaaaactccactacttttgaaacaaataattccacatcaagtccatttcaaaagaagcccctggctcctcccacaagcccctttacctcgctgaagttaagaaaaagtcagagcccggtggcatttttctccccagcacccactctgcagctccttcaatgtgagcatctactcgtcttaattaccgtgggcttaaaggaaactgacacattttagcccccatgcctccaaactgaaagattgaaaagattttgtccaatttcaggggaaacggaggtgcgtgggctcaccctgtagttttcaacccctgcagtctctctagaaggttctccacaagtacggatgccacgtgggtatccagtgagtgggcggggagtggccctgcactttcgctcatctctggtcttctcacaggagtgtttatagataggttagctggggtacagcaaaatccgtgggtgaaatgttcccatacatccccaggagcttgtgtgtcaccaccataagtaacgaattcagcgtatgtttagagtgtggggtgaggcagggacgaataggtcgcgcgtgaaaaaatcccgcgtgtgaatatacacacagaactcttttctcaaggagcaaaaaggtacaatttcgtcttcccgggtggagactggcttaggaattcccgggcggccctcgccaccagcaatcgcgatactgggacggatctctgggaccagaagaactggaccgcaaactaaagaaaccagccttttctggagcaaacggcgggtctccatgtcaaagtaaaaatatatatatataaatataaataagtgtgtagggagggggaaaccattggggnnnnnnnnnnnnnnnnnnnnnnnnnnnnnnnnnnnnnnnnnnnnnnnnnnnnnnnnnnnnnnnnnnnnnnnnnnnnnnnnnnnnnnnnnnnnnnnnnnnnnnnnnnnnnnnnnnnnnnnnnnnnnnnnnnnnnnnnnnnnnnnnnnnnnnnnnnnnnnnnnnnnnnnnnnnnnnnnnnnnnnnnnnnnnnnnnnnnnnnnnnnnnnnnnnnnnnnnnnnnnnnnnnnnnnnnnnnnnnnnnnnnnnnnnnnnnnnnnnnnnnnnnnnnnnnnnnnnnnnnnnnnnnnnnnnnnnnnnnnnnnnnnnnnnnnnnnnnnnnnnnnnnnnnnnnnnnnnnnnnnnnnnnnnnnnnnnnnnnnnnnnnnnnnnnnnnnnnnnnnnnnnnnnnnnnnnnnnnnnnnnnnnnnnnnnnnnnnnnnnnnnnnnnnnnnnnnnnnnnnnnnnnnnnnnnnnnnnnnnnnnnnnnnnnnnnnnnnnnnnnnnnnnnnnnnnnnnnnnnnnnnnnnnnnttgaatcagacaggaagacgggaagtttgggtctttaactttttttttttttttaatccaagggggagatgcgaggtgggtgagccgcctgcaggccctggcttctgaatccattcccagcttatcctctgccacgagggctctacctgggtccgcaccgacacccacccgagggtcgctacgatgcacaacctgggagattgggttcacaggtctgctgtcgggtggctcctgagtatgctttttgcactttaggccgcttggtcccggtgtgggagcctccagcctgggctcttcatttctcaactctgccccaccccctcccctttcttgcagtttaaaccgggttttcatgtcttcccccactaatctttctgagccttttcttccttaagcaaccatcgggtctgggaggtttgattgcctgaccacccatttgtccatgaagtaacacgaacagtgctctattcttccggggagccagggaagaggcgatgacccccagttcctggacggagatgtccctgctccgaggtgacgggatccgaaccagcagcacgccgggttggagcgtcctcagggtcacctggctggctggtatccgccaggtgagcttgttagaatgtgtgcctaggtggcaggttcctgcagaaatatgcctataaacacccaacacccggctgcaccttacacctacaggctttgtacactttccaaccgaaactgctaggcgcaagagggagggagacgggagggggcacgtcctggagggatggaagttcgggaaaactcgtatttggctgaagtttatcactctacctgggtcctacccagtaaaggatctttccaccttcgggggtttaaaaaaaaaagtagtggtggggagaaagagctcttattaatcctggcgccacccccgcagcagagcacactcgtgcttctgcacacccgagtccacacgcaaggaaataagtacacttgcccctaaggcataccggcttttcccatgtgctagctggcgcactttttatttaaaaaaagaagaaagaaaagaaagggaaaaaaagaaatgaagatttttcaacacgtggtcagagtggcaaccgacagagaaaacacagtcccagtcccaacctctccagggacgtgctgccaacctccgcaccctctcacgccgcaccccacgtgcggactcgcagcgacgttcaccttcgggaaccctcattagtaggagggggaggaggatgggggaagctgacgcagagggcctctcctgcaggacgcgctttaactttcccatctccagacagaggggcctccgtccagcgaccctcttcccccctcctccgcagccctcccagcctcaggccacctctcccacccccaagatcccctccccgctggaatttcactgcaaagccaagagtgggggatggaagaggcgaggggccctccgctggctctgggagaacctgccacccagactttatcctccgggtgggctagccccgacgacgaccacccgcctcttttccgcccccgagctccggatgctgtcttcactggagatgcggaggagactagccttcgagtgggtgtgggggaataaaaggatgccgccccccctacccccccccccgccgcccagcttctctgttgaggtagatgaatacctcagtacagctctgacgccccgtactttgtgcccctctgcaggagcagtgtcagatctgctccttggaggtggccctggggaaattttgagtaattgctttatggggtcataaagcataaattcatatatctgtgcaggataacaccgagacctctattcgggaaacccatcttgattaaaccccacaggtgatggacagagtgcactagacaagcgtcaccttgggcgcaggacggttccgtcttaagttcgcaacttgagtttttcaatgagttctcccccacccacctccgaaagctaatggcttccattgcaattacacattttcctcgcccgccccttccctcccctttctttacatgcagtagattggatactaattcccgctgccattgatagggtccgaggagcccaggcccctgtgcgggcctagcccgcccgggtccccgctctccctccgcccttcccgggcttccttttgatgtagcggagaaggcttcctactttaaaaaaaaaaagtaatctgcccggtaacaatcagcgcgcagtagcaggagccccagagctattggctatgcaaatagagggaggggagacggcgccccaaactcatactcacccttttaaagtgatatcccctccccccgcccaccccttccgccccaccctcgtttaaaggggctggcccagggctggagttaatcgcttgcacnnnnnnnnnnnnnnnnnnnnnnnnnnnnnnnnnnnnnnnnnnnnnnnnnnnnnnnnnnnnnnnnnnnnnnnnnnnnnnnnnnnnnnnnnnnnnnnnnnnnnnnnnnnnnnnnnnnnnnnnnnnnnnnnnnnnnnnnnnnnnnnnnnnnnnnnnnnnnnnnnnnnnnnnnnnnnnnnnnnnnnnnnnnnnnnnnnnnnnnnnnnnnnnnnnnnnnnnnnnnnnnnnnnnnnnnnnnnnnnnnnnnnnnnnnnnnnnnnnnnnnnnnnnnnnnnnnnnnnnnnnnnnnnnnnnnnnnnggtcggggattgaggggtgcaggactcaggagcccccggggaaaggaagggtggccttgctggcgcagggagagccaaacctaaaccctccctctccccctccctggcccctcccgagccatttcctagaaagctgtatcaatgtggccacgctccgcgcagacacctagggcggcttgtcagcagatgcaggggcgaggaagcgggtttttcctgcgtggccgaggcccgcggaggaaccgctgctagccctgcccccggtctggggccgctctgagaggctggccgcgttgcccaatggcgcccccaagaacagaaaggtttctgcaggagggtcatattctactaggcttaagaagcacccctttctccaacatccaccccttcctcctcttcctctccacgcacgtggctcggggcggacaacagcttgaaagttatcaggagtctaagcttgaggggcataacctttatccctggtttggcgaggttgcaattttctcaaataagcctttccttgttcctcatttaggggtctacttctaagttatctgaactcatccacatggtaaatctatctacctgaatcttgaataatgggctgtttttctgatcacattgcaagcctccgaagttagagagcacacacgtacacaccctttatgcccccatggtatgcctacagaatgtcagaaaggataatcaataggaatccatggggtttgtgggttcccctatccgaggcccctagcatgcggggctggatggggagagggcctcggagaagtagggagaggggttgggggtggggagcggggatcgtgtttgaagtttggtcaggccagctgctgtgctccttaataacaagagggaaggggggggggagagggagggaaagattgaaaggaggggagggacgctagaggaggggaggaaagggggaggaggaacatgagagggggaggagatctaactgcccttccagcttgcgtcactgcatgagcgagagaggagagcgagctgaggagagccgggcagttcggagggaaggaccggtgcgagtcaggcggcccttgaggctccgctcgcccaccttccactcttctctctctctctccctctctctctttgccatttctttcctctcccaaatctcccattcagccaaaggaaggaggtaagggaagcactccccgacccccccgcacctccaaaaaataataataataaaaaaaatttacagtcgggaccgagtggtggccggctggctatggagctgctgtgctgcgaggtggacccggtccgcagggccgtgccggaccgcaacctgctggaagaccgcgttctgcagaacctgttgaccatcgaggagcgctacctcccgcagtgttcctatttcaagtgcgtgcagaaggacatccaaccgtacatgcgcaggatggtggccacctggatgctagaggtaggtgtgcgggcgacgctctcagggagaggcaagcccagccgctccatccctacctccaacacgcagagatcctaaaaactgcgggagaactacccctgcgctggcctcccccgctcgtgcgcgaggtagccccgcacccttgggcgagacgctaattctgtcccttgctagattaactagtggaggaaaacttgggtgagtgaggatgtcctcccccccccggggggttggcatcccgcgcgtgtgcctgcatgtggcttcctcgtcttcccatctccatttctgacctgtggtgtggaagcaaccccggctgccttcagtgaggccccagagggtgttgcgacctaacaatccataccaacatataaagagcccccccccccgcccccgactctcagggttggggcaaaccgtctgagccttaggactccgcgttggcactttggcaggaggtgggggtgggggagaaacagggaattcaggagagccccggaagtcatactgaaaaaaacgtgcgtttagggcaatctgaaagaaccgctgctttagccttgcttgcaatctttgccgagagagcagggtgcccacgtatgcacagctctggacctgccgtggtttcgccatgttgctttgcaaactccatttacaaggactggcaacattcgccggcgcccccaccccctctcagcaccccatgatcctgggcaccctctttctgatcgtgccctcttccccagccctcggttcaccaaggttacttacagtttggctgcttcttgagcgcgcagatttgggtggggtaggaagcgggggaggaggtgtgtagagcaggctagggggcacccccaaatgagaggtcagagtcccgcatgcctcctggaggggggttccctggtttcgtctcacccaacccccagcaggcacagccttcctagctactgcccttgtgggccgcagccgaacactccgcaagtttcccccactgagatctagagcccctggggtggagataccgaccttacggacacccgaaacctcttttccagggagcctgggacctctctggggttttcaggcccacagagcgtttctaggattttccctcgatttttaataattttttgaaactgctcccccctgctccgactccaactgcggcggccggccgaggcgcgcttcctcctcctccctccccctctctcctccacccacccaccgaacagcggcccctggaccgccgagaccaccctggacatttttttcaattgtcgggaatggtagaataggatctgaggatccgaacgagaccaagaagtagactttcggagcttccagaatatttttattgattttttgaaaagatgacgaaatccaaaaaagagtgagttggtgtgctgagaagtgagccagagggaacggcaggcggcggcggctctgggctttgcctcggggtttgtggaggttttagttcatcacctttttcagctttgcgggaatacccgaaccccaggagcccttcggatttaccccaccgttctcatctctattcttactatcctttctactctcctccccctccccacacacacataaaaaattctttttgttatctcagattatgcttttatttttcttttccctctgtttctgatactaatttttccctatccccctcggaccctaccccactcttgattgtaggtctgtgaggaacaaaagtgtgaagaagaggtctttcctctggccatgaattacctggaccgtttcttggctggagtcccgactcctaagacccatcttcagctcctgggtgcagtgtgcatgttcctagcttccaagctgaaagagaccatcccgctgactgcggaaaagctgtgcatttacaccgacaactctgtgaagccccaggagctgctggtaatgccgccctccctgctcctgactctgcccttccccatcacactaaggccgccacactaaccaagactgtaagaaaaaaaaaaaaaagatgtcctttagtaggagagagctagtcttcccacatcaggtagtgagcaaagctatcagtgcctcatggaaattcatgagggtgaaattctgttgtgtgtgtgggtgggggggggggcataaatagaatattctagttaatgatgttataattaaggtccagatttccactgaaccctgagaacacggtctgatttctcacattctagtttgtgttgtttcccaagaccctggaggtgtaacaggtaatgtcttaaagaccaataaagtctcatggacaaacatagtagctgatcactaagtaccaacaaagcactaagtatgaacatattaacttggatgcaaaatcaacatctgcctttctattggtggatctgaagcatgagagttcagctccaaaaggcacagtgacctggatacagtccccagggggtcctgtcttggttttctcccaaccatctacctttttttttctcatgcacttccccctacccccatgttaatgccacacactgaaggttctgcagctctcttttacagtggtttgcacaccttgcactggtgaaagaagaccaccccctctatcgactccctcccccttgctgccattgcctgggcctgcttaatctcctgggcaaagactggcttcttgaactgagccctttgtgaggagccgtcctttctgggtctgtgctgccacctagtggcagacatgtgcaaggctgggggaggaattgcctagaacgcaaagaggggcctgaatgacttcacctttgaaacactgccagatttcagctgcttctggtttggtgtaagaggcccctaaaggtgctttcttctggaagatctgcttctttcaataatggtgccagaggacgagtttgtgctcacattgccctggaagaaggaagggtttgggattcaagccatttctgatttttacgtagttaaggaattttttttttttttatcctaacttcctgcaaaaaacccaggcagacttgaaagcttgtggggaggaaaaaaaaataagattagaattggaggccagcttgtctattcaaaaagaaaaaaacaaaacaaaacaaaacatgaaaaagaatcttctatgtgtctggtgtgctggaggactggaggtatttttcaagacaccctaatttttccaggaccggcaaagctaactcaattctccaaataaagtgtgccagcttcccatctcctcccatccataagttatgcaccctagaagaaccttcctattttacacgtgaggggagcttgctccaggaaacaccatagctggtccagctgacaggggctttatagccggtccccaagtttagcagatggagccaggtgaactgaagagtcagtcactgcccggcagtagtagcatcctgcgcttttgaatcctactgattgaccaggatcatttccttttgtttgcacccccccccccaacgaaaccaaaacaaacaaaaattgggacctttgcataatttcaagctagcctcaaacttctagccttaaagaggtagaatcccagacatgcacttccaggtgtgcatctctttggggtattattatatttagtccagttcatttgaacattattccccatgtttattttacaaaaggagaggcacaaagtagcctactagtggggtgcagtggagccccctaaaagagaccgttacagcccagtacatgggctgaccctgtttaagcacctccacattgccccaaatcatagtgtgcaaaatggagtcacaagtgaccacctcaggccctttagccatgaagacaaaggccagtgaagatttaggtgaaagggtgagtgtcatatcccaagacttcttcatggtgtgtcaaaggggaaggtgttggcagcagagagggaaaatgatactcttcccccacaaggaaaggccagcgaactggctgccaaggagttgggccaaggaggcttctgctattctgcatctgtaagcatcatttttttccatgaggagtaaagagacttagccaacaaattctcaccgcagcaccacagtggccttagctagatcttactataggcccacctttctgagtgggcaggcaagaacattttgtggagtcaggggtaggggtgaggtaggaagaaaactagagtaaaggctggtcttggcagtagttacctggcctctcattattttcagtggagcctgacttttttttagcccaagaagagccaggagcaacttcaaagcatgaggggcacagtgacagatgaggctgcagtggagccttaaggagcatcttcagagctggccgggaacccagcccccaacccgggcctggagtcagtctatggattcttagagctctgccctcttcctcccaccctttgcaggagtgggaactggtagtgttgggtaagctgaagtggaacctggccgcagtcacccctcacgacttcattgagcacatccttcgcaagctgccccagcaaaaggagaagctgtccctgatccgcaagcatgcgcagaccttcatcgctctgtgcgctaccggtgagagggggctcacggggcttccacggggccatgggaggtggggttgggtgtctaggcaagtctgagtaagccagcctggagcctcgctcgtgctttctcggaactagaacattttctctctctgcttcactcgtaagttctttatgagggcaagtatggtaaggggaagggagtcggtgcctgctaaaatattgtttatggtgtctaaagtgccctttgaagattatagatactgctctctggttgtgtttaaatctttaatcttttgaggaaaaggacggcttggagataagccctaaagggaatttaaggaaggtgggggcaaatataggttaaaggaccaacgacaagataaacatggtgcccgccctgataagggggaaggaattccttcaccgtggagctggtttattgccttcttgctgtttcctgttgacaagggagtgaacctttaagcaaagatccgtttattctgagctctggagaggatttttgatacatagctttattggcttcacacctgggtagaagaccctagcacaacatttctcaacctgtgggtcgatacatcccacagggcttacgtatcagatatcctgcatatcagatatcctgcatatcatatatctacataagaaatcacaaatagcaaaattacagttacaaagtagcaacggaatggttttatggttgggggtcaccacggtatgaggaactgtattaacgggtcacagcgttaggaaggttgaggttgagaagcgctgccctagaaccttgggaattcgggggccaagtgtcaaaagttcatctcctcagggttagcaggtaaagaaagaattgatcatgagtggggtgcagctcaattcatccagggttgttgaaatgtgttgatgtgatagggggtggggggaggtggagtgtaacattttaattccttgtaacatttaattatgtgtttgtatagctgatgctataatgaacaatagggcctgtgctttgttggaagttcagaggtcaggcagacttcgttacttagcactgagtgacctcgctcaggctgtttgacctctctgaagttcatctgggatctgcaaaacaggcctttggatgtatccttccctagccttggtggagtgggcagggaaactgacccacagaaaagcaagcctggagcttcctgcgaaagttcactgatgttgagaatggctccagttaaggtggatgcggaaatggatacagcctctcactggcgtgccggattccatctccctgttttagaggggtgtgtgtgtgtgtgtgtgtgtgtgtgtgtgtgtgtgtgtgtgtgtcacgcacacgcgagtgcgtgcacgcactcagtttgcgttggtccagcagccctcggggccctgcatcaggccttgtagcacacttgtggtgtcccagctccttcgtggagtcccctgctgttcctacagtcagggaagaggatgacaataagaagccccagcctttgctacgctttggacagcactttcagctccctgctcttctcttgctgactggcctgggctctagaggtcagtcccacactgacctgcagttttgtttcctaggaactgtctctttcctcttgcagtgattcagggtgggggaagggtcagtcagccttttctctctggccctaggacacctaaccccccggactcataaattcccacatcacccagctgccagtggccagagtcctgctttgaccttatcttttgaccaacaggtcttggggggtggggggaggctttcacttcttcctccctgatcttgcactggggtgggggtagggcgataggtggaattactcgggcttggatggattcctccaattctgtatagaccacaggtccgttctgtgttcttggggatcccatcccccattcttggccatcttgtccaaatccttggggcagctgccaactttggggcccaaatatggagcctgggattcagtgactaggggcagaggcccagtgggaggtaggggcagtcagaaagatgggcctgttgggggccttgacctagctttagccaaagagtgggaaggggtcagaaccatgtgccaagtactgctccagaggcatggactgatgagaaagtggcggaggtgctcaggcctcctggggctggaatgggtgggcctgaccacaaagcccccatgtctcttctggtctgcatttggggtcctgcatgtgaataagctttggagccctgccggtatgtgggtgtggaagggtggtggaggggagtgttggggccagcagacaggcagtaggctggacagcctaaacccagaggcctgctgctcttgaggacgttgagcttctggggccaagatctagcgaacccaagttcactagcacccttgaataatagtaggctcagagcaactcaaggaccaaagatgggagggtgctcttgtgtgccccatcacctcacaccctcagtctcttaactccagtcctgaatattccaccctgaacctgaggatggcccagggttttgagggttcacaaaggcgtgggaagggggcagtccctgaagaggtggtaggtagccagccctggggagacgttgctagtttaagggaaaagccaattgtgaaagagctggcagtccctccgagggggcgtgctgagcgtatgtgtgtgtgaaaggggaagagagcgtgggcagtccgggggcccagggagggaagagtgtggccgaccagcagtcttcctttatggggttctggggtaaggttggtggcagggcaaagaggtgtgtcctcctttccgatccagcctacagtggtttctgagagagaggtggtctgggattgcctggagctgctctccccgctggcctttgtggtggaggaattttaggtggggtgagagtgtaactgcagctccagcccagaacgtgtggctctggagaaggcagaagtggacttctctctcctggagggctccaggtcagcaaacagggcaaaaagcaccccctcccccctgggggtaaccaggaggctaccatcaaccttaccatactgagcacatgatttcagtggtattgagtttaaacttggtacagataccccacacctgcctctttttgcattgggagtattgctgtggctgctggacccaactccctgtgtaaccctaaggtagggtaggaatcctagggtacagccagtcttctcttaaaggtgttcatttgatttccagacagtggtggccctgaaaagtctggggacttgactcttgttctagaatgtaagccaagcctctctggtggccaggaaggaagaatgagacccacatttccacagtgcctctgagctgcccctagagggcagtcatagggctgggcgggggggggggggggaagagtagcttgtcgagctgaagtttctgtaactgatatcgnnnnnnnnnnnnnnnnnnnnnnnnnnnnnnnnnnnnnnnnnnnnnnnnnnnnnnnnnnnnnnntcgccattaatagttattgccttaaaccataaaggataggttgtgctgaacccttctggggggtgtcagatgtatggatgctaagtgacatcatgggtgtcctttgctgtccaaagagcaccccgggtctgtctggttcttgaaacctgcacctcaccacaggttgaaggagaggaagaagccgagacatcagacttgttggttgggtttcctccatcacaaaccgatctccctccccctagtggacaacaagagtaaagcagcctccgggagccttttgttagcactactcctggctcctgcttttactccatattaataagctcattgggcaggaccacagcatcccacttttaaatcccatcagtgtagaacagtttggccagtgaaatctcatggtttttttttaaagtgcagattccaagttggtggttatagagtgcttctcctgattcgggagccaccccagacacccagctgcttctgtggagtcctggatatttggtaccacgaggaggtggcagatgaatctagggcccatgtggttggcttctgggcaggagcccttttatgtttcctttcgtggcatgtaggagaaaacgttgagggttactctaagcacagactggattggggtctctttaatcagaggtccagcacccctagtgagtgagcagtggcactgagcagtcgtctgacaccccaagattcccatcctctgtactgggtcctttgcctgctcccaccaggagggagaaggtcaggcctgaggctcctcataggagcttccaggctctgggtgaaccacaccagagtcaatgtggactggtggcaagcagggtgagggttgggagcgtgggtgaccgatgtctggcatctaaggtttaccctgagccaggttctatgcgtgagttaatagcatcggctcttgtaactaatcctcaggatagcacggtgggaaaaaaaaaggtaaattagtacttttgatgttgtttttcaagatagggtttctctgtatagccctggctgtcctggaactcactctgtagaccaggctggtcttgaactctgagatcttcctgcttctgccccctgagtgccactaccacccagcaaatttgtaggtcagaaaaattcctttcaaagatacccatagagtgtaaatgaagccaagtatgacacaccaaactgggttgtactgctgggtagtaaactggctacccagccataagaaactgctacttcttgggagcacctgtttttccactggggaaggagtagatgtgcgtactggagcatggaataaagagccagtcagactctgcccaagaaggacttctttcagtacttaataagggaagaggtaaataccccctccccggcctgacacctgcaccccaggtcaagccgcacaccccttctggctccacatgctaaccctgagttggttttgttagcagtgtgacttcaaagttctgcaggaatgttgggtgaactccctatctgatgccccagcacgagggagggaactcttgagagcacttcagtgccctgtcactgacaggtgctctcacccagggcctctgtgggcccagggccatgggctggctacctcatctacactatgaatgccacacacagcagctaacaagtttattagatagagaatgtctcctgtaacccatatcggggagacttacaacacatcaagagccagggagggaggttggcttcatcacatcagccaggatagagaagacataggcaggggtcagcagccagaaggagttgggtgaaatcccatagtatatggccctcaaagtgaaagtgatgagcggtggaaggaacaaagccaaggagacagacagatggccaggcctacctggctcctgggattgagcccaggtgagcaggggagtgtgtgtggttcgctgatttgtggggtgtctaagaacagtcgaatcacgatgctgaggtacaatgctgaggtactggctctctctccattgtaaaagcctctctgtgatgctctgctgcaagagggcattgcccgaagagaggggaagagtccaggttgctctgagcgtgccgtgttcagcccaggattctcactctgagctgatgtgtgactcatgtgtccctctgtgctctgccttcagtctccactggacttactggtgtcttggtacaactagagatcattcactggaaagtggaccccatttcacagctgccactcgatggtgacactgtcaactccttaatctgtgagccccaaggcaggggcaaagacaagatcaacttgacagttcccaggtttcattccatccacaacgtcaccctccatggtggctttgtgtgttaaacagatatcacacgcaatgcatgcatgttagcagttggcaggattctcctctgcattgaaaccagcagttcatggatcacagttccatggatccccttagagaatcactcagcggtgaatgagtttaaggtcccaggttgcccctactatttaaggtgaatcccctgtcttaactcttagaaaaatacaagtgtggttagaatttgttagtctttagtgtttgagaaaagccctgtcctcggccctaacgttctgaagatccttaaaatagggttaaaagttgagactcaagagaattaagccaactcaccttattctgcttctacatttagcttacatgcacacacatgcaaaatgcacgtatgtatgcataccatatgcctgatgactgtggagaccggaagaaggtatcagatgccttgagatcggagttgtagacagttcatgtgaatgctgaaaatcaaacctgggtcctctgaggatggaataagtactctagccactgagtcaactcctcagccatggaagataacatgttttaatcatctcactaaaaggttccaggcatgtgttgacttcttgagtagttgtctgggcacagagtgtctgggactcagagccccggatgactagctgtgtactcagataggcaccctttctctcctgcctctgtgtctttgagaatatctacagttgacaagtcaataagggcttcctgtggaaggagggagtcaagggagacagtggctgtggatccaggggttctaggggcagcaggtctgcgccttccagcttctgcgcatcagctgtctggcgagcactgggccccgttttccttctgggcctgactttaagtttctggttctttgcagacttcaagtttgccatgtacccgccatcgatgattgcaactggaagcgtgggagcagccatctgtgggcttcagcaggatgatgaagtgaacacactcacgtgtgatgccctgactgagctgctggccaagatcacccacactgatgtggtaggtaccagctcttttggctgagtccccttggctgaaacccgatgtctctcctcaagttccaggaaggatggttggtttatgatggtggctcagagtctttttgtttgcgttactgttttcttggtatcttgtctttaaaggtcaaactccagcagattgatgccttccctcgaggtgtgtgtgtgtgtgtgtgtgtgtgtgttactaggggttgggttctcggtatcccaggcaaccactgtaccattgagttacatcatcagcccttaagggtttgttttgttttgtttttagatttatttatcttatgtctgtgcgtacactgtcactatcttcagatgcaccagaagagggcatctgttcccatcacagatggtggtgagccaccatgtggttgctgggatttgaactcaggacctcagggagtgctcttaatcagtgcttttaatctctagccctccttctctaaattttattgagagacaatctcacaaagatgccttgaattcatgatcctcctgcctccgcttccctatagctgggattacaggtgtgcacaaagactgcctgcttcctcttatgggtttgaaagcgtgcatgtaccttaaaatacagacagaatctcagcaagctgatggggggggtgggcagtcaactgattttcctctgcagtgtagggttcatgtccatttatgttcacgttgtcaggcctctgctctgccatggagagagtccaggtctactcactccccaatgaggtgggaatgcacaaagaggggacagctaaagctgtgacagagggagcagatttgagaggtggccttgtgagtgatatctctgccagtcagccttcttgccatcctgtctcgggctttcttttaactcaaagtttttggtggatggcaaagcacacaaggatcgagtgcagtagaaattcgagaactattattagctttagtctttttccattctgtgtggatggccccgaggctgctgctggctgccagaattcagagatcttaaacacagaggttttgagatggaccaggatcgcacaaggtcctgatttcactggctaggatgtaacagttgaagagggttctatctgggataactctcagagctcagttacctgcatccctcctccccgcagcccccccctccccccccaggcagcagagaaaggatgcagcagagaggcaggacaggtaacagcagagccagtacccaagcctctgagctctgtctccagcctggaaactttgctcatctctgtggctcttgggagctttgtattttgcaaaaggcattcagtggaaaggctaagcagagaggggagtattgttggctcttaggttctggtgtttcaccatggagaggcttggcttgggaatgcaggggagattcacaagataccctctggatatgcaggggcattcagactgccccatgagggagtttactgggttcaagggtcacgccgtgtaatgcacaggcctggggctggtgcctcgcagaagtctgcaaagcacaggctgtttaaactcaggaagctcacagccatccagcaactcacctgtatttggccttgacactacctcagagaggtgaaggccttaaaggccttgatagagctaaaccatgggtctttctttctctgaaccgggttttaaacagagtatttgaagtgttggtgccaaaaagcatgctttttagccaggactctaggacatggattgtgaggctccccacctccacccgcagcacagcatggagaatgtgtttctgactctccaacgtgtgtgtgtgtgtgtgtgtgtgtgtgtgtgtgtgtgtaggggctcaacccaggccctaatcttcacttttcctaatgtgtcctgctaaggattacttcatagataggatgttagccagtaacaaacttttcttcaacttctgaacatgcacacgcacacatagacacacatgatgctgtgaaggttctgtgccccagtataggggattgccagggccaggaagcgggagtgggtgtgttggtgagcaggggaggggagaagggatgtggggttttcagaggggaaactaggaaaggggataacatttgaaatgtaaataaagaaaatatctgggctggtgagatggctcagcaggtaagagtactgactgctcttccaaaggtcctgagttcaaatcccagcgaccacatggtggctcacaaccacccttaatgagatctgatgccctcttctggtgcatctgaagacagctacagtgtacttatgtataataataaataaatcttaaaaaaagaaatgaaaatatctaataaaaacacaaaaagacacatgtagaaacacacgtacacacatatatacacatacatacaaacatatatacacacagacacacacaatgcccacgaagacagtaagggctggagatagttcagtgattaaaagctccgactgctcttctagcacctgggtatgattcccagaacctacgtggcagctcccagtgatctgtacctcacacatgtggtgcacgcatacgtgcagacaaagcaccaatacacataaaaacagattaattaaaattcaataaggaaaagaaaagtgtgcaggggcgggggtcctcacaaatgctagcgtgaggcactttaagagaggcagggcatgtctgcaaatgaacttaggatgcctaatgcaaaatttgagcagagtaaaaaaattgcaaaatatgtctttgggctaagagaaacaaaatgtggtatggccacatgatgggatgtcagaaagccttccaaaagaaatgtcatcctatagacactaagtgcacggttaagcttgaagacattgtgctaagtgaaataagccagacgcaaaagagaagtcatagatgaagcagctagagaggtcaaattcatagaaacaaaaaacggaaggaaagttggtcaaaaggttggaaggaaggcaggaaggaagaaaggaaggaaggaaggaaaacaggtaggtagggaagtggaacatcctagccataacatacagtatgaatgtacattgcaccaaaatgcaccaaaaatgatcaattttatgccatagtatctttttttttaatttatttatatgtacagtgttctgcctacatgcatgcctacaggccagaagaaggcaccagatcctgttccagatagttatgagccaccacgtggttgctgggaattgaactcacgcctcctggaagagcaaccagtgctcttaacttctaaagcatctctccagcccctatgccatgatattttattcatataaatataccacactcatacagatcatccctgtgaaatgccagttagtgtgttgctctgtcatgtggagaagttaaaccaatccaaatagaagccaggagccactgatagctgactgccattcctgagtgcccacccccccgccccgagttctactctcacggctggcccgaggtcaaggttgaaagttggtcccctggactccccagccatagctagacagcatctcccagctcactggcagctgatagctggggctgcagggacccacgcggctctgagaaacgggctttgttttccatatggttgccaaaatcaattgactagctccattccgaagagaagtctgagcgagaagcctgacagtcttacagggacagaggggagtctcagaggacagtgtattttaggtccttttcccttccagccacaagttaagagttactaaaatcagacactagccagggaggcctgcttggctctcagggaacttctacatacccagacttctgttgccaagagggagtttgagagcagggcttgaccatcccaggcccccacagaatcctgttccctttccatcccctccacagtgtaatcttgctgtggttcagagtttacctcactgttcacttgactgtagggcctcttgtataagacctaccttgaacttggctttttatcccaagcctccagcagtcattagaaactaaggcttggagcaagggagggaaggatggaaggacgaaaggcagacagggctttcaaatgtgcctctcattcattcaggaccttaggaaagatttatcatctgtctgtatctacctgtctatctacatgtacaaacttaaacagaagatttatcttggagcaacctcttaatttcactgtcagtcacacacttaagtcaatatagagtagagctggtatgaggctcagtggtagaatatttgcctaacgcgtgcaaggttcaatccccaatagttcaagacagggaaaaaaaaagttgaactgaggcgtccatgctataaagatttgaggaagtttctagaagatatataatagaacaaacagaggctctagtaatactgtcagttctgcctcggttataacaggaccccttgccgtgttctccagaactgcctagaatagattctagaatattcttcccttagggtcatcttggcattttatgatacaacttctcagcgagtaattacaaaacaaataacttaagtaagcattgctcactttggacccaaacttttctggggagagggggtccccatcatctcttatgtcccccgccccccttggcttgaaacttgtattctcaaagtgcctctgactaataccaccttcagtgtgcttaaggggggcttcggggaggtaggaattctggaaagcatgcctgggggtggggaggcgggtagagctgggnnnnnnnnnnnnnnnnnnnnnnnnnnnnnnnnnnnnnnnnnnnnnnnnnnnnnnnnnnnnnnnnnnnnnnnnnnnnnnnnnnnnnnnnnnnnnnnnnnnnnnnnnnnnnnnnnnnnnnnnnnnnnnnnnnnnnnnnnnnnnnnnnnnnnnnnnnnnnnnnnnnnnnnnnnnnnnnnnnnnnnnnnnnnnnnnnnnnnnnnnnnnnnnnnnnnnnnnnnnnnnnnnnnnnnnnnnnnnnnnnnnnnnnnnnnnnnnnnnnnnnnnnnnnnnnnnnnnnnnnnnnnnnnnnnnnnnnnnnnnnnnnnnnnnnnnnnnnnnnnnnnnnnnnnnnnnnnnnnnnnnnnnnnnnnnnnnnnnnnnnnnnnnnnnnnnnnnnnnnnnnnnnnnnnnnnnnnnnnnnnnnnnnnnnnnnnnnnnnnnnnnnnnnnnnnnnnnnnnnnnnnnnnnnnnnnnnnnnnnnnnnnnnnnnnnnnnnnnnnnnnnnnnnnnnnnnnnnnnnnnnnnnnnnnnnnnnnnnnnnnnnnnnnnnnnnnnnnnnnnnnnnnnnnnnnnnnnnnnnnnnnnnnnnnnnnnnnnnnnnnnnnnnnnnnnnnnnnnnnnnnnnnnnnnnnnnnnnnnnnnnnnnnnnnnnnnnnnnnnnnnnnnnnnnnnnnnnnnnnnnnnnnnnnnnnnnnnnnnnnnnnnnnnnnnnnnnnnnnnnnnnnnnnnnnnnnnnnnnnnnnnnnnnnnnnnnnnnnnatggctccaagaggggctcctgcaaagctggggcggttgtaactgttgggattgattgatggatgattgatcggtggatgattgattgattgattgattgatgattgatggatgttggaggaataccatgtaggtctctccaccctcaggaaggaatatgttctacacttcctgcagatagaggatttctacctggccgagccaggactgagggacccttgttgaaggtagagctaataactgaccacttatgaggaagtggaagctgatagacagcagttaagcagacctgatgggtttagcagtctcccaggtgaatggcagatgactctgtagccatgtttcgtaggctaactgcatcagtccttgttcctctctccaaatgagagggagcaaagatcagggatcatccagtcagtaatgatttgaatttcagttaacactgggaagggagagcatagagtttacatgaaacctttggatcttcctccagtgcttagactacttggtgagcatacccttggctggaccattacatcatgcttgcatcatcttgagctcttggctctgaacgtgcagtagaaatgactgccagatgtcttgtcttccctgtaggggtttctcccaactatccctttaaaatcttgggcagctagaagggaaggcttactgtaggaagagtagggacactgcagatcctaacgccaagttcttaagctttctgcaggctgatttatgaagaccatctggcatcattaatacaatagagatgtacaagggtcgtgatgacggggtagatgtgccaacccagatgatcttttccgggaatcagaagatagcggactagtttaaaaaaaaaaaaaaaagggttgtatggacttggccaagaggcacaaaacttcctactgtagagcagagtctcccgtgtacattacatcagaaaatattcaccaagtaaccccacacacacacacacacaccgtaaagattcctcatcatttatagaaggtctcactctgcagcccaggctgtcttcagaggcataatcctccagccttctcctcagccagcttcctttcaaatggagtggttccgagttctcctctcaagccccaccacatagacccagcctcacgaaggatccctcatcagctacaaatcctactgttgtaaaataccagaagcttccaggcctcaggtaggatttgatttctgaggccaggtacatgattggaggcatggatgtggttgctgtctctggtattggggtgttcccactcattctctctgccttccaggaaaaagctatttacacatcaccaaatgctgccagattggcctagcaggaaacatggcaaacaaatgagaagctgtcaggacctgagtttttaattgctaatgagggtggcaggtcccaaggatcaggatgagagatgttagagcctgggcacatgagtcctttacttggtcctgttaaaattagcctggtgacccggtgacccccgcccccaatgctggaccacactatctctaggattaaccttcgacacatccttgtcttaagtagttggtgatctatacctttgttcacagaaatataggatgggcgtgtttgtgtacttaaagtttcaactactcagccagcctgagaaacatgagtctcaaaatccaaaggattctttcagattcctggacagatggagccactaaaacacacacacacacacacacacaccaatcatttattgatttgctacttagctcttcatttttatacttggagaaaccggggtttgcaaatggagctgtgccctgccagcaccgagtgagcaccagacatccccatcctgcttcccgcccttcccaggttcaggagaacgtttcagccaatgaccttcgctcttgatctgctgccatgcctcatcttcaagctacagtttgaactggggggcagatgagagatgggaaagaataaaaatggaggtgtcatgtggggggggggatgaggagcagtagggtgggcgggggtagaggatgcaaacttttgctccttagtagttattgccaactttattttcaggtctctggaaaataaagataatgcctttatgtttgtggaaaaaaaatatcaattcctaggtggtgaggtctaagcagaaaaataaacagagggaagtttatggtgaactgtgagcagataccaggagattcgagttagcaccgtttctatacgcacaggatgcttcctagtgcagggaggtgggacggagaaactagggtgaaaatccctggtaggggcccccctccccccaannnnnnnnnnnnnnnnnnnnnnnnnnnnnnnnnnnnnnnnnnnnnnnnnnnnnnnnnnnnnnnnnnnnnnnnnnnnnnnnnnnnnnnnnnnnnnnnnnnnnnnnnnnnnnnnnnnnnnnnnnnnnnnnnnnnnnnnnnnnnnnnnnnnnnnnnnnnnnnnnnnnnnnnnnnnnnnnnnnnnnnnnnnnnnnnnnnnnnnnnnnnnnnnnnnnnnnnnnnnnnnnnnnnnnnnnnnnnnnnnnnnnnnnnnnnnnnnnnnnnnnnnnnnnnnnnnnnnnntcaatgcagtttggaataggaaacacttaaggcgtccgctgatgcgctggttctgaccagcttgatctgggataggctgctagctagttcccagatggtgctgatgctgcctgctgtggccccccactttgtatactgagtagtttccatggcatttgagaacatttctattcttacctcacaggaaaatcaggatgtgagttggatcgcgcgtctgcctttgagaggcgttctatgcatttgcatgtgctaatagccccggtctggacctctctcctctaggattgtctcaaagcctgccaggagcaaatcgaagctctgctgctgaacagcctgcagcagttccgtcaagagcagcataacgccggatccaagtctgtggaagatccggaccaagccaccacccctacagacgtgcgggatgttgacctgtgaggaagccattcgggcggcaagagagaggcgtgttcgtcatctgctagccccttctctctctagttatgtcttgttctttgtgtttttaggatgaaacttcaaaaaagaaaaaaaaaaaacaaaaaacaaaaacaaaatctgcccccacctagatcctatttaaaggtcttttagaagtgagaggaaaaggccgtatagttgtaacgcatgtggtgcctgttcaaagtcctgcataaggggatccctgtacactcgaaccgttattatttgatgatgtaaaagtcatagtgagatgcttacaggagaacccgcagactagctagagagtgtgcgtacctgcaacatgggaacgaattagaggagactgtcttttgtgcttgtgacctagtgcatatgccccctttagtagaattgcaaggaaccgtgggtgccaggaccgcatgagtagtttgcaaagcagtgaacccaaggaggaatcagaaacgagaagggacatgccggggaggttgcgcaaaaccacccaaccacatgactgaaccattttggatgtaagaagcgccttgatgcctcaccacgtgttcccaagactgagcgtccgggtctctccgtcgcatactcttgctgactaaagtagctgctacctaagggatatgtcttttgccagttggacacaggtgaacggctcctaagtctcatgtttggtgaatttgggcttctacttccaaacatggttcattgtagatgtattttactgttatctgatggagggaattcgctatgggccatgaccaaaacgcatctaaatgggggcagatggagaccatagacggaatctaaaacaaagctgccttgtgtaagggaagagggtgaggtgatctttaattcccttgttaagaaaaagaaaaaagaaaccacccctaacttttggtgctgattagcatgtctggtccactgtttaactttgttataaaccattccattagaaaagcactttgaaaattttgggggagggtggggtgggatatggggatggtttatgcaaatcatgttgaatacgccttcctcctttgcccctccccttcctgaccctcgtccagttactgttcatttctggagtctgatgttctggtacccagctctggtgtccctgccagggctgagaaagccctctgctgatatcctcatcccagcattcttcggaaaacctgtcaacagaggtctaaagcattgtgatggcttagaaggattgaatccccgtctatgtttttctcctttggacatggaaagaaaggttacttctgatgcacaggctgaacatcagggtgtggcattttggtcccttttccgttttttgtttgtttgtttgtttgtaattttagtgcaaagttgtattcattgtacttgaagacccccctctcccacttcttggagacagtcagtaaacagaagtgggagccacagttggtttggttttgttttgttttttttgtttttttttttttttgcacaattataattgacaggttatgaagctatttgttaaaatatctgctttgtttttttttttttttgagaaaagatcagaacagggctgctttgaagagttatacacaggttctgccttgtttcacagtgtgagggttgaagatggagaaacatctaagggtctcttatctttcattttttcttttgttctgtttattattattatttttcgctgctaagaagctaagatcgttcacccccattcacattaacagtacctagctgtaatgtttcacggtgtgctgctattttagaaacattgttataatatattattttactgcttaaatttcaagtcccgaggtagatggtcgagagacgagttctctgtactggaaaagccttttcctctgtccctgtccttctggtagcatcgatgggctgcgttgcgtttggttccgtttggttccttttcttccgtgcctcttcattaccaggttttctttcctcctctgaccacattcttcaaagagagtattctttacctcaggtttactggacaaaaacaaaacaaaacaaaaccaatagtgataacaatgtacttcttttcgttttcctaatacctcacagctataccggatctgtttggaaggccgctggcacgaggcacagggcaggcagaagacaggaactggacatcctccttgatagaaagcaggagaaacctgaccccagagtctcaggccaggggtcttctctgtcttgaagattgccaggctcccctttgacgcaggctcccttcttatgatagaagacagtgacgaagggctcctctacccaaggcagatactcatcaaacacagacagtggactaggtcagcctgatttgcatgcgtgcaccagggtctgcaatgaagaattctggcagacagttaggagaccctccctccatcttgtagcccattcagacacaggactttcctcttcatggggtcccttcatcatgaacattgaccagtttccttcttggcatctataccccaacttcggatggcctccgaagtcttcctaggactgagtctggttggtgctgagtctacagcacacgtggatgatattcctttctccttctcttgtcctctgcagtctacagtgacaggcaagtgctgtgcgtggccaggttgtctgtgtgtagcattgaatggcttcagggtttggatcccgttgagtggggcaaggtaggaggcccaagttgaatgagtctggaatgcaagttgaaagaagggagaggctgtttctgtggtctcgggtgtatttaggaaggattgggacttggtgagttagcgagaccctaaattctaggggctttgtggtaggacggtgggtgatggtttgggaagtttgagagagaaaacgggagcagcctgcagctagccagtgtttatccagagctcacgcactgcacagcacactcttctggtccttaagggaccccacagaacttgacagacacactcccttgagttcttgggcaacttgggtacctgatgagtggcctttgagcttaactgaaacattgaatgaaggaagctgacacacaaggggagaggcaggttactatctgcccctccatccctcttacctggaacctaagacactcttcctgtttgccttccttggagcctagtggaacgagtcctgtagagtggccattctgcctgctcctcacttacacaaaggaagggagcctggattccttggtgaccaataccttctgcttagatgtgggtctccttggtagtatttctgtctcagaggggtataaacgaccccaaggatttcagcttgctctccccaagccccttcgtatcctacagaaggggttgcagattctggtctttttctgccttgctaatgatctcttctttgtttctaatttgtcannnnnnnnnnnnnnnnnnnntgggggctaagtcgttcccccagcctgccaaattttgatccttcccctgttttgaccaaaatcctaaggggaaagaaaaccttagtatgccaaaaataatatgctaagcataaggagattcataatggttcctaagaaccaggcagcctgtgagtggtgagctgcttctagatgggacagcttgtagaggctgctttggtttgaactgtccccaggacaccacgggaaagcagagcccgtcatataggttgctagctttaaggtgcatgcctactgacacgggactcctctctagcagccaggctgggggtacatgtagcacccctggatcccatcttgttgctagcagggtaagtgacccctcagagggagcttaagagctttcctatagtctagctctttggggacccaccagactgtgccttgggaattataggagcaacaggctaagacagggtggctttcacaaagaaggcagaggagctttgtctccatgaggacagggctgggaggaccacacttgtccctgtgtcctggacagtggtgtgggaactggaggtagcaatcagaagtctaagtaagccagctgacctctaagcccaaaggactcccccttgcttaccttagacagtccaaccttgggaatagctttaaaaaggggaattaatactgagacagtgaagtccccttaagccgacaagccctccataggtgcacaccgcacacataggcttctctcagtgcagactccaggtggtggtcaacagctgcggcatgcttatctatttgtacgaaatagtgtagggaagccccaggaggtgttatagcttccgtataccatgtggcttttgatgcttctggattctcaacagcacaaaagagtcctcgagccggaacatgcgctactccgcttttaaacgtggctgggctgtgagacccgttcttggctctggttttacgaagccatcaatacatacacacccttgatggagctgcagatccgttccttttcctgcagcccacttgtgggggaaaagtgccttactgacttacagtagccactcagtttcaacaggtgcctatctttgacaaaaaaaaaaccacaaaaaacaaaaaaaaacaaaaaaaaaaacagaaaagaaaaaaaacgttaaaatgtctcttaattttcattggctgttattcttatattgatcatcttgtatgttcccagcaagtcaccgggccatcgaattatctccatgttgttgttcattatccttctgccatgtacctcagatctatcagttatggtctctcttgtcttggattattttgttccttttttttttttttaatttgctttaagagtgcgatgccatatcaaatcaatgttgttctctcacggtgtactctctaacaggtgtgggtggggtttatggttgggatacgaggagagtctaaagtagcagattagtgtgaataaaaaagaaaaggtttttaggaaatccgggggaagtacattgtattgactacaatgctgatgtgatgtagccgttaagtcttcagtgatcttaaaaacaaaaaaacaaaaaaaaaatcaaccctaatttgttcttctgactgactagtttgaagttggatttgaagatgatgttgaaaaaggttttgaatgcaattaggttatgctatttggacaataaactcaccttgacctacaatgtctggctgtcactaacttctttctagactgctagccctcagaggagaacatacccgtcccccagttttagaccatgaatatagccagatgtgagtggggatatctgcaagtgtcttcattaggtggctgaggcaacagtgtcatgcctgggctttcaggatagcccccccacccatcccccgtcttttgccaaatactcactctcttgactgtgagtaagtgtctcctggtatggttgccagaaacccactgtgctatctccccacccttagccaggggagcaacatgagccaagtgttcggaaaggttcccataaaatgcctctccccccccccccgcaccctttccttgtatctctcgtgtgaggtgtcctagaatgcataagggtccccctggaactggaatcacagatgcctgtgagccaccatgcagatgctgggtgtactggctagttttgtgtcaacttgacacagctggagttatcacagagaaaggagcttcagttgaggaaatgcctccatgagatccagctgtaaggcattttctcaattagtgatcaagagggaaaggccccttgtgggtgggaccatctctgggctggtagtcttggttctataagagagcagactgagcaagccagtaaagaacatccctccatggcttctgcaccagctcctgcttgagttccagtcctgacttcctttggtgatgaacaacagtatggaagtgtaagccgaataaaccctttccttcccaacttgcttcttttttttttttttttttttttttggtttttcgagacagggtttctctgtatagccctggctgtcctggaactcactttgtagaccaggctggcctggtctcaaaaactcagaaatccgcctgcctctgcctcccaagtgctggattaaaggcgtgcgccaccatgcctggccccaacttgctcatgatgtttgtgcaggaatagaaaccctgactaagacactgggcatcaaaccagagaagccagaggtcttaactgctgagccatctcttcagacccatacttttgcatttcttgtatttctcttttttgttcttgtttgcgctctctctctctctctctttctctctctctctctctctctctctctctctctctctctctctgtgtgtgtgtgtgtgtggtgtgttttgagttagagtgtctcatgacttagctccgactgtcctgaaactcctgtctctgcctccccaatactgggattaaagttctgtgctgccacaaagggcttgcttttgtatttcaaacaaatttcctgagactcaaacatccatgatagcaacaaaatcagaccttctgttggcttatcagggacgttcctaacatccctctgtgaaccaagcgtccagaagctgccagatagtgttcggccttgggctggggaggaggaaagtggcagaaatgcccttgagagaggtggagagatggctcagcagctaagagtgtttgctgctcttgcacccaaatcagggggctcacaactgtgactctagttcctggggatccagcgccctcttttgcctcttacggcttctgaaggcactgcacacatgacacacatacatacgtgaggcacggatgtatacataaataaagataagagatgtatctacatataatgcttttgacagtgaacatgagggttcgtggcaccaacgtgatgtgaggatccagggcctacatctggtcttcaggaaacacaatggaagcaccacagctctgtggctgaagaacttctctgtgaggaaaccaagcacacaggcttgtgtgcaaacgcatggaggtggatcagcaactggggttgaatgtggcaagagccggtgttgagagaggagcagggcttgtgctgtggagaatggagaggtttgctccggcacatgaactgcagaaaacacttgttaggatgtccatgttctttggaaacagtaaaagtggaccttgactttttccaaagataaagagatgaaaagtgttttttcagggaaggggtgagtactcagataggcagcctgcaaagcacacacagcacaacagactttaaactccacaaatacatgtaggaagtgggctaaactcggccacagacactgacccagggcggccacctacctgatttcttgggaagcctgaaggtaaggctggaaattacctggtgactggtgacttgtatgttctgggttttgagggcctttctggaggtggtaactggtcaggtgcctctagttctgttcacagacttgagcagccagaattgactgccagagaaaaaaagagtccggcaatcctgcttacctttcgtcctcctctacctctctattgtcacctcatcagccttccaaagctttgcttactaaaaacactgcttcccatttaattggaaacggcaagtttctgcagctcctgactccaaacagtccagggatagccttaagtatgaggcccttcctttgatgcccacaaggggatgctggtgtcataggtggaaccaatctgcaaagccactagcatgggtctatctagagaccaggctttcagcatttgacctaggggagtagggagcagcctgcagagacccatgtcaggcctgtcccacacatgaacaatgacacttcctcacctgggcccctcatgggcccacagtctctccttttggattagctgggaccctgatttattgccttgtttcgtgttcttcagtgtctaggccagaagcagcaaccttgaaaggtgccagactgaccggatccagcctgcacagagtgagaaggactcctacagtcactaaaatagcataagagatctcttgtataaaagtcaagatcttaccaattcattgggaatctaggtcgtggagaccccagggcttcaaggcagggtgggctgcagtagagagtcttctcagccccttctccctgctccctgcctctacccactcccctgccctacccactaccaccccctgacatttctctgtagtctaggttctgttctttcctctggctgtgcagtggcattgctccaagggctgtggaagctatctgaaacctcagagcacagttctagtacgtcccactttgaggaccagctcttctcccagaagacaagagacccctgaatgaagcttttgtctgttgccctagggttttagtcaggtgatctagggtgatacaatccaatgtgcattaagcatgagcttctcccatttttatttgggggggggtgttgttattttatgtgtatgagtgttttgccttcatgtatgtatgtatgtgcgctacatgtatgcatggtgtctgatgaggcaagaggacattggatcccctgggactggagttacatgtagagagctttgggggctgcttggctggaatctgacattgggccaggacaaggaagtaagctcggaatctaacttagaacaggaaagtaagttcaggcaggaatctaattttaaactagaacaaagaagtaggcttcaggtaagaatatgatttggggcttggacagggaagtgggctcattgtgataagccctgagaaacagtgatggtgggagtgatcatggaactttgtgtattgcttcgcttgttccttgactgtgtttaatgccgtgtttgttcctcaacatagaactggccttatcgcttgcatgtaattaaaatggtataaaagcagactgggaagaaataaatctgcctcagcctcagaactggctggggtcatgctatagtgtctaattgtctttttctttttaacccttgctcctgccctggagaacctgttgactgactggcttggtcagtttaagatggttgtgagccatgaagtgggtgttgggaacttaactctggtcctctgcaagagcaacaaatgctctccaactctgagccacctctccagacttcagaggggcattttcttttacttgtaagatttttagttttggagggtttttgtttttgttgttttttgctttgttttgtttaactgcaaatctgctgggcatggtggcttatggagcaggtagatccctgtgagttcgaggttagcctggtccacatagggagctgcaggccatccaggactgaatagcagctggaaggggtgacggagggggtttgcaaaagctgtttggttggagagacattgctcaaggtcaaaagtatgactatcccaaactcttttacagagatgattgcagggaccgcccgttcactgctcggatgagctccagaccaaggagttgaatgagaatcctttcatcaacaaatgtgtctttgatggctactttgccactgaccaggtcctgtaaactttgatcttggtgactagcggcagagccagacgagaagtcacaggcccaagtgtattggtggaggatgcagaaactctagtatgaagcctgctctggaatccctgccagtcctccgctgggttcagttgcctcgtgattcacaggactcacagtaaactcagctcagttcctttatctgtgaagcaaagctcaagaacaaccatctatccctccaagagtgttatcagaatgaagtgagtcgattcattgaaaaacatagagccaggttgacacccagcatttgacctgcatttgctatcatcttgggctaaagcannnnnnnnnnnnnnnnnnnnttgggatgtaaagaaatatttgcaagctgaaggggtagctcagtggtagagcatctacctgctgtacacagtctctgggttccagccccaccacttaaaggttgggcatggtggcaccttaaatctcaggactgcaaaggtagaggcaggaggatctctgtgagttccaggccagctagggctacatagagaaaccctgtctccagaaacaaagaaagaaggagttttcctgttcacaaccctcagtctcttctggtgggtgtgactcca

SEQ ID NO: 2 - DNA, 1255 bp, Mus musculus
ggcgagctgaggagagccgggcagttcggagggaaggaccggtgcgagtcaggcggcccttgaggctccgctcgcccaccttccactcttctctctctctctccctctctctctttgccatttctttcctctcccaaatctcccattcagccaaaggaaggaggtaagggaagcactccccgactctctctctctctccagctcagtcctccaaaaaataataataataaaaaaaatttacagtcgggaccgagtggtggccggctggctatggagctgctgtgctgcgaggtggacccggtccgcagggccgtgccggaccgcaacctgctggaagaccgcgttctgcagaacctgttgaccatcgaggagcgctacctcccgcagtgttcctatttcaagtgcgtgcagaaggacatccaaccgtacatgcgcaggatggtggccacctggatgctagaggtctgtgaggaacaaaagtgtgaagaagaggtctttcctctggccatgaattacctggaccgtttcttggctggagtcccgactcctaagacccatcttcagctcctgggtgcagtgtgcatgttcctagcttccaagctgaaagagaccatcccgctgactgcggaaaagctgtgcatttacaccgacaactctgtgaagccccaggagctgctggagtgggaactggtagtgttgggtaagctgaagtggaacctggccgcagtcacccctcacgacttcattgagcacatccttcgcaagctgccccagcaaaaggagaagctgtccctgatccgcaagcatgcgcagaccttcatcgctctgtgcgctaccgacttcaagtttgccatgtacccgccatcgatgattgcaactggaagcgtgggagcagccatctgtgggcttcagcaggatgatgaagtgaacacactcacgtgtgatgccctgactgagctgctggccaagatcacccacactgatgtggattgtctcaaagcctgccaggagcaaatcgaagctctgctgctgaacagcctgcagcagttccgtcaagagcagcataacgccggatccaagtctgtggaagatccggaccaagccaccacccctacagacgtgcgggatgttgacctgtgaggaagccattcgggcggcaagagagaggcgtgttcgtcatctgctagccccttctctctctagttatgtcttgttctttgtgtttttaggatgaaacttcaaaaaaaaaaaaaaa

SEQ ID NO: 3 - DNA, 870 bp, Mus musculus
atggagctgctgtgctgcgaggtggacccggtccgcagggccgtgccggaccgcaacctgctggaagaccgcgttctgcagaacctgttgaccatcgaggagcgctacctcccgcagtgttcctatttcaagtgcgtgcagaaggacatccaaccgtacatgcgcaggatggtggccacctggatgctagaggtctgtgaggaacaaaagtgtgaagaagaggtctttcctctggccatgaattacctggaccgtttcttggctggagtcccgactcctaagacccatcttcagctcctgggtgcagtgtgcatgttcctagcttccaagctgaaagagaccatcccgctgactgcggaaaagctgtgcatttacaccgacaactctgtgaagccccaggagctgctggagtgggaactggtagtgttgggtaagctgaagtggaacctggccgcagtcacccctcacgacttcattgagcacatccttcgcaagctgccccagcaaaaggagaagctgtccctgatccgcaagcatgcgcagaccttcatcgctctgtgcgctaccgacttcaagtttgccatgtacccgccatcgatgattgcaactggaagcgtgggagcagccatctgtgggcttcagcaggatgatgaagtgaacacactcacgtgtgatgccctgactgagctgctggccaagatcacccacactgatgtggattgtctcaaagcctgccaggagcaaatcgaagctctgctgctgaacagcctgcagcagttccgtcaagagcagcataacgccggatccaagtctgtggaagatccggaccaagccaccacccctacagacgtgcgggatgttgacctgtga

SEQ ID NO: 4 - DNA, 52302 bp, Homo sapiens
  misc_feature (11301)..(11320): "n" at positions 11301 through 11320 can be any base.
  misc_feature (29267)..(29286): "n" at positons 29267 through 29286 can be any base.
ctccgcaaaatttgcttaattcccttttcactaaaggagcaagctgatgctccatggttctgggtagctcagaacgagctttgtttaaagaggctcaccaggtccatggactgtcacctaaagaaggatctgcaagttagggtccattccaaaccgtgtctatatgcgctctgatgggggctctgtttgagttgtaggaataagctttaggttagtttaagctttaggttaaactaacctgctaagatttccttaagcaccctggagcagtgttatagtccatatattcttatgctctctatatttttgaagaccgctattctattaacttaggcagttctgttccttaggacaaggaaaacagcatttttcctcagctgacatgtaccaagtgcccatctatatgaggaactaaatgttaaaagttccaactcttgatagattaattctcccagatacctgggaagtgagagcatacctaaacccacaatttaagaatccttgtttaaaacataaagtatataataaattgattccgattttgatgatgataataaagtcactggaattttatagattttgagctgaaagggaacttaacgatcatttactacagccagttaattttgtagctgaggaaactcaatcttggaaacacataatctatccccaaggtcacagtgctggttagtgcagagtagaagcaagaaagagggtacagtcggccctctctatgcatgggttccgtatccacagatacacccaaccacggatcaaaaatattcagagaaaaaaacacagtaaaaaaataacaaatgcaacaatgagaagtaatacaaataaaaacacagcataaccgcttccaaagcatttactttatattaggtactgtaagtaatctagcgataatttaaagtgtatgggagaagtgtataggctatatgcaaatattacaccattttatatcggatttttacatcctggattttggtggtggggtgggagtctttgaaccaatatccccacagacactgagggatggctgtattctgacttctaggctagagctgtttcaccaacatgatgctaataaaaaggacaggattttctgcatcaattctaggagacagtcaagctaataatcagaggtctatattctgctcttaatgtctgggtgtcccaggacaagaaaatgagctattgtgacctcaaattccctagccaaaggagtgaaacactaatcaatgccctgtcagatacagggagggctcgttcagacgagaaacagatgctgtgggaaatacagctactcaaagaaaggaacgctctcagtatgatggaccaaggaaacggctctatctttggctactttaaagggactgagtcccatatatgtgatatgtgaatcagacatccaaccaactcgttcccatagaatataaacaaattaagaacataatttaggaacataattcttaaaatcactatgcaatccaagtaacagttacttgactagactgagttttaaagaaaagataaatttccacctccctggtttaaggtatgttgtggaaggtggataaaatagcatatcttcctatgccttttgttctatgattttattattttttaagaacatgtacttatccggggtattatttcctatgcttcatcactagacaatgtgcttcccagggacgcggactgtgtgattcaactctccttcctgtctaccttccaaaacattgtctatgtccacgatatccccaatgcctagcatagtgtttggtatgtggtaaggactcaattttaatcaaataaatgaatggataaattgcaaaacccaaaggcattctccaaagcacaaaaatctcagcatatttaactcttccattaaaaccacttaaattctaccttacagattggaatcatacccctgacatgttctgatgtatctctgcacagacctgtgatgttatcagtttaacacatatgtgatctctcagcatgaataaccttaatgaatactatatagagtttcagtcgcaaacttccagacacagaaggcgtattctgtgactggccaaaatggcatgaggtcctgcagtccattcccctggctccaagcaagactgcatctaatctatggttgagaatgatgctttcctgaatgggaaaggtttccactaaatgaaacatacagtctgccttggtaaagtcttaagtgtctgaatggaaggtcagactttgatttcttgaggtaagtatggttttcatcccaagtgtagcaaatttcactggcgttccattaccgacttacttaaatcatttgctagatgacataaaattgctggtaattacactacaaagagtgattatatgaagttttcttgtacaaaagcaagtaaatttgagccttattcaatattttgttagggaaattttaaattaaatatgccattttatttaaaaagagaaacattagaagaatatatattcagaagaaagtaggggggtagaaaaggttgcaagtcactagtttactggaactacacaatggggatgatgtgctgctacttgatacaactaaatttcctgagtttaaatgatttcagtgagacccccacacaaaacggcctgcacagccctaatccatgatctaggctcgcctctctcaaaatatttttttaaaataatggttcacgatcctgaaataattggtggccatgggatgccagatgtgagacatttcatctgaaaccttatgtaaactaacccaaaccatttgcttcagaatatcttccttgacaccaggaaagagtttgggtcctgggtttgcatttgcctgatggactgactggctgctctcaaaaatggaaacatatgtgggcacgatgaaggaaaggctttggaaattatgcaaagaaattttcttttcctttttaatcctgtctttttttttttgcttcccctaggcaataggtatattaaatgttggtgactttttattttcaaaagcacaaaattaaatgttttttgtgttatttctcagaacaataacctaactttggcatccatactttttttttttacaatttgatgacaatgtttaaagaaataaagtgaacatccccccacacacactcatcaaaagaataaggaagataatttttattattatcatcatcataattactattattaccaatgaagcttgaaggaactcacctttatacatcacaaagaaataattatttggtttacaactgatgagaccacaacgaaagtatgatttgagatagctaagagcagaaataaatttggattttttttgctctaattgcaccttccacataaaccccctttgctctggatttgtgctttttgagttgtttgcatcatgcataggtgcagactttgtttcaagttcttgtaagagcagatgcccttatttaaggctgagtaaagaggaaatgcattccttataggcatctacatccaactggcttggattgtctagcacacttacacgaactacctattttcaggtcaattctaaaatagaacatatctctccagaggtacacattttgaagattataaaactttacagtcaacctgtttcacatttcagaactcattccttttaatgccaacaaaagaacaacaagaaaatgattttagaaaaattttaaatctgcctcctgaaatttgccacaaggaaaacaaaccaaaaaaagcctcaagaagagaactatttctctgttttttttattaatttgtttttttaagtttggtaaatatgaatttagcatgttatggaattatgttataaactgtactaatagatgctagtaattcttaagtttaaagattgaaaattaaaatatgaaatatttattagaaatactttatattgcttcaattggctgcaactgatacacagctgaataaaaccatgaaatcgaaagaatatttaatcacattgggaaagtggacatttttaaggggaatgaatgtttgaatttggacaaaattaaagtgcttagaaaacaaataaaattgactattgttcaaaaaaaaattctggtgaggatagtcttgacattttacaaagaatttacatctctaaagtgcttaacttaacctccactacttaactgtctgaaatgaaggtgaagctaaatttaaaggacattttgcttttttagttttttaaacacttcctttggctccttccttttcttttaataatttatcctattttttctacctttatgcagacaaaccaagtgtccatcaaatcaggcaccaaaaagcaagcactcttaaatacagttcactcaggctaatcatgacagtaattactgacatttttattaattatagctcattttttcccccagaagaaacaaaaccaagtctcttgggtcagaccagcaatcataaaacgaaaaagaaataaataataagttaaaaatagagggaatgtgttaaaaagaaggaaaaagtactgttcataaccaaactgtgtcaccttaaaaaagaaacatttccacacttaatatctgattcagacagaaagcttctctcctacttttgaaacaaataattccacttcaaatccacattttcagacacccctagctttctgcatctgattcctacaacagcccctttacctcaaagaggtaaaagtcagttcacagtatttctctcccaaacatccccactgaagctccttgtaaatttcagcataaactcagaactgtcaccgtgggtttagaaaataatgacacatttcagctataaccccccagattgaaagattaaaaggactttgcccaaatttaggggaaatgaaggtgcgtgggctcactctgcagctgcagttttcagcccttgcagtttagaagattctgcatgagcacggatgccacgagggtatccagcgagtgggaagggagtcgccctacatgttttcacatcgatttgtaaaactgttttgaaagggtatttctagatccatttgttccaaatgcagcaaaattcatccgatatcgctcacaatgcatgcacgggttatcttacatgtaatagccatcgtattaaccaacccagctgatactgagatggtgaatggggcgggggagcagggaggaatatgtcgcgcatgaaaaactccgggtgtaaaagtcaatgcagaactcactccccgaggaaccgaaaaagacattcacgactctcaagtggagagaggatagaaagtcaagtggcgggggtcgcgaccagtgatcgggatttcagtctgatctcagtacccagcggaacaggaccataacctaaagaaatgagctttttccggagcaaagagcggccccgatttcaaagtagaaaaaataaactgcttgggggtggaagatggcgaggggcggggggcggggagggaggcgggtcgcggcgctggctccggggtccgcggcacggcctcctctgccgcgctgcccagggcccggaccctgcccggcgctgcgcccaccgcgagggtgccagacccgccgcgccgccgccgcgctctcccagccgcggccccctcccccgccgcttcctcttgctctcccagccccttcccccacgtgtggatgacgtcaaaattccgcgaaaaagccgcgtggtggctccccgagcggaggcgcgattccgccgcccagcggccccctgcccgggggcgcctggagggggagaagggcggaggcggccggttccttctcctcccgggaggcaggaccccccgacgccgaccgccggacgccccccgccccaaagcttattggaaaattcacttttgtaaagcaaatgtatttccagagctattttcggccgcgtgaggcgtgtcctaagctgaatcagacaggaagagggggaagttcgggtcttttaattttttttttttccgaagggaggggagtgagatgctaggtgggtgacagacggcaggcgctcgccttcttaactcacgcctgtcgcatctgccgcctcagtaatccagccccgtccaagccgaaattcgccgaagggagtgcggatgcacaggcctggcggactctgcccccctccagaacgcagcggcccagcgccccggcgggcgcggctgcgaccagagggtcccggaagcgagtgaacacctgcaatcgcactgcccgtccccacccaccctgctcccccgtgctctccgcttcccgacgttttcctcttctccttgtccgcatttttctactttgcctgcactccctccttcctcttgatgtgcctcctatgtgtcccctcggatttatgtgtcccctcgcattttgccagtcgggttttcggttttgattgaccgtccatccctccacggagaaacacaaacacagctccactctttgggggagccgaggggaaggcagtggctcccatttctgagcctgaactcagtcactacccgctccccacctggcctaggcgcccctgcgcggagaaggcgggactcgaactcgcgctgctcccgggccttgagccgaccgcggaatcacctggctgggaggcatcctccaggtaagcttgggagtatgtgtgcttagtgctgcaggctcctgcagaaaagtgcctataaacacccaacaccctgctgcaccctccacctccaggctttgtacactttccaaccgaaactccaaaacgctagcgtagagggtggggagccggccggaaaaagaataaaagtccaataaaactggcgttcgctaaagtttatcaccagtcctacatgggatatatatatatgtatttttttttccgtgaagggtgaaaaggagataaggaagaaccaacaatctaccccctcccgccgctccccacccccgcgccacggtgatcagtttggacttcaaagccagagcacaggctcttgcgctttttcttgaaaccgaagtctacactgaaagaaagtgtgcacttttgcctagaaggcaacatgcgttttcccgcgtgctaggtggagtgcattttaacaagacattagggttttaacacatggctggagtggcgaccaaaagggaaaactcagtttccagtccaagcctcctagagacattcctgccaacctccgcaccctctcacgccccaccccacgtgtgagagtctgcaaaaccaccggggattggattcgatggcgagcttcacgctcgggaacagtcagtaatcggaaggggaagtggacaggggaacttcaagaggcgagcctgccacgcgggaagcgcccgaacttgcgggtctccatgaatgcagagggcgccgggaagggggggcatccggccgcgaccctctctgcccctcccattcgctgcccccctccccgctggaatttctctgtaaagcaagacggagtagggggagggggagagggaaggggcgagagggccctcggctcactcccgagacgtgaggactcgccacccaggcattctcctcggggtgggctgggccccgggacgaccacccgcttcttcctcgcccccgctgcccccacttcgggagacccagagctctggatgcctttccccggagaagggggggtgtgcggagtcggggtggaagagaccttgctcgcagagctatatcaagtgatgtccagaggctgggagccccggcggcctctgtcccttgcctgtcgggttagatttatactttaaaaatacctcccgccctccctccttctctcgcctctccccgctgcaactttctttgatccgctcaaaggtggcttaggtgaaattggagtaattcccttatgggggtcttaaaatgtaagtgaatgtccttatccggggtgactcaaaagcttaagtcgggaagcccaacgtgactaaaaccaataggtgattgttcggggccgactgtgtgcgggtgtacacggtattcggcccgggtgtcatccgcggcgctggactgtttcattttgagtttgcaacttgggtttttcagcgagctttttttcttcctgaaagctaatggcttccacagcaattagacattttcctcgcccgccccttccctcccctttctttacatataggagatgggatactcattcccgctgctattgataaggtcggaggcggccgggcctctccccagctttcgcccgccccagcgcccgctctccctccgccctcccttggcttccttttgatgtagtggggaacgcgtcctactaaaaaaaaaaaaaaaaaaaaaaaaaaaaaaaagtaatctgcccggtaacaatcagcgcgcagtagcaggagccccagagctattggctatgcaaatagagggaggggagacggcgccccaaactcttcctcacccttttaaagcgatatcccctcctttcccccccaccaccccttccgccccaccctcgtttaaagaggctggctccggggcctgagttaatcgcttgcacctctagtttattcgctcccctcctccgccttgcagggaacctagtgtacggctcacccagcccgcgccccaccccgccttgctggctctccgcgcccctgcccgggccccctctctcggtgagggaggcactcagtcggcctcggtgtgcccagagagctcgagccacgccatgcccgctgcacgtgccagcttggccagcacatcagggcgctggtctctccccttcctcctggagtgaaatacaccaaagggcgcggtgggggtggggggtgacgggaggaaggaggtgaagaaacgccaccagatcgtatcacctgtaaagacagccttgactcaagcatgcgttagagcacgtgtcagggccgaccgtgctggcggcgacttcaccgcagtcggctcccagggagaaagcctggcgagtgaggcgcgaaaccggaggggtcggcgaggatgcgggcgaaggaccgagcgtggaggcctcatgcctccggggaaaggaaggggtggtggtgtttgcgcagggggagcgagggggagccggacctaatccctcactcgccccctccccctcccgggccatttcctagaaagctgcatcggtgtggccacgctcagcgcagacacctcgggcggcttgtcagcagatgcaggggcgaggaagcgggtttttcctgcgtggccgctggccgcgggggaaccgctgggagccctgcccccggcctgcggcggccctagacgctgcaccgcgtcgccccacggcgcccgaagagcccccagaaacacgatggtttctgctcgaggatcacattctatccctccagagaagcaccccccttccttcctaatacccacctctccctccctcttcttcctctgcacacactctgcaggggggggcagaagggacgttgttctggtccctttaatcggggctttcgaaacagcttcgaagttatcaggaacacagacttcagggacatgacctttatctctgggtatgcgaggttgctattttctaaaatcaccccctcccttatttttcacttaagggacctatttctaaattgtctgaggtcaccccatcttcagataatctaccctacattcctggatcttaaatacaagggcaggaggattaggatccgttttgaagaagccaaagttggagggtcgtattttggcgtgctacacctacagaatgagtgaaattagagggcagaaataggagtcggtagttttttgtgggttgccctgtccggggcccctggcatgcagggctggatggagggagaggggtggggggtggcgggggaccgcgtttgaagttgggtcgggccagctgctgttctccttaataacgagaggggaaaaggagggagggagggagagattgaaaggaggaggggaggaccgggaggggaggaaaggggaggaggaaccagagcggtgagcgcggggagaggatggagagctaactgcccagccagcttgcgtcaacgcttcagagcggagaagagcgagcaggggagagcgagaccagttttaaggggaggaccggtgcgagtgaggcagccccgaggctctgctcgcccaccacccaatcatcgcctcccttctgctccaccttctctctctgccctcacctctcccccgaaaaccccctatttagccaaaggaaggaggtcaggggaacgctctcccctccccttccaaaaaacaaaaacagaaaaacctttttccaggccggggaaagcaggagggagaggggccgccgggctggccatggagctgctgtgccacgaggtggacccggtccgcagggccgtgcgggaccgcaacctgctccgagacgaccgcgtcctgcagaacctgctcaccatcgaggagcgctaccttccgcagtgctcctacttcaagtgcgtgcagaaggacatccaaccctacatgcgcagaatggtggccacctggatgctggaggtaggtcggggggtggcgctcgccaggagccaggacccctccggatgctcgggtccccggccggagccctaaacctgggagagggcaatccccgcgccggcctcccggctcctgtgcgggagtttaccgcgcgccttctggcgagacgcgtggctttatttctgttcctctccagataaactggggaggcagaggggggaggaaaatctgggagaagcgaggctgtcctgggcgggggtaggggagcatcccgcgcgcgtgttcctgcatgtggctgcctcttcttcccacccccctcgcgacctgtcttttgcgaagccgccgcggctgcttgcgctgcggccaggaagagagtcggggcctgaaatcgggaccccgagtagaaaggcaaccccccccaaaaggccagagcaaattcgtcttggcctcaggtccccgcctgtggtcgcgactccgcgctggcacttcaccggggaggtggagggaggagggagaaggagagaaacggggaattcgggagccccggaagtcccattgaagaaacgcgtgtttcaggggaacccaaaagaaccgcttcttgcccctcactccaagtctttgcccagcgagccgtgtgcccacgtatgcacagctctggacctgccgtggtttcgccatgttgctttgcaaactccctttggaaaggctgggaaacgtcgcccgcttaccctcgcaccccattatcccggccaccccacttctaatcgtgccctctcccccaccccccacctcacgaagattacttacagtttggttttccagcttcctcggtgcggagatttgggtggggtaggaagnnnnnnnnnnnnnnnnnnnnattcgttttttcttggcggacaccccgggcaaaccggagggcaccgaacggaacggggcacggaacgacggcgaacgaggaggcaaagagagcgccgcccgacccacgcccaagcgacgcaaagaaacgccgccgacccaaacccccgcaccacaacggcccccacgaccaccggaaccgcgccgcacaccccccagcccgagcagaacgcagcaaccccacccgccaaccccagcaaaccgacgccaaaagcaaaacaaagaaacgacgcccagccgccaccccggcgcagcacccccggccgcgccaccccccaccccacgccggaaggcccggagacgcaaaacgacgggaagcgcgccgcgcaccccgcggcaaagacaaacgggcagccccccccccagcctcccggcccgcacacccgggcgagacaaacaccgccccagcgggtatgcgacgaaagtattccgggtcacccctgaaggacaggtgggagccccccgtgcctctttccagggctctctgctcccgtctttcccctcgctcgtcaccgcgttccctagtttctgtccttgtgggccgcagccggacactcccgccgcggcgctcaccccttcaagtttcctcccgggatccaaagccccaggggtcggaatacagacctttctggcacccgaaacctctgtttcgggaagcctggctcttctttggggttttcacgccaaaagggcttttctaggatatttcctcgatttttaattattttttgaaaccatccccccctgctccgactccagctgccgaggctgcggcgctcttcctcctctcctccctccccctctcttccccacctctcctcacccgccccctcaaaagcggcccctgggccgcagggatccccccagacattttttccaattgtcgggaatgatagaggaggatctggggatccggatgagaccaagaagtggacccccggagcctccagaatatttttattgattttttgaaaagatgacgaaatccaaaaaagagtgagtgagttagagtgcgcgaaggagtagccaaagggagcgtcgcggagctgccgcggctgctgcgcacttctccgactccccgttttggagctgtagttcacccccttttataggatccctgggaataccaaagcactgatgggctattctgattcactccagtttcctcatctttgttctttattcttatcacgcattctggtcccctccccctcccacaaaaaaaaattaattttttttgtttcgatagattacgcttttttattctttttctcttttgctgatgctatgctctccacccccgccccccaaccctttcccactcccattataggtctgtgaggaacagaagtgcgaagaagaggtcttccctctggccatgaattacctggaccgtttcttggctggggtcccgactccgaagtcccatctgcaactcctgggtgctgtctgcatgttcctggcctccaaactcaaagagaccagcccgctgaccgcggagaagctgtgcatttacaccgacaactccatcaagcctcaggagctgctggtaatgaccggccccttcctcccttcctttctgcgattcccgctttcccctggccaacaatatgccttctatcaccactgccagagcaaattcttgggatccagaatgaccccaccaatagaatttacccacttatgggcgatagctcatttaataggaaaccactgtttattttttgtgtgttcctactatgtgcccaggctccgtgcccagcactgaggctacatctgtgaataagatcctcatggagatttgggttggtgagactcatttgcaattgtgtatgcatgtgtgtaggggacgcatggaatattttaattaacagtgataatattttaattaaattccaaatttccaaaaatagtctgagaacgtgttcacatgataggtatgtggctgtggtgtctcctaaaaacttggagttcaaaggtaatgccctctatatctacaaagtctcaagataccaacacataatagctgttcactaaatatcagttcattgacttttgagcaaagtcaaaatgtggcctttcactgaaggagtccgaggcctgggttcctacctccagtgggactgtgacctctgtacaaccccagggatcctgtcttatctctgcttttctaccagggaacctttttcccacctgatctaactccttttccctgcagcttgacatgtaagacgaccatattgcagctgtaccgcatggaatagcggctccaaggcccaccttcggtggtttgcacacccctctttgcactgttcagaaaagcaccccctccttcccgcccctccccctcctcactggtagggcccgcacaaagtccacagggctgaggctggcttcttgaactgagctctttgtgaggagccttcctttctggggctctgctgccatctagtggaagacatgcacaaggttgggggaggaattgccgagaatgtggagaggggcctgaatgacttcacctttgaaccgctgccaggttttagctgcttctggtttggtccgagaggcctagaaaggtgctttcttctgggagatctgcttcctttaataacggtgcaagaccagtggttcgtactcgcattaccctgtgaagaggaagggctggcatttcaagccatctttgaagatgatggtggtttagtagtttattggggtgctttaccccggctgtccacagaaagccaaggcagattttaaagcttatgaagaaaacattgttagaattgggaaccaatttgtttttctcatgagagagcaggaaaaatcatcttcatatggttcatttgtttcgagaggatggtgaattgagatgttcttcaggacacccaaatctttccaggactagccaagcaatatattgctacaaacaaacttggctttttcctattccctttatcccagaagttgggatttggaagagtcctattttacaaatgagaaggctgaggcctgggagggaaagggaatcacccccagccccacagctgtgggactggtgctctggttgctggtttagcaaatgaaagagattccaggttctccaggtgaatgggagagagggtgcattggcaaacaggccctgcctctcattcttctgatgacagctcagtggataggcatattttctggtagcacatacgatatttttaatgttttattttggaccgtttccctttgagcacagtttcccgtaagtatctcagtgaaagagggaaacaaggttctttttcaggtgggttgctggtgagagacccaagagacagggttgtgtggtccccacacttgcactgagggatgctgtgacactgagcaggcaccctcaccttgccccagatcacctccatctgcaaaatgaggttgctaatgaccatgtggtcctttagtcatgatgacaatggcctgtgaaacatttaggggaaagggctgagtgtcacatccccagaatttctgcctgatatgtaaaaggggagtttgagcagcagagagataaaggcactttttggcactaagtaaaagcaagctaattggttgccaaggagttgggccaaggaaccttattttgagctttatctgtgtgcatcatttttccatgaagattaaaaagactattaattcggtgatagagacatatacaataaattaccatgaaagggccacaatgaccttggccgtatctcattgtaggttcagctttctgggtgggcgggaagcagtattgcctgcaagtcagggttgggagggggtaaggggagctggagtggaaacgaagtagaagaaaatagaatcttggcaacagctacctgggctctcattattttcagtggagcctgacatttgaagcataagaagagctgtcaacaacttcaaagcttcaggggcacattgacaaatgggcccgccttacaatctagcagccacgtcctaatgagcggccttaaaactggtctggagcccaacccccagccccctacaccaggtcagcctgtggaatttagattctcctcttctcttcctgccttcccctccaggagtgggaactggtggtgctggggaagttgaagtggaacctggcagctgtcactcctcatgacttcattgagcacatcttgcgcaagctgccccagcagcgggagaagctgtctctgatccgcaagcatgctcagaccttcattgctctgtgtgccaccggtaagatgaggcttgagccggggagggagatgggggagctcttttgggagatgtccggggagaggcaaaaggccgtaggaactttcattttagttcaggagtttggaggaggggtggtcttgagtagtctaaagtctgaagtttcattcctgggttgctttttctttatctgagctttatatattcgctttctctgctaaactcataaatggtttatgaggacaggtgtggttaaggcaaaaaaaattagtgcctgttaaaatattctttatgatggctaaagtgctctttgaagattacatatactgctcactggttgtgttcaaatctttaatcttttaaggaaaaggatggcttggagataagcccaagaggaaatctcgagggggatgggggcaaatacaggttaaaggaacaacgtcaagataaatatgctgcctgccttgattagtggtaagggagaccaaagaaattcttttttttttttttttactgtagggcatttatggccttctagctgtttgcttctctagctgtttgccccactgggcgcgggagggaacctggttggctttcggtgaggctttactttctgagcgctgggttctgatgccctcagttcatgtggaggtgttttgattttggccgcagcctttaacgttgcaattccgcctaccacgtggatcccacaattgatacatcattcctactggcccatttgttttgtagtttcctaataaaccaaaggcagtggtttgctgttgtcttattaaacagccttggccagtgtctactggttttttgtttttttttttcttggtagtggccatggcagagaccctggaaccttactcatccaagggagagatgtcaggagttcatgttttgacaatcagaaaccttaggtaaaaagctgatcacttgggaagacctttcggtgtgcttcacctcaaatttgccaagagtagttaaatcgctaggtggactcacgtggtaacttttttcaggatgttgttacatgttactggtgagttctacggaacggatgattatataacgtacgatgtagtgcatatgccctgtgctcacagtcaaaaagtcaggctttgctgcatatcagtgagtgacctttaattggctgcttaacctctctgaacccgagcttcttcatctccaaaacaagcctattgatacatcatcctacagccttttcagagcagctaggaaaattaaaatcagaaagaggtgatgcacgtggacgtgctttgtaaaccgaagtgtaggttggaccttcactaattgtgaaaatgctaccatctccgattttcaccctgattttaactgttccgactaaagtggatatgatggctttccttttctggctgcccttacgtgtttctagcaggacctgtgtgttctgcacttgcaggcttgagtgtggagtcctcccggccccctgcctgttcatctagggcacaggtttccccttgctggttttctgtagtcctgttctcctggatgcaggccaggcctcatggcgtgcacatgcgccctgtgccccttggtgggagagtccgttatccttcctgcagccctgggggcggttcttaggacccctgtggacccctgctgccttttggatagtggtcactctggcttccttcccttctgctgtctggcccgggcccgagaggtcagtcctccagtgacctgtcattttgtctcccaggctcggctgtctccttcctctctcatcatgattcactgtgggggaggggtcagccagttctttctctctggcccaaggacagctgacccccgaccctaaactcccccactgcccagctgttgatagccagagctctgctcaacactgtctcttgactaacagatcttttggggtctaactgccccttcctcctctctgatctctgattggggtaggggtgctgggtggagttaccggggtgtgggcagatccccagattccgtctagacccattctcgaaaaccggggatcccatcccccacccgtggccttcttgcccagatctttgggctggctgccagctccggggccagagtagggagcctgggattcagagactgaggacagaggcccagagggatacagaggcagttataaagactgtgttttgggggccttgaactagctttggtcagggactaggaaaggacacccccaaaccacatgaaaatggtgtgctaggcactaagcctcaggcgtggacagggcagagcacaggtaggtcctcggcagtttccagggtctggaaaggaggggcctgtatcgaaagaagttgctttccctcatctgcacttgggtttgtgcaactgactgagtcacatagaatcctggctgcgtggagttttacaacagtcggcctcacagtacaaacaccgaaggccgcttttcttgaaggaaacaccttccatggagaggcgattgtgcattgtggggccagggtgtgatgaatgggcaaggacccaggactctggccagtagcgggcacagagtgactgagaggcagaggtaggagatgcagattccccaacccgagctgttgccctcacctgctcctcaaatcgcacacttccctccttttctcgcagtcctggatgttccgtcctggagctgatgaaacacctgcggccagggtctcggaggtccacagtgggtggagggtgggggtcccgagagatggccgccaaccctcaggccgtgcagctatttgatgggaaaagctggttgtgaaagagctggcagtggttctgcagtgtgtggggagcgtatttgtgtgtgaaaggggaagggagagcaggagaacatagaggggccgcgtaagtgtggcgaagtggcggtcttgctttatggggctctggattaagatggtggcaaggcggagaggagccctccttccttccctgctcagcctaaaatggcttctggaagagcaagggccgcaagctgctggtatccctctgcagcaggtcctgggcagtgcaggcatgggtgggttgggcgggggatcttcctgactacagctcctagcattcctgttcctggagtttccaaaactggggaagcagaactgagccatagcttccctggttgccgctctgctgatagaacacccaggtctgcaagcgaggaaagaaggccattggagatgacctgggttcgcactctggcactgggagattgttgagatgtgataccatgctcggtggatgattccagttagtctagcagagccaatggcattgagtttacacctggcaccgggtagggggaggtgctcaccctccctctccaggcacccacatcccctctttcttcactagaagcccaccctaagatgctgcaccttggtatttgtgccacacacggtagccacccccaggcctccccacgccaaggccagagccccattgttgactagaacccattgtgctgtcctagccccttccctggctttacctacaggtgttccctcagattccatcgccaagtgagagggagacagtggtggcccagagaagttcgatgacttggcccttgatctagagtgggagatttcgccttgatgggtgctgggaaggaagaatggaaacccgtctttccatctgcaagtctctgagctacccctgaagccgcgaggtcatgggactgagggggagtcgttagcatgccctgtggggacaagcagccaggcagtgtggtgcttgccatcgctcttccctctggctgtaagatgaatgggtagcaggctgctcatcgccctccaaccagccccctccccagctcctcccagcaggccttgcagttgcatgggcattcccttgccatggcagccctgccccacaaggacagggtatgctggtcctcttatgggggtggcagatgaggtgcgtgcccagtgacgtccctggcctgtgaacactctggttctggccctttgaacttccacctgactgcaggttggagaagagagatggggaaagcctgacctggccttccctttcttcttcagcgtcagagtgcgtatctctctccccctattggtgaacagaagcaaagccatcacccctgcaccccaagacctcggccaccatagccaaaatgatgggtgctaaatgtactgggcaggaccatgtattccgtggttttaaacttacttagctctgaactctttatttggtaaaatcctaccaagaagtgcagataccaagttgatgaaatggagcacttctcagggcccatgcccaggtgagggagcccagcgggacccccagaggctcccagggcatccttgggaggataagccttttgtgcttgctggtgccggggctgcggctgggacccaattcctttgattcctgagccagagcgccacctttggggctcttctcccacttccgacgtgaaaggctgccctgtcctcctgagtggtatatgggaggtgactttgaggagctggtcagcttccagtaagttacgaagagctctgcatccagagtctcaaagtctcatccggatcccaggcccaacactcacagtgagtgacatcagccagatcacttcatctcccaagacttcattgattcacctgtaaaaggagatgtttgaaacagatgaatttcaagctcctttttattaatacctcaccatcatcaccgccgtcataagcaagcatgcagcccacagcagagctgcccctggcgcctgtgggtccagctgggattcccctaaggtgtgtcctttgcctccaccattttgccaggagggaggcgggaatgtcgggtgttcctggttatctgggcatcgttccttggctcgggtgaactgcatctcaatgaattgtggaatgtgctgggttagagttgccaacttctctcttccattcgctgagtgttcatggggttcttttcattcccctgtggggctgcactttctcccagttctgcaaagcagcaggaggctttggggactcgatgatgtcatttctgggacacatacacaactggatagtgacagattctccaggaagcacagagccctcattcttcctggcctgcttggcctgctccctgcatctgcctgcaatccagggatgctgggcgcctttctcctcatccctccagacgctggagagcatctccagtcggaactccccaccacagtcctgcaggaagtactaggagtgagagcagaggaggggcaggttggggaggatgctggctgacattcattgcttaccttgaaccaggcactgtgcttttacaaggattattttaagtgaatcctcagaacagcactacaacgtgggtattgctgttgtcattatttgcagatcagaaaatgaagactcagagaggtcaggtaacttgctcatcttcacacacttggtaggtggtgggatggagattccacctccttctgattccagagctaatactctgaaccagtgagctgtgttctccagaggtctgctttggttggaggggagctggagccctaggccctgggacggcctctgttgcccatggcaaggcgtgtggctgctcctgctctcttcagatctccagatgcagcaacctggagaaaggccctcctgggtctggtggggactggggcaggagtggaggctgcccaagctccgtgcactccacgttccagcttggagctttttgagtctactctccaaatccttcccatctccctgaagagtcttctgagaagtgtctcaaatgctcctcttcactcaagagcctcctttctttttttttttcttttctttttcttttttttttttgagacagtcttgctctgtcacccaggctggagtgcatggcacaatctctgctcactgcaacctccaactcccgggttcaagtgattctcttgcctaagcctccagaatagctgggattacaggcgcgtgccaccatgcctggctaatttttgtatttttagtacagacagggtttcaccgtgttggccagactggtctcgaacttcggacctcaggtcatctgcccacctcggcctcccaaagtgctaggattacactgtgagccactgcgcccagccttcaagagccccctttctttgagaagtttcttcagaagttatccatatagtagtacagacctagccattatagcacaccatcctctactatctaatgcattgatgcccagccttaagaagtctgaatattgtacgttttggggggagtcctccatgctgcctggaacagggaggagcacattgtcatgagtcgatcagaatggatcgctgatcggttcattgcctctctctctgctgcaggaggaaggatctcaggaagtcaccagcatctcacctctccaggtgggcaattaacgatggcgagggcacaccctcacccctgagcgtgccttctgcaccagcatattgcttgttggcatttttgatcaagagacttaacagactgctgagaaatttgtacctggtttttatttgttaaaataatattacgtacaaattttacaaactcatctgtgtttctcccacctaacagaacagcttttattttccgtgcatccttccagttcatccataggcatatatgtatgtatttacccatggttgtaatcttcatcgtcgcatgcatgcatgcaatttggttttccgcttccttcttctgagtggatattgtgaccatttctccatcctgtcatagcgacaaagctgatggtttccaggaatggctgcattgggtaggtggagctttccacagttgagggtgggggttggctaattacagctaggaagctagtgcacagatgaaatgatgtttgatttttttgtttttctctctgttcagtatcccctaccagtagagagggggatgtccttgagagtggtcctggggcagccctggtgccacggggaagtagcgccgctctgtggagagggctgctttgtgaatttgccggctggtagacaccgtgatccattctattgtctcctcattgttcttctccttgggagtcattcccattccagatcctcaagtaagagcaaagtagacctgtaaggcacctgggaggttatcctgcttactatctttaaactcttgacctaagccatgtaggaagaaacacattttataacacaactcaggatacttgtacaagtatatcaaactgatacaaaagtttctccgaacaatatttactcttaacgacatacggtgagcctgatactttctatcctactctatttggttaaaggagaacaacaacagaaagtgctggtcacgacccacaaatgcatttcatgacccattaatgagttgcagctagaagttagaaaaacacttatctcacccaacccgttattagacaaatgggaaaccaagcccttggaaagaggaagtgacttgcccacagtcccacgtctggacctagctggagggctgatgttgcctcagtatttgactaacctggaggagaggtggggcatgctcagggatcccgaggaagatgctcgtcttctgtgtagcgggcaacagagggcagcacggccgccgtcctcgtctccagcggcgtctctcctctggctgtgggaacacactgctcctttggtgccactctgagctgctgagaggcagtcaagttcatgcacatagtgctccccaattctgtgggattggacagtgtccccaagaggactcccctgaaaatcttcttagtaaaacaaaaagggaggtagagtctccctgtgcaaccggtgcacctgttccccctatgcctgctggcttccagaagttcattcgtatgccaataataagagttggttttgctagcagtgggacagcagagatgggcatgtgtgaggtgtgcttcccggtctgaggcctatggcagagggaagggagggccggggatacttgcctgcctcttccctggcagatgctcccacccgggcctttgtgggcccagggccatgggccggctgccccgcttgtgttatgaatgtcacaggggggagctaacgaggttattgggcagagaaacactctcctgtgacccatgtggaagagacctacagcagagcaagaggcagggaggctggctttgtcacactgttcatggcgacagagaaggcgtaggaggggcgggtggacagcaggcgtgggcgcagcaccattatatacgtccctcaagaggtggagatggtgagagggcaatggagaaaaagccaaggagacaggcagatggccaggtttgctctgcgttcatgatgggaggggagggctgtgcttggctcagggatccacggtgtctaacaatgctgctaacttgatgctggggcaatgggctgaccattaaaagagctgctgtagaaagtgtgtttgtaatagagtgtgtacaggaggaaggggaaataggagaggggctggtttttgtagatttaacctgattgtttttgctgtaagttgaagggtgacccacggttccctgtatgctgtgtctcctgcccccacgtgccccttccatgtctacacacagtaagctcactagagcaatgctaaaacgagaaagagtacgctttggaagacttgctgcactccaggaccgtcactagcgtgatggctgcaactatacccaccctaatatctgtcaacacgagcaggggcaacttaaactctcaaaagtctcagggttctcacccataccattagggtgacgctcgtgtgcatcttctgtggctgatgggtaaattaaacaggacgtaatgtgtagcgtactgcatgtggtggtcattggtagctgtcagcagctgtaacaggagaagttggctgtctttatttcccctcgatggaccaagcagctgctggatcatggccacccagcccctctgaaggagtgctcggaggaacacaagggggctggtcttccaagaggagccctctagcatggcagtggacggggttcaagcccctctgatttattatcctcattctgcacttccctgtagcaagtcacatttttttctcttagcaataaaatggggccttcagtctcatgagtcataacatcgaaaccgagtcacccatctgattcggatgcaatgattaatcttcagtgcttagttagagccctatgttagggttagaatcctctgccctaatgttctgagggttcttgctgttgggccagaggttgggaactgggtggaactcagcccccactcgcccactccctgcattgctgcttctctcatttccttttttagatcaaaccttttttttttttttgggtgggggtcatattaatcctcaatgcctgtccagagactataacaagatcccatctgaattagcattatgcatagattttgcccgtttctcccatctccttgtactttccctccttctcacatctggagcccctggtctgtcctgcttgcatggcccatggggtaccttgtctgcactggtctcaggcattctctgctctgttcccaccatcacctctagaggagactatgactcgctcaccttgctccccccaccagggtcaagaatgttaactcagacatgcttaatatgactgggatctggggattggggaccttgaatcctctgtgcattcattgtgtgcgcttagataagctgtcttccttccctgcctcagtctccttcgtttaatctggaacagccatggtgatggcaaataaacacaggctccttgtgaaagaactcgagggaggacatgcctgtagggcacggggtcactcgcgccgctgacctgctgccgtcctgtttctgagtctctgcagtctcgggagctccaggatccaaattcgttctgtgccctgaccttctgcctctcattccttgcagactttaagtttgccatgtacccaccgtcgatgatcgcaactggaagtgtgggagcagccatctgtgggctccagcaggatgaggaagtgagctcgctcacttgtgatgccctgactgagctgctggctaagatcaccaacacagacgtggtaggtggccaccaccttcttggctaagtccagatgtctcttctcagctcagggaaggagacgacggatttgattatgttgtgtcagaggtatttttctggtttgtttcctaagatcgacatccaagggagtgcaaagttcagcaggtgacaccccctcttaaggttctgaaaagctgtgcacgggaaaatacggaagaaaactcagcaagcagatgaagggggtgggggtgggagggctgtttaccgatgttcctttatggcgtgggcttctcagtgggtctgaattgttgcttcattgccatatttgtacacgctgccaggctgcctctgcccggcagcgaagagctgccgtgtctgctttcacacgctgaggctgtaaggcgcacagaggagaaaggagagccaggactcagctgcagtggatggagcagacacacaagaggtgccccactgtgagaacggtgtccgtccctggcaaacctctcgacccctccccgctctctcttcccttttgttcaatgcagtaatggattacaaagtgctttcaaaagacaaagtgccatacaaactcaagaaactattattagctacggagcttccccattctgtgtgccctgtggacggcccagaggctgttaacttcctgttgccagaatttggagctcctgagaagaaaggttttgagagagaccagggtcaagtgagcctctgaattcaatcagcaggaagctgcagtcctagcccgtccgagacaggatggtgccaagaggtcagagaggccattccttcgttttccacgggcaggacagggactgaagtaaccagccaggagcggggtgggcagtggctgagctggggctagaacccccaggctccggctgccccctggaaacttcccactccacccttgttgccgctcctgggatcttttggtttgaaaaaaaaccctggggtttaaagtcaacctgagagaggggtgttggccctgagccctcatgcatcaccatggagaggctgaagaatgctgggcacttcacgatgacaccctctggatggtccggggggattcagatgccctctgcgggcttttattgagttaagggatcatgtggtttataggcctatggctgaggcctgcacgagggatacgggacaggttaaacctcagagagcccacggctgcagctcgccggcctcctcgcccgcccacctggattttccctggcatttgttcccagctcagagaaatggcgcagggagatgctgacggagcaaatccggggtcctcctctgagatagttcgtagatatggttttaaaatgcgggctccaaacatacgctttttaaacgaggactccagaacacagactgaaaacctccctccagtgcagcatgaagaatgcttttctaatcctccagaggaaaatcgtggacgggacttaacgtttatagaaatggtacgctttcctccttttctgaatgtctccaattaaggctgccttacaaataggactctcagccagtttaagacaagcccttcctcaatgcctggagacaaaaatgtcagtgacaggagttggagcggccacccccctcctcctgcccccaggcattgtaaccttttcccccgatgttgatagacctgctctgatgggctgaccaccctaccggctccagccttttcccacctccctttgtcccccgttactgatctcacatggacagtggtggaaatttccctcctgggagttgctgctacgtctcttggcttttcgagaccgcaggcaagtcagtccgtcatctcatctggggaaactgtttgcctttttctgatactacgtagccagtccatttaagtcagctggccaactctgttaaatggatatgaagtgggtacgaagctggtttaggggtgtcctcctataaatcctaactgttggtcaagttgatatctcatttctataatgggcacacgccgtgtttcctaactggggctgcctgtgtgtgcctcattcacaccggtggacctgggttgaacatgttcatatttaaaaaccaagagtgaacgcggtgaaatgtacaattcataacactttttcaaagaaaaatctgagccctcaggaagttccaggcttacctctggcaccccggaggctggttcgctctccctgaaaatgtttttagtggaaaggttcaagcagctctgggctaggctgtgtgtgtgtgtgtgtgtgtgtgtgtgtgtgtgtgtgtgtttatgcacctttccaagtgctaaatctcctcccatccatcagcctgtgttctctgaaaagctgacgctcagagggaagaaaaataaaaggactagaatttagaacacattagtgtttggagggaggtgagttgtgcttcctgagctctgtttaccatttcacgagtcaagaagtggtgtatttccttcattcgtttctggaagtctttactgaaggcccagttgttgctagaagttggggtggatggtggcatctgggaaatagaggatgagattcctgccttcaaggaacttagcagttgtatgatgaagcaagagtaaagcgtgcaaaaccctagcaaattaagaacgtaaacaaaggtgtgctacgtaacgtgttacgaaccctaaatgcagtaggaaatcaacccaaaagaaggagctcatcaggcctaacgtagaatgccggcctcccagcagagaaaacttggtgatagaaactgttcttagagtagagaaacaaaatgtatgggcacgcaatggaatattattcaaccttaaaaagaaatgaaattccgatccatgttataacatgggcgaaccttgaaaatactatgttaagtgaaacgagccagacacaaaaagacaaatactatatgattccacttataccaggtacctggaatagtcaaattcgtagagacagaaagtagaatagaggttcccaggagtctggggagaggagaggatggggagttagtgtttaatgcgtacggagtttcagtttgggatgatgaaaacaattctgtagatggagagttctgatggccacacagcagtgtgaatgtacttaatgccactgtacatttaaaagtggctgaaaagggaaatttgacattatgtgtatttatgatagtaaaatgtgtgtgtgtatatatgtatatacacacacatacataaatggatatatatatatgtatgtatgtatgtctgaaacattctcgggccacgctatgaaatgcccataggttgatgttgagctcttccctggaaaagtgaaatacacaggaccacattttgccccctggccctagtgcattgacaaacgggaatcaggaagagctgacagtttcccccagagcccctgaagttatatgtcagctcctacacaccttggtggacatgatcccttcaagctggcatagctctttgcttctttgtaggttaggtcgtgggctgacagcgatcgagctgtgaaaagaggacacccctgattcttgagagatggccagactagtctctgtaggtcattggccagaagcagacttgcttgatatgaggaacgcatactgctctnnnnnnnnnnnnnnnnnnnnagctgacagtttcccccagagcccctgaagttatatgtcagctcctacacaccttgctgtttctgatttcttcaagcttgcaatgctctctgttactttgggggttaggtcgtgggttgtcggggatcgagctgtggaaagagggtccccctgattcttgtgagatggccaggcgagtctctgtggttcattggccaggagcagatagctttgatatgagggacgcatgcggctctgagaaagtcggcctttgttgctccgtctggttgccaaaataaaccagaacgcttcattccaaagagaaagctgagtgaggggcctgacagttttatagggaataaacgtctcagagagtggtatattttaaatactttttccttccaatcgtaagagttgctaaaaacagccagagaggcagtttggctgtaggggggacgtctattgggggtgtccagtgcctgggtaggtttgagaggggagggtgccactggcctgggtccccggtgaccatggccctgcttccttgggctgaatcggggtcctcttccatcccctctgcacactagtcgggctgcgtgccagcattgatctcactgcttccttgtctatagaacctcttgaataaggcccagcttttcctcagctctttatccagagcccctggcagagtcattgggagtgatgcttaagagaggaagggaagaggaaggaaggagcaaaggacaaaggcaggcagatgggtttccagtgggtttccgattcactggtctgtccatgtcctttgaaaagctgtgtcttttctttaacttcaattctgtgtcagggccttccgagccttctgagttttccccaaccttatcttagagtaggttaaatgaagtggcttcattttcatatgacacagttgcacaaattcactaactaaaaaatggaatggaggctcacaggccataaaggtgttgtgaagttattgcaagatacttaacagaagaaagactctagtcatctgttccttatatttatccttttttgtctaagtcacatcaaaactctttgtcacattctttaaaaacaaaaagcaaaaaacaaaactttagattcaggggatccatgtgcggtttgttacgtggatatatcgtgtgatgctgaggtttgggcttcagtcgaacccgtcacccagacagtgtacgcagtacccaatagggagtgtttcaactctcgtccctgtccctagacacattcttaaatattgcccagagaagattccaggatatcccttccttagggtcatcctggcattttacggtcctggttatcagtgagctattaaaaagcagggaggtggaggcgccgtggaagaagtctcagtttcgaccacatgtgtgtgattcatggggtttagcattgtgtgtttctgctccgtagctggaagtgccgccaccctcgccccacatgtcattttcaagcctccactgttacagattctgtcttctgtggactcttcagggcctgtggtcaggaaccttgtgaagtgttgctggaagctgggggtggggaggtggaatagaatcgggggctgatgcctccctctcctgcctcatttttctgtgggcctcatttggtatgcaaggaaataagccaaacagcctgtgaagaaaggaagaatgagatagtttcctaagttgtctctgcctgagttggccgcgggtctggggctcattcagccctttgtccccctgttgagtgcagtgcgtgtgtggtgacaatgaggtggtgcagttacactgagggctaatggtaggagttccgtcagcccattcatggaggcagaggagggtgcagggcgcggagctcgagccagcaagcagaggaagtcagaggcccttgtaacgagctgaagatcacaaacactgctgtgagggctccaggcttgggggcgggggcagccaggagggaagggggcaagggagggggcctatcatcatagaagttggaggtctgcccgacccccagcgcggtagggtaccacctgtccaggctgacagacgagcattatggcttcccttttaatcagcttaatttggggcatcttaacacaatggctggtgctttggaggctgcaggaaagctgatgtcctagagccgccacacttgacatgcgtgtaacaccttttgattagaggcgctttcgtgtttttccagccacttgggctctgtctctttttcttggagattctctggtctgtatgtctttacttagagcttagaagtcgaggtatataggaaaaaggagttctgaaattggaggcttgccctttctaaagccagtctgagctttcagccagatgtcactgggacaagccacgtcaactctccacgctccattccctagctgggaaacgagggcatttggctatttgatttccagaggccctttggacctccaaattctccaagtctgtgattatttgtgtatgtcttcttataatccagcccctttggaagcactaactccactcttctctcagcttgatcctctaatagaagcaacctggttggatttaaggtggaggtcttcctctctccaggtggctgccctcatctctacccccaccccaatcccatgcattctcctgccctcctgctttgggcaagacccaggcgatgtggagttggcatgtccagttgcaggtatcagcaccactgcaccatctcctctgccttcacttcccaccagcacacagaatttatatgcccttcccaagtccaaaaagggcccctgccatgctaaacaaaggtattcatatgcaaggcatgagctctgtctcatggaagggagaggccaagttctctttccaccatcagagagtagcgttcaacatcatttatacaagacaggcttttgcccttttagtcttgctgaactagaatgagggatttgtgtagtcgaaagtcaagctgatcattgtcaagtttcgtggaagtggaacctgaaggaaggttaggtggagactgcagagagggttagcgtcctgccttaccacaaggtaagtctagaagagggtggggaagggagttcagaattcttcattcatggagtgtacctgccttggtcatccttttatcttccagtcagaggggtcatcagtcaagagctggccaggctgggtgtggtggctcatgtctgtaatcctagcactttgggaggccaaggcgggtggatcatctgaggtcaggagttcgagaccagcctgaccaatctggtgaaaccctgtctctattaaaaatacaaaaatcagctgggggtgatggcgtgcacctgtaatcccagctacttgggatgctgagacaggagaattgcttgaacccaggaggtggaggttgcagtgagccgagatcgcaccattgcactccagcctgagtgacagtgagactccgtctcaaaaaacaaaacaaaagctggccgtagtcaagtcagtgatgatttggattgaaattaaaatgtgactaaagagagagtatgcagttttgtctatctatgaaaccttcctctgttttatgtgggacacctgggcacccactcttggctggaacttacataaaacactactgtgcacgcacatgtcacctcaagtcccgtggctctgaaagtccagtagaagtgacagccagacatcccagtcctccctgtagggttttctcagaactgttcctttaaggtctcaggctgctggaagggagggctgatagcagaaaaagtggggacactgggaactccaaagggaagacgcgcatggcctgaaaccgagttctttcgctttctggagcctggtctccctatgtggagggtcatgctggcatggctggcaatggttaattcaccgatggccatggagtcccaagttggccatattattgcggtaaaagatacattaacccagatgaccttgccgggggccagaatagagcccgtgaggaaggagagcaaggcaggatcggccgggaggcgagagggattttgttgaggagcaaggtcttccacaggaactgcgacttggaaagtattcaccaagggctgtgccatgcgaaaccctctttaaaggaaccgcatcgctacgcctaacgggcatttcttttttaatgtaatggttcagagctattgtctaccacgcctcgcgtgcacacgcacacacacgcaagttccctcagtcagccgagaatcctgccatctcttttagataacaaaagctcttaggccttatgctttgggtaggatttgtcttccatggacaggtattcagttggaaacaagtatatagtcactgcctctatggtatggagatactccgatttagtccctctgcctcttggggaaaaaaaaaaaaaattgtaaacatccccttcagcagcttctcaagtccctgtacagtggaggaacattacacgtgaacttcctggattcaatggattcttctttgcaagaaaaaaaacaaaacaaaaaaacagagaaagaagaaaatatcaatttagattgttaggtccaacgtttcactcagtgagtgagcacagggggtgacggaggatggctggaatgtggggttgaagctgctgttctgggtctcagctcctgcccatgtaccgtggagtgagcatctcacaccacgatgattctggcatttaagtgaactccttcacacggtgctcaagtggagaaagggctgtccatgtctatcccagcttagaagaaaaactgatggtatgagacttgccattcctctctgatgtagaacctgcctaagggacattccacagcagttctgaccgttgtcactttgtgccttaacccccacattcattttgattctatatttagtattaaattttttagattattaggatttaaggttttcaaacatctactgaaatgcaagtgcccctagaaacattatactttcaggccgggctcagtggcttatgcctgtaatcccagtacttcgggaggccaaggcgggcagatacctgaggtcaggagttcaagaccagcctggccaatctggtgaaatcccatctcaactataaatacaaaaatcagctgggcgtggtggcacgtgcctataatcccagctgctcgggaggctgaggaaggagaattgcttgaacccgagaggtggaggttgcagtgagccaagattgtgccattgcactccagcctgggcgacagagcaacactctgtctcaaaaaaaaaaaaaaaaaaaaaaaaaaccagaaaagaaaagaaacattataccttaacttttcgcacctagtgagtgataacctatgaggataatgctgccacatggtccttgagggaagaacttggggaagagccgaacagggatgaggcaggtgagccccatgtgatttatcgtcattcattcagctcaacaggtcggacagggtaagggtaagggatgtaaccaggagatgccacaggaacgtctgagaggtgttagcaagtcccagaggccagcgcccgactccatttcagcctcgttcagggtggcacggagactcctgctgctgcgtcacgtctgtcatgttcagcactcttcccagacacacagtcttgactaaagattgtcaggatcttgacacacgcttcattagtcttgactaaatgcgaatctatacctcatttcaaagaaatctgaattctttaggttccaggaccagtttattgttatacataatcacgatcatttattgagctccacttagcactgcacatatatcagtatcatctcagttgccctttactctgattattttgtggggaaactgagatcagaaaagttaaataacttaggtgccacctgcaagtatagtgggtgggcagcagataccacccttcctcatttcattgttccaggtgatatttcgtctctgcctttggcctttagtctgtggttgttcctaatcttagttttcattgaaagctgtagtttgaaatgtgggatagatgagagataggaaaggaaaatttaggggtatggaaattttgttccttagtggttagttccagctttattttgtttatttatatgtttgtttttaaagatcgggagcttgctgtgttgtccaggctggtatcgaactcctggtttcagcttcccgcctcagcctcccagagtgctgggattacaggcatgagccaatatgcctggccagctgtgttttagatctttgggaaataaagagaatgcttttgggcttggcaaaatagaaacctctgggtggggagaattgcacagtaaaagaaacaaaagggaagtttatattaaactatgaaaagacacagggaggttcaatttaacatatttgccttatgtatgtgcttcttaagagagtgcacaaaggcacctttgcagaggagagaggctagaaaatgcccgttagaagcaagtctacggtttgcaccctcttactagcaccagcaacggtccctgtctagtgatacccatgacttgtcattgcattgcatgtcatctgcctaagagaagctcctgcctggggcagacacactgtcaattacccctacaatatagactgatactaaagcaaggctgcatattcttgcttattcccaaattggatggctcaaggttccagaatgttgtagacattctgcattatatctttatgagagttaaggaaatggtaaagaagcagaaaaagttggggatttttttttttaagtatttacagtgaggcgcggtggctcatgcctgtaatcccagcactttgggaggccgatgcgggcggatcacaaggtcaggagttcgaggccagcctggccaatatggtgaaaccctgtctgtactaaaaatacaaaaattagccaggcgcggtggcgggtgcctgtagtcccagctacttgggaggctgaggcaggagaatcgcttgaacccggaaggtggaggttgcagtgagccgagattgtgccagtgcactccagcctgggggacagagtgagaaaaagtatttacagtttatgtgagggtcagtacgttggttcattggcttccttcttatctagttctcgggctgagtttgctaatgtcatagcacttctagtagccttccccttttctctgccacttcccagcttccccaggcagaaagcatctggtcggccccttgattaccaggcatccataagtgaccatcatttaggccagtgcttctcagaatgccaatcacctgggctccactaaaaggcaggttctgaatagctcggcctgggttgactgagattctgcggttccaacaagctcgcaggtgatgctgatgctgccagcccatggaccccacctggagtagtgaggttccttggcactttaagaacatccctcctttacttcacatttatttctactggaaactagcacagacttatgcaagctaaattacgcatgttttctccgtaggatgctctatgtcctgttcctcttactaacaactctggtctggaccattgttctaggattgtctcaaagcttgccaggagcagattgaggcggtgctcctcaatagcctgcagcagtaccgtcaggaccaacgtgacggatccaagtcggaggatgaactggaccaagccagcacccctacagacgtgcgggatatcgacctgtgaggatgccagttgggccgaaagagagagacgcgtccataatctggtctcttcttctttctggttgtttttgttctttgtgttttagggtgaaacttaaaaaaaaaattctgcccccacctagatcatatttaaagatcttttagaagtgagagaaaaaggtcctacgaaaacggaataataaaaagcatttggtgcctatttgaagtacagcataagggaatcccttgtatatgcgaacagttattgtttgattatgtaaaagtaatagtaaaatgcttacaggaaaacctgcagagtagttagagaatatgtatgcctgcaatatgggaacaaattagaggagacttttttttttcatgttatgagctagcacatacacccccttgtagtataatttcaaggaactgtgtacgccatttatggcatgattagattgcaaagcaatgaactcaagaaggaattgaaataaggagggacatgatggggaaggagtacaaaacaatctctcaacatgattgaaccatttgggatggagaagcacctttgctctcagccacctgttactaagtcaggagtgtagttggatctctacattaatgtcctcttgctgtctacagtagctgctacctaaaaaaagatgttttattttgccagttggacacaggtgattggctcctgggtttcatgttctgtgacatcctgcttcttcttccaaatgcagttcattgcagacaccaccatattgctatctaatggggaaatgtagctatgggccataaccaaaactcacatgaaacggaggcagatggagaccaagggtgggatccagaatggagtcttttctgttattgtatttaaaagggtaatgtggccttggcatttcttcttagaaaaaaactaatttttggtgctgattggcatgtctggttcacagtttagcattgttataaaccattccattcgaaaagcactttgaaaaattgttcccgagcgatagatgggatggtttatgcaagtcatgctgaatactcctcccctcttctcttttgccccctcccttcctgcccccagtctgggttactcttcgcttctggtatctggcgttctttggtacacagttctggtgttcctaccaggactcaagagacaccccttcctgctgacattcccatcacaacattcctcagacaagcctgtaaactaaaatctgttaccattctgatggcacagaaggatcttaattcccatctctatacttctcctttggacatggaaagaaaagttattgctggtgcaaagatagatggctgaacatcagggtgtggcattttgttcccttttccgttttttttttttattgttgttgttaattttattgcaaagttgtattcagcgtacttgaatttttcttcctctccacttcttagaggcattcagttagcaaagaggttggagcaacaacttttttttttttttttgcacaattgtaattgacaggtaatgaagctatttgttaaaatatttgcctttttaagtaaaaaagaaaaatcagaacagggctatttgaagaattattttatacacagattctgccttgtttcatagtatgagggttgaagacggaaaacaatctaagggtctctcatttttttaattttgttttgttcagtttggtttttttttttttttgcgctgctaagaagctaaagtcatccatccttattcacgttgacagtacctagctgtaatgtttcacagagtgtgctgctattttataaacatttttataatatattattttactgcttaaattccaagtcctgaagtagatggttgagatatgagttcttcgtactggaaaagcccttccgtagtttgttttcttctggtagcatattcatggttgtttttttttttcttttttggttttttggttttttttttttcctctgatcacattcttcaaagacggagtattctttacctcaggtttactggacaaaatcaataactacaaaaggcaatgattcacgcttttgttttcataatacctcacaaccgtacagtttctgcttgggagcccattcgcatgaggaatacagaagcagtgtgagcagggctgactccctctcaggtggaaggcagggcggtctcactcccagggacctttttggtcatggaggccatcgggctcccagttagaccctggtatcctcatcatgatggaaaaaatacattgaaccaagggatcctccctccccttcaaggcagacgttcagtacaaacatttatgcggtaggctcagatgtcgtaatttgcacttaggtaccaggtgtcaggaaacagactaaaaagaattccaccaggctgtttggagatcctcatcttggagctttttcaaaagcggggcttcatctgcaaagggccctttcatcttgaagtttttcccctccgtctttcccttcccctggcatggacaccttgtgtttaggatcatctctgcaggtttcctaggtctgaatctgcgagtagatgaacctgcagcaagcagcgtttatggtgcttccttctccctcctctgtctcaaactgcgcaggcaagcactatgcaagcccaggccctctgctaagcggtactaaacggtcgggttttcaatcacactgaattggcaggataagaaaaataggtcagataagtatgggatgatagttgaagggaggtgaagaggctgcttctctacagaggtgaaattccagatgagtcagtctcttgggaagtgtgtttagaagggttcaggactttgtgagttagcatgaccctaaaattctaggggatttctggtgggacaatgggtggtgaattctgaagttttggagagggaagtggagcagccagcaagtaagctagccagagttttctcaagagccagctttgctcagcacactctcctgggccccaaggagtcccacggaatggggaaagcgggaaccctggagttcttgggaatcttggagcctaaagagaaaccgaggtgcaaattcatttcatggtgactgacccttgagcttaaacagaagcagcaaatgaaagaaccggacaaataaggaagggcacaagcctacccgactctatttacagtctgtaactttccactcttcctgtagtcccgaggcccctgggtccttctagcttttctctttcccatccttggggccttgtgtgatgatgggtgtggggctgccgatgggaaagtcgggggttgttaggcttttctgcctgctcctgcttaaacacaagaaggaatcctggattttgccctctccttagctcttagtctctttggtaggagttttgttccagaggagctctcccccttggatttgaacttgctctttttgttgttgttgttctttctcttctttttcttacctcccactaaaggggttccaaattatcctggtctttttctaccttgttgtgtttctatctcgtctttacttccatctgtttgtttttttctccatcagtgggggccgagttgttcccccagcctgccaaattttgatccttcccctcttttggccaaatcctagggggaagaaatcctagtatgccaaaaatatatgctaagcataattaaactccatgcgggtccataacagccaagaagcctgcaggagaaagccaagggcagttccctccgcagaacaccccatgcgtgctgagaggcgagctccttgaagaaggggctgttcttccaggaggccttattttgaactgcctcaggaccccactggagagcacagcatgccttactactgggtcatccttggtctatgtgctctgtactggaggctctgttctgcctcttatcagccaggtcaggggcacacatggcttaagtgacaaagccagaggagaagacaaccctgacagcatcacgctgcatcccattgctagcaggattggcaactcttcagacggagctgcgcttccctgcagtctagcacctctagggcctctccagactgtgccctgggagctctgggactgaaaggttaagaacataaggcaggatcagatgactctctccaagagggcaggggaattttctctccatgggccacaggggacagggctgggagaagaaatagacttgcaccttatgtcatgtaaataattgattttctagttcaagaagataatattggtagtgtgggaattggaggtaggaaggggaggaagtctgagtaagccagttggcttctaagccaaaaggattcctctttgtttatctctgagacagtccaaccttgagaatagctttaaaagggaaattaatgctgagatgataaagtccccttaagccaacaaaccctctgtagctatagaatgagtgcaggtttctattggtgtggactcagagcaatttacaagagctgttcatgcagccatccatttgtgcaaaatagggtaagaagattcaagaggatatttattacttcctcataccacatggcttttgatgattctggattctaaacaacccagaatggtcatttcaggcacaacgatactacattcgtgtgtgtctgcttttaaacttggctgggctatcagaccctattctcggctcaggttttgagaagccatcagcaaatgtgtacgtgcatgctgtagctgcagcctgcatcccttcgcctgcagcctactttggggaaataaagtgccttactgactgtagccattacagtatccaatgtcttttgacaggtgcctgtccttgaaaaacaaagtttctatttttatttttaattggtttagttcttaactgctggccaactcttacatccccagcaaatcatcgggccattggattttttccattatgttcatcacccttatatcatgtacctcagatctctctctctctcctctctctcagttatatagtttcttgtcttggacttttttttttcttttctttttctttttttttttgctttaaaacaagtgtgatgccatatcaagtccatgttattctctcacagtgtactctataagaggtgtgggtgtctgtttggtcaggatgttagaaagtgctgataagtagcatgatcagtgtatgcgaaaaggtttttaggaagtatggcaaaaatgttgtattggctatgatggtgacatgatatagtcagctgccttttaagaggtcttatctgttcagtgttaagtgatttaaaaaaataataacctgttttctgactagtttaaagatggatttgaaaatggttttgaatgcaattaggttatgctatttggacaataaactcaccttgacctaaattatctggccgtttttgacttatttataaaccagcagtcctcagaatggaatacacttgtctcatgtcagaactgtttcatgccgctgcaacatttggcagtggcataaaagacacattctaacctggaatggaatctacatgtgcctctgtgttatggcggtacaagtcattgttgacattgctaggggacgaggggtgcccatgcagccagcttataagctagaagcctcagtccaccttcagaaggtgggtacatcacagacactatgactggtcctcagaggatcgtccctgattgttgccagctactcattctgggctgtgaggaagcatctcctggcatgagaggtaccagaagcctgcggtgccatctccagagtctagggagtctctgggaaccctgcccctgcagctttcctggctcctgcctgctgttcttcgtggctcccacctgatttctgatccttcctgcacccctcttctgagacacaggccacaactacctttgctggagtctggagaagcagagcctgggaatgggatgtgacagtctccgtactgctgaaatgaattgccaggccctaggcccagctgctcttggaccttagctcagaccagcttctttcccgagagtgatgggtgtgcagaagacaagggcctaatgaacacttttttgtgtgttttgtttagaaacagggtcttgctgtgtcccccaggttggagtgcagtggcacaatcccagcttgctgcagcctcacactcctgggctcaagcaatcctcctgcctcagcctcccaagtagctgggattacaggcgcccaccaccacgcccagttaatttttttattttttgtacagattttttgtatagctttgttgcacaagctataacagacattttgatgttactgtaaaattaattttttccaaagttccttgtctggaagtcatcgaaggctgttttccattttaattctgacctgagttgtaaacaagatttaaaactggccgttggggaagtccagattaagatattccaggctgatctcaagtaacttcacttaataggacttttaagcttacaaggaccctagaaattcccctttgttcccattccccttgacatccgccattcttagcgacaaatgggggtaacttttttcttgggtttctgcctagtgaagtctgctggcctcctgggagtttcaagggcctctggttgccattcttaaccatccttggaattctctttggcatgacataatgtccaactgggttcctctccctccctttccctatctttttgctctgtaggatcaatgctatatctgtttatagcatgacaactccactccctctctcaaatgccacccagcaacactgctgggcttcccccattctgaacaatggatgttttaagggcgggaagagcagatgaagcacacagccgagcagtgagaaatctgactgtcccatctacgctctttcagacccagatcatcttataactggaaaatctcaaacttggaagtgcctttcctgaaagtggccattaaaaatgcagtgaagacctggaaatccccgatcttttgtgcgtgttcaagggagtgcttttgtatctctaatgactttctaagatttggagcttttatttagtatgcagaggtatccccaaaattcaccttcccagttggcttagcagtaatactgtcaaaatactgacacgaagcaagtactcaaaagctgaatattacaccagattacttccctgctctcctggcaattacagcaacagcaaaaatgctgtggacagagtagggagattcagagtatcaaggtaagcctagtactcacagccgatgtgttatgtggggcctgtactgagcctttaaggaaaagcacagaaaaaaacaggacacacaggcctatgaaatagcagagagaaacaacagcaaatgcaaatgagtctggggggaaatcgatgctaaggtgtgggagggggcccttgcagaggaacaggtttcctcaagcaagtgagttttaggaaaacacttttgttaggaagatcatgtgggtcagcatagtttggaaacggaaacagagtgtgaccttttccaaaaataaaagggatgggaagtaatttttttttaaatgaagggaaaatattccacacaatttaatagattttaaacaatataaacacagatgttaggcttgtgaaacaggataagcacagccacaaacattgatttgggattaccacccacctaatttctcatgaggcttaaagaaagaaggctggacgcttcaatatgactggtggctttccttgtctttgggctctgggggcctccccgtgctggaggggcggattccatccgctcggaccacaggctcagtcaaacagaactgggcggcctgagaaagcaagaccagcgcccctgcctctgtctcattgtccccctgaagctttgagtttatgcttcaagctttgagtttactcattattatggtttctttcatgctgattcgctcggaggaccctggcccttctgctgcgctcaccgccgccgctctggtaaatgactgtccgcatggtttcaacctgcagttcttcctgcgaagtccactaggtggtactaatgccacggacaggatcactcacaaggaaacccagagccagccgggtgtaggttgcctctgccctgcacggaagggaacacctccctccagcagacagcactggagcagcacccccgcctccgccatctccccagggcagcctggggaaggaacgtcaggcctttcccgtccacacctggcgcagttccctcacctgcttctctcactaccgccacatcgtgactccatctggggtggctggtgctggttcatcaccttccctgactcttcagtgactaatccagagatggcacactggcagcttacagaccaaatccagcctgcagacataattagcttgactcccacagtgattgaaactgtcttggatttacttgccaatacaagatgagagctttcacataaaagtcaggattgtaacgactcttgggagatttaagtcctggcaaccacaggcccgcgaggccgcgagggctgcagctgagtgtgactggcccctttctctaccccctgcccaccccacaaccgactgaacccgctgctctcttttacggcgcctgccagtcggcttagggcttacagctctgcagcctaacctgtgtctgttttacctccctggccaggaaggaggagccagtaagtcccaagtggagtcatcctcctccaaccctctccaccacaaacagacctggaatacttctttcagtttgtggaccataacctctccttctcagacgaagaaagaccgtactgcctcagtaagcattaagatctctttatgtctttatgagtttttagttatcagattacccccggggctgggccagatttttgaaattcctttgagatcccaacattcagccccacgcccaggtctgcaggtaggcccaaataaggtggggtggtaaagatctgctttttgttttttggttttcttttcttttgtttctggagatagggtcttcctttgtctctgaggctagagggcagtggcgtgatcacaactcactgcagcctcaacttcccaggctcaagtgatcctcccacctcagcctcccaagtagctgggacaacaggcatgcaccactacatctagattgttttaaaaaatgtgttatagaaacagtgtctcactatgttgccctggctgctctcaaactttgggcctcaaaagatccttcccacctcagcctcccaaagtgctgggttacaggtgtgagccactgtgtccagacagcttttcctgcttttgtttgtctggagagtcatttttagtgctcctggcaccatggagattccatgagaagacaaacctgtgagatttctatatttgttgaaaaagtgcaaatctctgtggctatgtttcggtcaacccattcactgaaaatcgctactcttcatcatccccttcccacacagggctcctgggcactgctcgtttattcaacaaatgagggctgggtacgtgcctggtgctccgtatgggacccctcattcaacaaatgtgtctcagtacttgcttttccagggatgagatctctgctctccttgatctcaaaggctaaagacagagacagataaaaagacaactgctacttggtggttggcccagaatacaagcgctctatgctctgctctggaatgcccccccggccacccactcgctttgtaaccttgggctcattacttagccacccagcaactcacagtaaactcagtgacttagttttttcatctgtgaaatggggttttgtagttttgaaagagctttccacaagcctctcctataatccttttataactctggtgaatttggtaccttgttttgtagctaagtgaatggagggtcacacggctcacttggcttatcacaaagagttaggctaggactggatcccagatgtgtctgaattcaaatatcatgcatcttctgctacactgggctactttattgatccatattttgcttactgagcattgagctgaaagagtgagacttttagcccagtgtgggcaggaaggttgcagggggtggggggggttggatgatgacatcacttagtgaaatcatcaggggatagttttttaatgaagacaaagtcaatgaagaaagtaaagggccttgtcatctaaggaggagtttgtcagtgaatgtacaccaaggaagtagccttttctttccagcgtctttgccttgccccttggctgttcttcatgctcattccattcaggttataaatgcgttgctcataaactcctgggaaggagccatgggttctgctttcctcccaaatccccaaacctatgtcaattaaaacaagaatcacagccaggcgcggtggctcacacctgtaatcccagcactctgggaggccgaggtgggtggatcatgaggtcaggagaacaagaccatcctggctaacatggtgaaaccccatctctactaaaaatacaaaaaattagctgggcgtggtggcatgtgcctgtagttccagctactcgggaggctgaagcaggagaatcacccgaacccaggaggcggaggttgcattgagccgagattgcgccactgccctccagcccgggtgacacagcaagattccatctaaaaaacaaacaaacaaacaaacaaacaaacaaaatcacatatctagtttgtccctattcttcagggacccacgaatatctgtgttattattatttctcccccaacgctccctccttcccccaccaagcccagagaatctcagtccagaggcagggaagccttgcttgtatcatcagcctcccaagcctttgctatttaaagattccttttgttatcctataggaagagatattctttttcttggtttttcgtggccaccttccttgccccgaaaaaagggacacaggaggaagggcccaaaaacgtagaggaaaaatactgtaggaaaaaatgctgattaatatttccaaaaatattattttaccatggatgcaatggcctgaggccctgcaagggtgaatgccacactgagggtcacccagcaatgtacaaatgaacaatgaaggacaactgctggcctctgcaggcttccattcattgctcagctctgtgagcctctggacatcttggtgaataccctcagaaaatcttgaagcaccacaggttttaaaagcagtcactcacttatgtttttcatatgtcactgtaagctcatcatgaagggactatggaagatttgcttccatatggcactgcctaggtattagggccaggacacctaggattttagggcctagcggtcttctcttttccttagcattctgtcagggctctggcaagaacaagaggattggcctttctagccaatgtcccccccagtgcttgctacttgcctggaatattatggactgtatcatacatttctgtattacatacaatcattgtgacagagtcaggatgctgtggtggaaaaaggcttaggtaataagatgatctgactttgaatcccagggctgccacttagctttacaagctctgagtctctgctattcttttataaaatctctctggattattagaaggattaaatgaggtagtctatgtaaagtgcctaatacatagaaagctttaacaagaatcagctagtctgaacatatgcaaacacaccaaggaccgtgttcattgcttttgaaggcattgtagatgcaatgttattttcccaaaaagtcaggggtggaggtggatatgggttttctgtggatcctgatgagactactatcaagagcacagcagtgaaacaaaagcatttacaactctcataatatccccttggtgctgccgcccttcttccagacagcaatgaacttgggcttggggagcgttctcttccccactaagtaacaggctaacaggcaaggcatgaaaagggattagaggatgcatgtattcaaataaaggggagttccccagaagcacggcaggctgagaaggcatctttcgactgtccatcagtaggaaagctgtttgactggcagatataatttttttggaaccagcaataatggggagctattggtgacagatgtcagatgttggcagagcagctgccaaaacaagtctccctccaccttcagacatcaagctgatggggactgggagtcccttcgcacttgggtcattggtcacattattatttctcagttgctggacaaagcagatggtttaccatgtatttgtgattttctgttggcctagaaattctgttcttccatcagggtacagcatgtaatcaattatgacagtgggtggtgcaagaaaatccctgccagtaaaagcccaagactttctcttttattaagtctgcataaaccactacaatttccaacttcaaagcaatagaagaaaaaagcaaagtagtggtgttataaataacttgggtaatcacaaaaaccacagttctcagttggtcccaaacactctcagtctgtactatctgatgtcagttttgtctgtccatttttattctgaaacttaaaatcctcttgtctctattctagtaagtcttaataatatacgtatatttttagacagagtcttgctctgtcacccagtctggagtgcagtggcacgatcttggctcactgtaacctccaccttccaggttcaaacaattctcctgcctcggcctccgaagtagctgggactatcatgcacagctaattttgtatttttagtagagacaggggttcgccatgttggccaggttggtcttaaactcctgacctcaagtgatctgcccgccttggcctcccaaagtgtgccgggattacaggcatgagccactgcaccctgcctctattctggtaagtcttaaagagctttatcttagaatcataaagtgacctaattaaaaataaacagaacaaataccaggaacatactacccctcaactaaggtttttttaaaaaaaaaaattctcagctgtattctattacatagtaaaaatagtaagttgccttgctttagtatgtgtgagtagccacatagaacagtttatatgttctccatcacccaccctctggataattttctttgtgaaagacaccttgcttatttgtatgcatgtgtctcaggaaataaattctttagtaatagagcagaacaagcatttttaacatgataactaccaactagagaaactcttgacataaattacacattttttcttgtcttttaaaaatatgtatgtattttttcttaaaaatcaggctcataaacgaatggctttctactcttttttcatgtaatctcctatcaggggaatgttatcataccattaaatattctgtaagaacatgatttctagggctggacacggtggctcacatctgtaatcccagcgttttgggaggcccaggcaggaggatcaccttaggtcaggagtttgagaccagcctggccaacatggtgaaacccgatctctactaaaaatacaaaaatcagctgggcgtggtggcacatgcctgtaatcccagctatgtgggagctgaggcaggagagttgcttgaaccctggaggcggaggttgcagtaagctgagatggcgccactgcaccccagcctgggtgacagagaagactccgtctcaaaaaaaaaaaaaaaaaaaaaaaaggaaacaaaccaaaaaaaaaaaaagaaaaaaaaccatagattctaatgaattgtttgggctcctacaatatatctagtactacttgaggtgctgaagacacagaagggaacaagccagtccccacggtcaaggaatatatatcctgctgaagaaagacaagcaatgaacctacaaaaatgttcataaatgatataatttcagaataaaatcggatgatggatagtgactgggcagcctactttgcttgagggaagacctcttgagagtgggacttctgagttgatacctgaaggctgagaaggaggcagccatgcaaatatcttgggaaagagctctgtgagcagaaggaacagagaatgcaaagatccggaggtaggaatgagcatgacgtggtctacgaacagagagaagccctgacggctggagctggatgaggaggggcagcgaagagagaattgtaactggagggccaagaggggccatgccacataggccttgcaggagttgggacttcattctaactgcaatgagaattcaatagagaattctccagcaagggagtgacacaatagggacatctcttcaatggctgagtaccagagtagaggcagcagagctatgccaacaggctatcacagtaatccagacgagaggtgatgaaggctcagcctgggacacagtgagactccagaagtggtggattcaggacataatttggtgatagaccccataaactttttttaaaggttttggatagatagcttttatcatttatttattattgaagatatgtacgacacaataaataagcttgcttcagacgtatatatagaactctgtatccaataatgagtgaatccacattcttcacaaggacacacgaaacatttctgtgaaatgcctgtggactagtccacaaagcaagtctctgtaaatttcaaaaatgtatacccttgaaaatctctgaagtcctggagatttaagtctgcaactatcttagtcttactaccaagaatagcccctaaggaaaaaaaaaaaccctttcaataaaaaaaagataaacaagaataatataaatttcacagactccagctaaccagcttttggtcacaatgtaattaatttcattcttaatgcattgctgaaaatatttaaatgcctggggaactggctccaacccacaatctcctcccctaccctacattccaaatagatcaggcattttacacttggctcatcttcagtgaagacagtaattaatctttatttgaaaacaagatttgggaggcagacgcaggcagatcacctgaggtcaggcgtttgagaccagcctggccaacatggtgaaaccccatttctactaaaaatatagaaaaattagctgggcgtggtggcgggtacctgtaatcccagctactcaggagcctggggcagaagaatcgcttgaacctgggaggtggaggtttcagtgagctgagatcacgccactgcactccagcctgggtgacggagcaagactctgtcttaaaaaaaaaaaaaaaaaaaaaaaaaaaggcaggaaaacgagtaaaatccagcactcactgcattattgagcctacagaaatctatgatgaatttgacagggaatattaggataggtaaagaatcaagggtttcatgagcagtcaagtggagggtgttaccatttac

SEQ ID NO: 5 - DNA, 6478 bp, Homo sapiens
agagcgagcaggggagagcgagaccagttttaaggggaggaccggtgcgagtaaggcagccccgaggctctgctcgcccaccacccaatcctcgcctcccttctgctccaccttctctctctgccctcacctctcccccgaaaaccccctatttagccaaaggaaggaggtcaggggaacgctctcccctccccttccaaaaaacaaaaacagaaaaacccttttccaggccggggaaagcaggagggagaggggccgccgggctggccatggagctgctgtgccacgaggtggacccggtccgcagggccgtgcgggaccgcaacctgctccgagacgaccgcgtcctgcagaacctgctcaccatcgaggagcgctaccttccgcagtgctcctacttcaagtgcgtgcagaaggacatccaaccctacatgcgcagaatggtggccacctggatgctggaggtctgtgaggaacagaagtgcgaagaagaggtcttccctctggccatgaattacctggaccgtttcttggctggggtcccgactccgaagtcccatctgcaactcctgggtgctgtctgcatgttcctggcctccaaactcaaagagaccagcccgctgaccgcggagaagctgtgcatttacaccgacaactccatcaagcctcaggagctgctggagtgggaactggtggtgctggggaagttgaagtggaacctggcagctgtcactcctcatgacttcattgagcacatcttgcgcaagctgccccagcagcgggagaagctgtctctgatccgcaagcatgctcagaccttcattgctctgtgtgccaccgactttaagtttgccatgtacccaccgtcgatgatcgcaactggaagtgtgggagcagccatctgtgggctccagcaggatgaggaagtgagctcgctcacttgtgatgccctgactgagctgctggctaagatcaccaacacagacgtggattgtctcaaagcttgccaggagcagattgaggcggtgctcctcaatagcctgcagcagtaccgtcaggaccaacgtgacggatccaagtcggaggatgaactggaccaagccagcacccctacagacgtgcgggatatcgacctgtgaggatgccagttgggccgaaagagagagacgcgtccataatctggtctcttcttctttctggttgtttttgttctttgtgttttagggtgaaacttaaaaaaaaaattctgcccccacctagatcatatttaaagatcttttagaagtgagagaaaaaggtcctacgaaaacggaataataaaaagcatttggtgcctatttgaagtacagcataagggaatcccttgtatatgcgaacagttattgtttgattatgtaaaagtaatagtaaaatgcttacaggaaaacctgcagagtagttagagaatatgtatgcctgcaatatgggaacaaattagaggagactttttttttcatgttatgagctagcacatacacccccttgtagtataatttcaaggaactgtgtacgccatttatggcatgattagattgcaaagcaatgaactcaagaaggaattgaaataaggagggacatgatggggaaggagtacaaaacaatctctcaacatgattgaaccatttgggatggagaagcacctttgctctcagccacctgttactaagtcaggagtgtagttggatctctacattaatgtcctcttgctgtctacagtagctgctacctaaaaaaagatgttttattttgccagttggacacaggtgattggctcctgggtttcatgttctgtgacatcctgcttcttcttccaaatgcagttcattgcagacaccaccatattgctatctaatggggaaatgtagctatgggccataaccaaaactcacatgaaacggaggcagatggagaccaagggtgggatccagaatggagtcttttctgttattgtatttaaaagggtaatgtggccttggcatttcttcttagaaaaaaactaatttttggtgctgattggcatgtctggttcacagtttagcattgttataaaccattccattcgaaaagcactttgaaaaattgttcccgagcgatagatgggatggtttatgcaagtcatgctgaatactcctcccctcttctcttttgccccctcccttcctgcccccagtctgggttactcttcgcttctggtatctggcgttctttggtacacagttctggtgttcctaccaggactcaagagacaccccttcctgctgacattcccatcacaacattcctcagacaagcctgtaaactaaaatctgttaccatctgatggcacagaaggatcttaattcccatctctatacttctcctttggacatggaaagaaaagttattgctggtgcaaagatagatggctgaacatcagggtgtggcattttgttcccttttccgttttttttttttttattgttgttgttaattttattgcaaagttgtattcagcgtacttgaatttttcttcctctccacttcttagaggcattcagttagcaaagaggttggagcaacaactttttttttttttttttgcacaattgtaattgacaggtaatgaagctatttgttaaaatatttgcctttttaagtaaaaaagaaaaatcagaacagggctatttgaagaattattttatacacagattctgccttgtttcatagtatgagggttgaagacggaaaacaatctaagggtctctcatttttttaattttgttttgttcagtttggtttttttttttttttgcgctgctaagaagctaaagtcatccatccttattcacgttgacagtacctagctgtaatgtttcacagagtgtgctgctattttataaacatttttataatatattattttactgcttaaattccaagtcctgaagtagatggttgagatatgagttcttcgtactggaaaagcccttccgtagtttgttttcttctggtagcatattcatggttgtttttttttttcttttttggttttttggttttttttttttcctctgatcacattcttcaaagacggagtattcttacctcaggtttactggacaaaatcaataactacaaaaggcaatgattcacgcttttgttttcataatacctcacaaccgtacagtttctgcttgggagcccattcgcatgaggaatacagaagcagtgtgagcagggctgactccctctcaggtggaaggcagggcggtctcactcccagggacctttttggtcatggaggccatcgggctcccagttagaccctggtatcctcatcatgatggaaaaaatacattgaaccaagggatcctccctccccttcaaggcagacgttcagtacaaacatttatgcggtaggctcagatgtcgtaatttgcacttaggtaccaggtgtcaggaaacagactaaaaagaattccaccaggctgtttggagatcctcatcttggagctttttcaaaagcggggcttcatctgcaaagggccctttcatcttgaagtttttcccctccgtctttcccctcccctggcatggacaccttgtgtttaggatcatctctgcaggtttcctaggtctgaatctgcgagtagatgaacctgcagcaagcagcgtttatggtgcttccttctccctcctctgtctcaaactgcgcaggcaagcactatgcaagcccaggccctctgctgagcggtactaaacggtcgggttttcaatcacactgaattggcaggataagaaaaataggtcagataagtatgggatgatagttgaagggaggtgaagaggctgcttctctacagaggtgaaattccagatgagtcagtctcttgggaagtgtgtttagaagggttcaggactttgtgagttagcatgaccctaaaattctaggggatttctggtgggacaatgggtggtgaattttgaagttttggagagggaagtggagcagccagcaagtaagctagccagagttttctcaagagccagctttgctcagcacactctcctgggccccaaggagtcccacggaatggggaaagtgggaaccctggagttcttgggaatcttggagcctaaagagaaaccgaggtgcaaattcatttcatggtgactgacccttgagcttaaacagaagcagcaaatgaaagaaccggacaaataaggaagggcacaagcctacccgactctatttacagtctgtaactttccactcttcctgtagtcccgaggcccctgggtccttctagcttttctctttcccatccttggggccttgtgtgatgatgggtgtggggctgccgatgggaaagtcgggggttgttaggcttttctgcctgctcctgcttaaacacaagaaggaatcctggattttgccctctccttagctcttagtctctttggtaggagttttgttccagaggagctctcccccttggatttgaacttgctctttttgttgttgttgttctttctcttctttttcttacctcccactaaaggggttccaaattatcctggtctttttctaccttgttgtgtttctatctcgtctttacttccatctgtttgtttttttctccatcagtgggggccgagttgttcccccagcctgccaaattttgatccttcccctcttttggccaaatcctagggggaagaaatcctagtatgccaaaaatatatgctaagcataattaaactccatgcgggtccataacagccaagaagcctgcaggagaaagccaagggcagttccctccgcagaacaccccatgcgtgctgagaggcgagctccttgaagaaggggctgttcttccaggaggccttattttgaactgcctcaggaccccactggagagcacagcatgccttactactgggtcatccttggtctatgtgctctgtactggaggctctgttctgcctcttatcagccaggtcaggggcacacatggcttaagtgacaaagccagaggagaagacaaccctgacagcatcacgctgcatcccattgctagcaggattggcaactcttcagacggagctgcgcttccctgcagtctagcacctctagggcctctccagactgtgccctgggagctctgggactgaaaggttaagaacataaggcaggatcagatgactctctccaagagggcaggggaattttctctccatgggccacaggggacagggctgggagaagaaatagacttgcaccttatgtcatgtaaataattgattttctagttcaagaagataatattggtagtgtgggaattggaggtaggaaggggaggaagtctgagtaagccagttggcttctaagccaaaaggattcctctttgtttatctctgagacagtccaaccttgagaatagctttaaaagggaaattaatgctgagatgataaagtccccttaagccaacaaaccctctgtagctatagaatgagtgcaggtttctattggtgtggactcagagcaatttacaagagctgttcatgcagccatccatttgtgcaaaatagggtaagaagattcaagaggatatttattacttcctcataccacatggcttttgatgattctggattctaaacaacccagaatggtcatttcaggcacaacgatactacattcgtgtgtgtctgcttttaaacttggctgggctatcagaccctattctcggctcaggttttgagaagccatcagcaaatgtgtacgtgcatgctgtagctgcagcctgcatcccttcgcctgcagcctactttggggaaataaagtgccttactgactgtagccattacagtatccaatgtcttttgacaggtgcctgtccttgaaaaacaaagtttctatttttatttttaattggtttagttcttaactgctggccaactcttacatccccagcaaatcatcgggccattggattttttccattatgttcatcacccttatatcatgtacctcagatctctctctctctcctctctctcagttatatagtttcttgtcttggactttttttttcttttctttttctttttttttttgctttaaaacaagtgtgatgccatatcaagtccatgttattctctcacagtgtactctataagaggtgtgggtgtctgtttggtcaggatgttagaaagtgctgataagtagcatgatcagtgtatgcgaaaaggtttttaggaagtatggcaaaaatgttgtattggctatgatggtgacatgatatagtcagctgccttttaagaggtcttatctgttcagtgttaagtgatttaaaaaaataataacctgttttctgactagtttaaagatggatttgaaaatggttttgaatgcaattaggttatgctatttggacaataaactcaccttgacct

SEQ ID NO: 6 - DNA, 870 bp, Homo sapiens
atggagctgctgtgccacgaggtggacccggtccgcagggccgtgcgggaccgcaacctgctccgagacgaccgcgtcctgcagaacctgctcaccatcgaggagcgctaccttccgcagtgctcctacttcaagtgcgtgcagaaggacatccaaccctacatgcgcagaatggtggccacctggatgctggaggtctgtgaggaacagaagtgcgaagaagaggtcttccctctggccatgaattacctggaccgtttcttggctggggtcccgactccgaagtcccatctgcaactcctgggtgctgtctgcatgttcctggcctccaaactcaaagagaccagcccgctgaccgcggagaagctgtgcatttacaccgacaactccatcaagcctcaggagctgctggagtgggaactggtggtgctggggaagttgaagtggaacctggcagctgtcactcctcatgacttcattgagcacatcttgcgcaagctgccccagcagcgggagaagctgtctctgatccgcaagcatgctcagaccttcattgctctgtgtgccaccgactttaagtttgccatgtacccaccgtcgatgatcgcaactggaagtgtgggagcagccatctgtgggctccagcaggatgaggaagtgagctcgctcacttgtgatgccctgactgagctgctggctaagatcaccaacacagacgtggattgtctcaaagcttgccaggagcagattgaggcggtgctcctcaatagcctgcagcagtaccgtcaggaccaacgtgacggatccaagtcggaggatgaactggaccaagccagcacccctacagacgtgcgggatatcgacctgtga

SEQ ID NO: 7 - DNA, 55996 bp, Mus musculus
  misc_feature (29253)..(29272): "n" at positions 29253 through 29272 can be any base.
  misc_feature (31023)..(31239): "n" at positions 31023 through 31239 can be any base.
  misc_feature (42691)..(42710): "n" at positions 42691 through 42710 can be any base.
  misc_feature (46987)..(47006): "n" at positions 46987 through 47006 can be any base.
  misc_feature (48271)..(48290): "n" at positons 48271 through 48290 can be any base.
  misc_feature (50692)..(50711): "n" at positions 50692 through 50711 can be any base.
  misc_feature (53136)..(53155): "n" at positions 53136 through 53155 can be any base.
  misc_feature (55549)..(55568): "n" at positons 55549 through 55568 can be any base.
gtagagattaggacagctattttctgaagcttaaaagaggaatacaaaagtaaattaaaataatagcagaacagcaaaggcaatcatcttacgttcctgagctagagagggagatagcccagataaacacagtgcaccaatgttggtaactgtatgcaacctagaaaagatgtcggtgaagcacacagtcttgagaaagccatttgtgaaatgataatgaaaggtcagcgtacaaggaaaaccatcttggagctgagatggaaggaaggaccatccagagactgccccacccggggatccatcccataaacagccaccaaacgcagacactattgtacatgccaacaagattttgctgacaggaccctgaaatagctctctcttgtgaggctatgcaaatacagaagtggatgctcacagtcatctattggatggaacacagggcccccaatgaaggaactagagaaagttcccaaggagctgaaggggtctgcaaccctctaggaggaacaaaaatatgaactaaccagtacccctagagctcatgtctttagctgcatatgtagcagaagatggcctagttggccatcgttgggaggagaggcccttggtcttgcgaagattatatgcccccagtacaggggaatgccagggtcaggaagcaggagtgggtgggttggggagcagggcgggggaagggtataggggactttcgggatagcatttgaaatgtaaatgaagaaaatgcctaattagaaaaaaagaaaaaccataatcaaatcattagtatttaacaggcttccattcactgagggagaaaactgggactgagaaggttaaatactatgctcagctagtgaaataattgaattagaacacaagtccctttggtctgtcctcagaggaagaaaacattcccatgaacagggacacaggcagtctaacaaagggaaccttccagcttctttctccctgctcccggtgcaccacccagctatcccactctctctgtaagtgactaatgctcccttctacagaaaactgtctgtacacctgtctctgctttgactaaagtgccctacactctaacctaggcccgggctctgttgtcttctctcccaactccaactccatgatacctttttaactccacagatctcacttcagtcttcccttcttgccctccagtgtctccttctagcttcccctcagcatctgctgacagggaaaggctgtgcaggcagagggtacctatccccctctacgggaactgcatgggctgtcagagataaactccctcagtccccctcacccactcacacctcactgccccagcaatttctctcacatcacctctcatccagggccctagaccagctttggtagtcttagtttgtcatttggggatagtccacaggctaatgctgagagtatggactatgccttataccaacccttccagagggacagtgtctttctggtagggagtgatctggaaaacagttttagtggtatgcaggcaagtattttacttcatatttatttttgtaggtattttctattttttggtaaggaatgttgacttttccattttcgactatcacgtgatgtcttattttaagaataaaatgagtggggaaacaagtaagttgattgttaaaaatacattttactggaacatgtctttaatatatactgtggtcaattgtgcgatgtacacacatgtgtgggcaaaacactcgtgcacattaaataagtaaatctgaaaggaaagaagaagaaataagtgatgtgagcttcacattttgtcgtcaggtggccagttgtcctttttagccaggcctcctgatgattacagaaagatgatgcttctatcagttgggcatatggtatggatacttacccatatggatggcttatgctgagtaatttatagtcagcccgtcagccaatctttcccaacagaggcggcacaggacgatcatgtcttaagtagtgcctacctgagactaaaccccatcaacagcaggtgagcgctcatgaagacaatgcttctcattcctctgcatgccagtacatgcatggagtcctggaatgtctctgtgtttagtgcagtctcatatacagaaatggcaggggcaggatgctcacctgggtgttgaagtctggggctgcagaaaagctatttcccccacctgtctgctgcagccccttcccgccacctctctccctgctagctgcatctcagtttctgaatgttcttctcattatcatttccatgttattggatcacaaggatcttggtgtgctggttttcatggtaggagaatttggaagattgaatagcttctttcacatctcaggggctgggcattcagccctcatctgtcaggctctggggaacttttctttgggccgtgctgtcccttcaggacatgcttgtacacaaagaagctcaggaaaggacacagaatccagctaatttatcttcacatagtttgacttgtaaagccatggtgggactaacaatgtgtactttggatctggctttcagttatgctaaatacattgcaagcaaacatagtctcttcatcctgtgggaaatataatcttccaaaggtgaaaatgcctgtatgatcctcactgcagattacttgcaaagttaaagttcttccttttccctgtctatgaacataaatacatttttttttcacaactgagattttattgaggagcagtgtacacagacattttaatttttttttgtttgtttgttttcaagacagggcttctctgtatagccctggctgtcctggaactcactttgtagaccaggctggcctcgaactcagaaatccgcctgtctctgcctcccaagtgctgggatcaaagttgtgcaccaccactggctggctagacattccaattcttaacacacatacccaaactttgaagagatgtatatttattatgttcacgtaccctaactctgaagagtcacatcgtgttcatgtacacaaatgaagagccacgccacgtattgtttctcgttgaacttattccagttcctgcctcaaacttggcaagtttccttaagacctcacatgacacacacacaacatacacaaaatttctgtctttcacagcacattatcacaactgttagggaaatggactcccacgaccacagacattacagttctgacaggggaaggaacaaggagtggtttccttaggaaacagttctattagagacaggagaccagatattactgaaaatattccagacatgaatgcatgactgagactccaaattgccatttagtatgctttgtattgtaggatatgaaactagacccttctacagaatgttatagtgaccctggagacagtcatagcctctcctgattcaataccctgctattttctggttgtaccaaaaaaaaaaaaatttacacttttaaaatgggatgaggtgggattccctcaccttttaaaaatgtttctagagctactataaaattcgcgtttacaaaatcgttgataaaacgattcctcctgattgtacaagaagggaggggcgaggacgaatgacagatgtgatgaatgctagatcagtcttggcttctttctcttcgtctgaggctggactatggttttctgtctcttccttttctgcaggcagatctatagtttgctggtcactttgcctcttgctctcctcttcccttttgttgacatttttttttttggctgatttggcagcctttttaagcttcccgtccaccttggcaggggaaagcttggtctacagccacagagcagagcttgggcttggctcttcatcctcgctaaccttcctcttgagcatcgtggcggcgctgcgtggaagatgcgtgcaacggacagagctacactgcctagccaccaccacaggaactcctgtgacccccgaaatacattttttattggtcaatagaaaatctgatacgtcctttggtcagtgtaagcaatgatgccctctagtgacagaagatttattttgtagagactctctgtgtcttaaaggtaccatctaggcaattttccttatttaactctgaaaacaaaatagcaaacattaagcaattacttttggtaaaaagggacttcttacactaaccataagttttaatagcacacgaagaaacttagagttgtaagaatctagcttttacaaaaactgagaatttactggttaggcagtgtggggaggccaagtttcaatcctaaagataagtcattcaggggtcaggtggagccccaggccccacctctccatgtgacatcctctcagtgtgagtgagcttcaatctgtcaaaccacggggctttctccacaaccaactgtaccaacagtgcatctcatgagtatgtttatccaatgtcaaatccagagagaaagagtttgtgtctcagttgcttccagcaaatgatgccaaggttaattccaatggaatgtgatatgttgtttttcttggccaagcagagtccctggttctacatttggtgtcaactttgctgttatggttaatattatctgtcacattgtctagactgtggtgcccgaatatttagtcaatcacggttcatgtttctgtgatactctattttgtatgaaattcaaactaaatccacaggctttttgtaaaattatggcccttaacaatgtgactaggtgtcctccaagaaactcatgaaaaagcctgactatgattgagaaagggaggagtcctaccagcctttggatttgaactacaaccctttcatgagtctctatctggtcaatatgcactataggttctaggcacatcacactaggcaatcatgtgaaccaattccagaagatgtatcatctctgtatcacttctccagccatccatttatcctctattctagtgatcctgtttctcgtcccctggaaagcactgacttaaaagagccactcatgggggctagagagatggagcagcagttaagagcattgactgctcttccagaggtcctgagttcaattcccagcaaccacatggtggctcacaaccatctgtaatgggatccgacaccgtcttctggtgtgtctgaagacagctttagtgtattcacatacataaaataaataaataaataaataaataaataaataaataaataaatctttaaaaaaaaacaacactcttatcagatagtcaaggacagaggggttgagcagtttttctagacccatcctggaagtctcattactaggaaggaggagaaaagatgtagggttaaataaaagtcatggatgtcctctacagttggagactattaaatcaacttattgctatttagttaaagcagtttggctggcagcaatattttaaaatattagctccattaaggaaagaatagaaatattgtctgtagtgaaaagttaaaatgtttctacctattaagtttttacagtcacttatgtatgtgaatagtatgcaatctatccagaaagccgtgctatctgtgtacagtagaaggatactttaactcgcatggtttggtttgagtaagccaggatgactatccagagcactcctcacctccagtggcatgcctggagctatataaaagaacacatttctaagagctgaggagcaagctcagtgggaaagattgctcggtgtgcaagcatgactgctcgagttcagatccccagcaaccactgaaaaagccaggcatggcctcctcttgtaactccagatctgtctggggacagagataagaggatttctcagactttctgggccaccaaggcaggttaggtgacagaacatcaagctccaggttcaatgacagaacctgtctcaaaggaataaggcagacagtaatagaatgacactacatgacattcatggatgcacatttgcacacacatacaccatttgggtttggtttcgtttattgcacttgaaaggatgataacttttcaaaatgtattgttaggataaaaataacctatagaaatacttactgccttaatttgccttctgtcattgtgataaaacatttatccaaagcgatttagggaggaaagagtttatttcatcttatctataacaactcccaggtcaccatccatcactgagaaaagtcagggcaagaacccggagcagaagccaggaaaaaccactgctcacctccttgctctccttggcttgcttagcttactgtgttatacaactcacagccacttgcctaggggtggcaccgctcaccctcccatgccaatcagcaatccataaaatgcccacaggctatctgatggaagcaactcctcggccgagagtccctcttgccaggttactgtgtttgtgtcaagctgacaaaaactaaccagtgaaaatacccaaagtggcctcctcagagtgtcaacaaggtttactcactcaatagatattcctccaaaggttccatcagaaagaacttcagggtacggcatgtgtactcacctccgcttagatgatacagtatatgttagcatattacagactatgagaaatcacagattaggatactctaagcattttttttgttttatgattattgtgtgtgtatgtatagtgtgtggcatagttaaaagctgtggaggtcagaagacaccctttaagagttggctttcactttctggtgtaggtctggatgatgaattcaggctgtctgcatttcctgttaagtgcctttaaataatccctcaccctgccaagttaaaaggtactaagaatgaattttatgattcagtgaagttgctgactcaagtttatactcaagagctgttgattttacctagagcttatgctccacacacccccaactcccccctctttctcctccttccccctttctcttctcttctcttctcttctcttctcttctcttctcttcttttttcttcctttccttttgcatggaacttttcatttcaaattgttcttcctttcctttcaattttagaatagttgtattaggggcacagcctgaggcttcttcatggcagcaacaacctacaggaagatgaagcaaaggggggtgggggaggggtagggtgggggtggggtgggtataagtttagtgacagctgccaaacagaatgaacagaacgcctacaggaaggagaggaaggagggtgacaatctagattcagagcacttttaaaaacacctgcagaagacaatgctgcaggatgtccccccactctctctctctctctctctctctctctctctctctctctctctctctctccattctgtgtgtgtgtgtgtatttgtatattcttaattagatagatcctccagggaggaaaagaagtagaaacagaagctgagcgagcgatcagtggattttgcagaccttctgacccatagaggtggagtccagaaactgcttcatgaacaggaaactcttggtgctgaccttgaacaaacttacttaccttctcggtgaacaagcggtttttaacctacagggctggaccaccgtagagctcacatatcagataccctgcatagcagatattcacattacgattcacaacggcagcaaagttacagttgggatgtagcaacgagatagcatcatagttgagcgttgccatagcatgaactgtattagagggtccagcattagcgagggtgagtaccactgctctagaatgttcgcacgacactaaagtgctacctacttttccaaaacaaaagtgactttgagatgcattcattaactagcagtaaagaagtataagaattttttttaacgaaaattggtcaggaaataatccgtaacaaaaggaggaagtaataatgtctaacacagcaggtgagggttttcccttttactgaaaatagacttctctttttgatagatttatatcctgactatggtcccctaactcttttcaccccagctcttttctaccttccatcctatccagatattccctttctgtcttgctcaaaaacaaactggcttctaaggaataatacaaaaagaaacagaactaacacaccgcaattggatgaaacaaacagaagaaaaagaagcccaagagctggcacacaaaacagagacaagctcatgtgcacactcagggatcccttaaaaacactaaatttgaaggcataaatgcatatgcaaaggacctgttgcagacccatgcaggcctgcacatgctgccccagtctctgtgaggtcatgtgagctttgatcttgttgacttggaaggccttgttttcttggtcttgtccatcccctctgggtctcagactcttcctgcctcctcctcttggggttccctgagcactgaggggagggatttgatggagacatctcatttagggctgagtgttccagtatctttctctctctgaataatatttggctgtggatctccgtattaggagttattttattataatgtatgtgttgtttgtttgtttttataacatacatatttgtttttttccctaggtccctgggctatctagtctcaggttcttgggtagcgtcaggtttatgttctatcttgtggagtggggctaaagtcaaatccagtattgatgggttgctcccacaaactttgtgccactatatgcactagctcatctctctagcaggacaccatcatagatcaaaggctttggggtagaggtgaggtttacctttctcctttagtagcatgcagaatatcttccagtaccaaagatgttggcatgtagggatgaaggctctatgtaggcactttcttcttgctctcaacttctctatattcaatgagttgtgtgggtctcagtttgtggggagcaatctatagtcttggcaacaggctgcattgtttggggactcccatgcaactctttttggccaacgattcaattagatgcaaccccatccaggaaaggaaaacttcatttgatgacaagagatgttcacttgtggctctgtctccccccattatttggctatagatcaccttcatgtatgcttatactttaggaagactctgctaggtttccatacctctcaaatgccctttaattttagctgtctctccctgtattcccattcatcgtcttcctttcccctcccccacttgatcttcccatcataactacctattttattcctcttccttaataagatctttctgtcccctcccctagtcccttactctatatctaacccccgtggttctaaagattctggcttggtccctgagttaactgctgtgttatttgtcatagtcatttaccttcattctccatttgggaaacgaagccagggacattcccctcatcaggatcccaaagcctattatctctacctctgctgtggtgattgtcacttcatgtatcatatatgagctctgtggagggacctccctcatcagaatcctagggtgtgtacctcctctgtggtaattaccattcagaggccccagaagccccagcagacctgtcactgacaaaatattgaaagtgaaggcaaaatggtctttgtctccagcaatcagccaaagtccaattcaatacagagttcagaattccttccagggtgagcagcaggcagaaaaaaaaatctcacttgacctgagggtgtgactgtggaagcgcccaggatggggaatgcccatttatgcaatcaagccctgcttggggccccttctttcccccgccccccacccccaccccgctcaggccgcctgtgcagtggtgagtcagtgggtttccccgggagaccagcagaactttctcgcaacccttggggctttacgaagattgtgtttggtccctcaaaagaaaaaaagtgacatacacgtgttcaaagcgatttctgggaagacctgaataggagcgaagcggtttgtgcgtgccagggggcgggcctaggcaaagtacatacccagaggcagtctagagctggtgggtggggccgcaggctgcccacacaggccgcccgctgttttcccttgctgcagacatgctgtggatctgggctgtcctgcctctggtaagctttgggacgcctgggatgtgggacgctgcatactggggaccaccacatgagattccagatgtggctggcattgggtgccaccggtccagatgtttagaaacgcaggggagctgctttcgctcttggctaagtgctcagggctgaagcccaagtccagcgtttttctggaaaaagtttgggtcggggcggggggcgggggcgacggtcagagcttggtgctggccagctcttggatcgatcgctttagtatggctggagagggactctggcttatagacttgcccagacacttttctagtgccactttagggcactagaaaagttcgctccgaggctccctggcatttgacacttctgacagttcgctcaaccgggaagtgagttactctgggctgtatttacaagccaagcattagatcataaaatttctcaaagtaactttgtctgcgaagatttgtttactctcctgtaacaacacgggaaacaaaaaaaaccttcccttccgggaattgagctgtcaaattgtggatggctgaactggtggatatttttatattgtttgtactgtttcttctgttaccctctttctgctggcactctcacagcagatttgtcccagtaaccctagggctctgagtcccagctcctccttgtctgctgcaggcacagaagtaagaactctccagcattcggtctcttcagaaatgcctgttaataaatgccagtccgagggattcgaccctccgaggttcaatccagttctgaatttagaaagattgctttatcaggtccctaaaaatttgccgggcacaaggatctcaaatcggttttcacagcagtggtagaagggaggaagacaacctctccttacttttacaaggttaaaagaggttccgagagcttaagcatttaacagaggtcacacagctagcaaatgacagtgccgggcttcaattgagatctaactccaaggggcatgtacatacacacacacacacacacacacacacacacacacacacacacacacacactactgccccatggtatggttaagagaaaggtttttattgtggatataaaagagaaaatggccagaggcatctggaagagcccagaacatagagagaaagaagtaaactgaacatggccagcagactcgaccagggctatctgagagagagagagagagagagagagagagagagagagagagagagagagagagagagagagatggagcagaggctagagaatagagaaaaccgagcgagagaagcaggcgcagaggtgagagaacagagtgagaagagcagagagagcaggtttttaggttaaatgagtcgctagtggatgggaagcccaggagctggagggagcttgagtaggggtggcagtgagcaggactagcatgcactttgaaatgtgcaacaggcacttgtggtccaagtatgtgctttgatgtgctggttaataggcactacaggtagtctcctatgtcccatctgccagaggtaagggaaatgactttccaatggatcagaggaggcacatttagtcaaatccttaatacaagcaaaccagataatctgacaacatggtgcagagactgtttgcttggcagggcatgtacaaacatgtcatcttgaagggtttttttttcctagcgattcttttccacaacctgatttactgacctccatccctaccctagatccatattgttcttcccctagaagggacagcctgcaggtgaggaatattctgaatgggaagagcccatggttagagataggagcaagctctaagagcaaactgagagagagagagagagagagagagagagagagagagagagagagagcaggcagggagacatcctttagaagcacagtcatggggagtggaagaggcttagggaaacaccatcagagagaggaatctaatctcttagaggcccaggggtgcatacagaaatgcctgatgtacctgcaggtctcaaagagcaggttccagtgagacaccatgagggatagatacaagcaagcatctcctaggggaaggagaagagagacaagcagttagacagccttagagacacagtaagcttcaggagggagctacctgagagacagacctaaggaggcagctggaagcagagagaggaaatggacaagctagacagagcaagctccggggtggagctcagaacatgggagggagaacagggtgagagaggaaatcagcaagtctcttggtgacaagaatttcaattctggacatccgcaagtggtcagggtgtccccaagtgggccaagacacttgtcagagagaaatgtccaaaaatcacaaaggataggcatctctttcatgtaatggggtcccagtagggagagagaagctgtctgataaaccagcatgacttctgtagcaacagacagagaaggaggcttcaaggaggaaataggtagaagtaaaaagccgctgaagaagcggggctctaaaatttggagttggacctggtaagtgtcagaaaccagaagaaacaagtattctataccttagaagagtcaagtcagaagcttggtttgcttaggagaagctgagccccttgttgggcaccagctatataaactgtgacatgacttaaccactctacgtgtggtgaagggggaggtctttattgtggatatgagagaaagaagagccagaggcatccgaaagagtgaaaaccagagagaaagaaatagacttaacatggccaggagtctgggcctggtcataaatatttgctaaaaaggacaatagtgggggatggggacagagaaatcagtgagagaagcaggggtggggtggggctcagtgagaagagctgggttaggagccctatgagtgactgatggggagggaagcccatgagctgagggcagtttaggagaggggaggtggtgagaagggctaggatgctggctagcatgaactttgaaatgtgtaacaagtacttgtgataccagcatacactttgacatactgacccttctgccagagataagggcaatggactcctttggctggcttttatctaatttccagaaatcctataggccaggtagagctcatttctagacagttggacagctgaacggtcttttggagtttgggggggaattggagtttcttttgggcacagcagtttgctgatttgcatctgatatctagaatataccaagagtttggaatggtaaaggctcttatacttggtaccttatgaaggggtggaaaaaaattccttttggttctttaagaagcgattcataatatttgtccttcagaaatgtctttaggaaattttgagactctcctcagtgcaaagttcctagtccccactccttcactgtagtatgggtggcctggaaaagctctcagctcttagagtaacattaatgaagtaacaggaggcaaaaggcctggagctatgctcagcttaggggtagctgtgtctttaccacaggatgtgtgcctcaagcacccaggaaacagcctttctaaaagaagacacactcatacatgcatgcacatgtaaagtttacacacatactagtacataaatgttaaaattaagtataatttgttatatttatgatttatggcctaggaaattaaagtttactagacagtattataaagtcagacaagtaaaattgtaataatgatcctgtcacctccataatccttgcggcatgctatagtaccttgcatccctcccatgagacgcagacgtgttcttactcagaacgtggacttgcccaacaccatgcctccatttttctagcattgtgttacctcgagtctctcctaaaatatgactccacatgtagtatggcttcctcagttgtagcatgtgtgtgtatgtagtgtgtctctgtgtgtatgtgtgtagtgtgtgtgtgtgggtatctgagtgtgcagtgtatgtgtatatgtttctgtgtgtgtatgcctctgtgtgtgtattaccaagtggtcactagaaggtttaccctgcagtttttagggatggcacccgatcacacactagacagctgctttcctcatatttcttagagcagatgttaaaaatggctgaagaagatgagaggtgatttagaaagcaaggagtaaccctacagaagcatctcacaactgtgggtattttggttcattttgaaaggtgggcaaagacagctgttgattttacacttcaatcattttctttaaaacaactctggaaacatgaaatgtttttttgatttttgaaagggctttatttatcccagaagggacatgaaagttttatgaatacaataaggagattaaatataaattaaagcactaacaagtgtggaaaatccaagttttgtgggttctgacgcattggatttgttttctaactaagccatcttctcagcccaaaacccaagttttaaaatcatagcaagactgagaagcaagaaataagttgatgtctggaggccgtcagcatccctctccaaatactactgctgtttacaatagacagaattattgcctttagagccaatggagactttaatgtacgatttttctttttattctgacactgagattacaggaaggtcaaaggtgataaagaactgacaaccagagcctgatactacttcttagtaagctcttggagagcaaatagtctcggggtgagagctgccagtgtatcagaggccgggggctccaggatgctcaatggagaagccaatcgccacaatccggttgctggctggaaagaatcactgtttttcagagataattagaaacttgaagaaggaaatccccctgcaaaagccccttctaacttatgtgctgtgggtgaattctcttggttccaaaagtcccgtactaagcacatgttttatacgaggtgccagagaccacttactaaagagaaacaaacagcatgggatttaaagatgcaatgaaataatgcaataaaaattatcttggagccaggtttaagatagtgaatccatctcttcttctttttgagtaagtaaatatttaaaaattgcccaaacagtgtgaaattaaacataaattctggaaaataaagtcattttttaaaaaatcagccttatgggaacatctaaaaattttacttacagcttctgagccttatccacacaggtacataattgtatgtttaatcagtgtgatgtatgctctgttctctgacactcaatatatatggtaaccggcttatgtttcttaaggtaatgatcacctcatgacattttacttgatattttatagagaaggtatttattaaatgaccttgaattagcataatttcatttattaattttatattttataaggaaatgttttgggtgtaagaagtactttgatgatagtgtttacctagcatgtaccaggcctgaatttgatcccagcacaaacaagcaaataaacaaatcagtcaattccacaaagaagaaagcagtgaatagaagtgcttgctggcaagtcttccaaccagagctaggtccctggcccccacgtggtgtaaaagagagctgtcttgcagcttggacctccactaatgcagatacactcacagacacacatgcatgcatgcatgcatacaggcacacatgacacatgcacattcatgtaagtaccactgcctgtagtcttgttttatttttgctgtgggagcacataagtgtgtttgtataactcataaaagcagaaagaaaacccacttagttacctaccagtaccccactccccaaaatccttgctgtcaaataggagagggggcttgggagctggctccatctcaaaaactgccgctatgcaagtacggagttgatagttgtaatagcaagcaatctttcctttttaggaaggaaatgactggccatcttctctaaccactgctcctccatgtacacagctccatcaccccacagtcatgagaatttagaagcagcagccacaatttgttcaagcaattgtccaagccccactcagtgcagatgcttggaagaggcagtctctgtgaccatcagggctagcagagtatggtcaccaggaggtaagaaggcaattcagttcaacacagctaagtagccagtgtcaattcctactttgggagtctgaccctgagatgtttattttaggcacatggcaaaattgggtgaaaactttcctggtgataatttactcaggactgtgtacacaacaaagcttaagacatgactacacagaaagttccttatacaaaatatgtgacatcttccataatgatgggttctatactacatgtgatacctttcataaagattgggtttatagattgattagcttaccataagggtctgggggagaatccactgtggttccagccatgaggcataaagtacataaggcaatgcagatgtgtgtgtgtgtgtctgtgtgcaaaatttttgtcaaagaaataggctatacattgtttgaaactattttaacacacgtagtatgctatgtaaaatacatagatacgaatttatttatacactgatctttattgttagttggaaccatttaaatggtagatgttttttttatctatgttggaaaacagaatagggctagtgtagcacacagggctgttcccctacggcttagtccgatctggcccctggttccaggtgtggcagcccagctcaacaaagtccactcccacttagctatcctgactctctggatcactgctagagctcaagcatttttaccaaactgtaccatgtatgattctggtatttgttagagcttttgtgtattacccaataattctgacatctatcggggtttctgagagcagttttaggaagtttgcttttaaagtgtccataatgctgttttccatttgcagcatactttgaaaagttcaccttattatgtaagtgttcttgcagccataatttgcgagtgtagtaagataaaaaagaatgcttctagcttatttaaaatgcatgctgatggcatgatctggaagacagacaacccaatttgaaagggacacaatttaccctagaacctatgttttcacccctctatttgaacttttggagttaaaaatgtttactttcaagttgtagatttgaaagcaaactttctaaagtgtgagtgggggcaaaaaaagaatcttctccaatactttcccaggaggtaactaagaacattgcatcattagatttgtctttttcctcctatttattaaaacacacacacacacactcaaacaaaacaaagaaacaaacaaaaacctgattcacagaagacagtcaatccacacttctctccaggtgtaaaagcaaacatatttctttattcccagttctagagaagtactgagtgtcaactaagtcactttattttgctgtctcattgataaccggaaggacttgtcaggacatgggtaagaaggcacagcatatttttatagcaagtattgtgtagaaatgatgtccagagacacatcagaaagaccactcaccatgaactgcagtcacaagtttgtaaagtttgtagtgaataatgtgacagagctttctattcagtcaacagttctttcccgtataactttaaacggaccctgtactttttgtccagtttgcttaaagaagacagactttccatcacgatgaagcaaatctggtaggtccagagatggtagagctggactcagagcaccaggggaaatagatagctctgaccacacaaagtcaagcagagaagaacaactaaaaaggggttgtatttatgatccttaattcagcaagctgatagtactgccatcaaaaccaaatgacaaaacaaaacaaaaaacccaaaaatgttcatgaaagaccaagtggtactcactcaaacacaaactcttttcatctctgagacattaggtggttcctgtttcagatttactactgttatctcaaagctcctaatcttatccctgaacacaaaccagaaacctttgcagaacttcagacttcatacagtcttgcagcccccgaagttgcctcttttcatttgttgtacagtgaattcatactctgagcaaccagcatcattcacattttgatgaatttttttaaaaagaatttcttgtctttattttgttttgtctttgttttgttttctgttgtttctccctctcctctcttgagacagtatctctgcatgtaggaaccagtctagcatcaaactggcaatcctcctgcttcaaactccccaggatctgagatcataaacgtacactgctatggctgggtcagacatattctcctctcctcctttcctcctcctcctcctcctcttcttcctcctctttttctcctcctcatactcttcctcctcctcctccccttccttctcctccttctttccaaattcctcgacttctagaccaatagcatagccgtgttcttctgtagtaactgtgcactatcgtcttactgaagaagatgcccttgtggctttgactaggagtaagattttactgattacaatggagacaaggcttcactgtgtcactacagagacactgtgtcaccgcagtctgccttcagtctatgctggtgtcagaacagtgtggaagagtgtggctgagccaggcatctagcaactcattcttgccatttacagggctgacattttcactacccaaaaccttttttccctttccacttaaaaaaataaagtcttatcttgtttgttttgaacctgaaggggggggagtaggttctctctctctctctctctctctctctctctctctctctctctctctctctctctctctctcaaatctagtttagccctcaagatcctttgccctacttagccccaggcaccagccatatttacaggaggttcaggtcttcaagtaggtagcttatttcagtcacctgtgtgtcactgggctcgtcactggcttcttacttcttgagtgctgacatgaagatgtagtgagcttgtcctagagggtaccatggcacaggggccagtcctcctgggtgtgctcattcctctaccatgtcttctgtttgataacttgagtggctctgaaaagcacttctccactaggcttcaggccaagaaaatgcccactggtatctgtttctcataatctgttaacaggtacccacgattgtgggattccttgtgagaattccaggggagaaaatgtgaagactcaggcatctatgttccagatccacaactctaccagacacactgcaatgtagccatggctgttcataaaatgctgctccacctggagagaggatcctcaaactgaggttggcaggcaagcctcctatccctccacatcccagtcacatctctgactttcgtggctctcctacatttttccaccctagactaggttcttgagcccaacttctggacctgagagaaatcttctcaaaaatctccccttccgccaagcatgtttttgttttgaaggttcctcataaaactaacatgctgacatttgtccagaattgtggaaaaacagttactagtgtgcctaaatgaagcaaaagcaatgaaggaaatccttacaagcatgcatcagagcctagtgcaggcttggaacagaagtgctgaactagagtcctttgtgaagcactctcaaatctgggcttttgggaaagtcatttctcaaatgttgtgttcactttcaactatagctaagtcagcaatgattcctcgtgagtactttgctgtaactgaagaggtggtgcatgtgaatgaactgaaagggccaggcaagtgtcacaggcaagatgcaaataaggatggatactctcacatcacatgggcgcaagagattcagaaaaggagagagaaaaaacaaatcttctgatttgcaggagtgaagattagactacagattaaaatctgtaggtaatgaaagattcaaagagatactctttataatgatttatttatagttgtgtgtatgtgtgtgtacatgtatttgtgagtgtgggtgtccatggaggccagagagggttacagatctcctggtactgaagttacaaggggttgtgagctgcctggcttagctcctagaaaccacactctggtcctctgtgaaaatggtgcatgtactttaaatgtggacccctctccagcctgaaggagacccatttttaaaatctggcttgaagctgagcagatgtcacgattcctttctaaccctgatgttccaaggctattgtgagtgcagcacaggagatatagacgtcctctgtgactgtgagggccaaagcgctcattccctttgtgggttgggagccctagaaagctagtccccagcatgactctcatgcttctcccttatatagcataggctctgtaacttttttttatgctttgaagttgttttgttatttgtcttattttattaggtatttatttcatttacatttccaatgttatcccaaaagtcccccacatgctctcccacccactcccccacccacccactcccacttcttggccctggcattcccctgtactgaggcatataaagtttgcaagtccaatgggcctctctttcctagtaagccatcttctgctacatatgcagctagagacacgagctctgggggggggggggggagggtactgggtagttcatattgttgttccacctatagggttgcagatccccccagctccttgggcactttctcaagctcctccattgggggccctgtgatccatccaatagctgactatgagcatccacttctgtgtttgctaggacccggcatagcctagcacataggatgtgatgaagacatcccactaagagtcgagtgctccaaagtctctcacttcagacactgtccagttatgggactctgggttactgtacatctactgtaagatggggcttctagggtgaggttgagagatactccaagccatgggtatagcaacatgtcattgggtcatttgattgctatttttctatagcacaatattaataggttttcccctagctgagaccactttttcttagtgaaaaacccctcactcaaattccctatgcatcctagcttcctttacttatttgtaaagtatgatttcaccctgacaaacccattacctttcttcttttatttttatttaattaatttatttatttatatttctagagacaggcttcctttgtgtagctcagctgtcctggaactagctctatagaccaggttggcctccaactcagagatccgtctgcctctgcctccccagtgctgggattaaaggcctatgccaccattgcttggctacatttctttctttattaagcatttcctccctagagagggttcatattttatgtcaccctgcacacagagttttggtcagacactctgcaagtatcctgagatgaacaattaaattgatatgctgtgagtaaaaatgataatcctctatattatgtatagatgcaccccattcagtctgctgaatgtgttaataaacaaacactagcctgctcatttcttcagtaagaaagatttccatcctcagactgtcataggacttgagattttgatgcagattttctggttgatggtccataccatctgatctgagggctgacacagctaattcttaaaacaccctccacacacaaacacccgtctgcatgccatgcgtgaatgtgttaacacacacacacacacacacacacacacacacacacacacacacacacacacacacacacctgtgataaatttccatttccctggtgacaaatacactcacttatatatagacaatgctacaagagaaaatgtatctttccactgtttttccgaggcacttaccagaccacacctgacacacagtaggtactcaacagtacatttgcttgtttgatacttcgtttagtagactgtgcactcaagactttaaaatggtttacttgtcagacatttaactaactcttgtattcccctcttttccctcctatccttggtcatagtttatctactttcttgctatgaattcattttctgcttattctgcttctcaaacaaaacaaatcaacaaccacccactcagaacatttagctttgtgtgggtttcctgccctatcatagttgaaatgctcctgtttctgcctgaatggtttcagggaaatcactaaattctgcaaagatgactgaatgcaaaaaaaaatgtagtgaaataataataaaaattctttaaatacaaactgtgtggagcatggcttactttgcctctctttttggcacctgacacaattcattgatgtcgtgttaagtaaggaacattttcagaaggactctgaagtgtgtgtgagaccacatctgaaaggcagttgctgctggataaagccagctggctgtgtctcttcactcctcttgacctcagaattcatatttctcgactctggatgcattttagacaatgtttccctgtcctcagtgctggggaactaggaccccatgcacttttggcagtatgacacccttgagctcctttataaacaacaacaaaagcaatatttttattttgagatgtcccccctatgtcactaggctggcatggaacttgcgtagaagaccagcagacttgaacttgtggcctcagcctgagtaactagggctgtaacactgcacaaccaggcttccatgggtgaggtttgacttccagttcaggactttaaaattaaagcagaatgaagttgaggagagaggtatatttcttttagaaagcttcaaaagatagaatgtgtgcatactttttttttcatttttattagatattttctttatttacatttcaaattttatcctctttcctcatttcctcctccaaccccctccatcctaccgccccaccccctgccccacctccattcactaacctacccactccagcttccttgtcctggcattcccctacactggggcatcgagccttcacaaggccaagggcctcttctctcatgttccacaaggccatcctctgctacatatgcggctgaaaagcttgaattcctcctgtgtactctttgcttggtggcttagtccctggggatactggttggttcatattattgttcctcctatggggctgcaaaccccttcagctccttgggtcatttctctacctccttcattggggaccctgtgctcagtccaatggatggctgtgagcctccacgtctgtatttgtcaggcactggcaaagcctctcaggagacagctacattaggctcctgtaagaaagcacttgttggcatccacaataatgtctgggtttgggaactgcttatgggatagatccccaggtgggacagtcactggatggccgttccttcagtttctactccaaactttgtctctttatgtcctcccatagttatatagatccctcttctaagaaggaccggaagtatccatactgagaaagctactagtagcaacaacccatagatgtaaggtgtctttctgctctgttaacttgaatatttatgcacttgtgaatccctcagctgttgcttaagattttcataccaaagacaggctacaaatccacagggcacatacaattgggcaaaagcttcttagctttgtcattttttgccctagcctcaaccctataaatgccctctctttgaatttcaatgtgtcattttcttgtttctatggaaaaccagaattgacaggaaagagaagcaatttttgctgacaccagccttactccttacctcaaccaacgtggctgttgctaggaatcgttactcctcctccactcaatgggttagactcagttttgatcattgtcaccaaagaatattgatcgaatgctcctagcctttgaggtatttctctgacttgagatttctttttctctcttgctcaagtctccctaacctgcccacgtgtgtatttgtgtgtgcatgcctgtgtgtgtatatgtataagtgtgtgtgtgtatgtgtgtgtgtgtgtgtgtgtgtgtgtgtgtgtgtgtgtgtgtatgtgtggtgtgagtgtgtatctgtctgtctgtctgtgtatggagtttggaggtcaacattaggcatttacctcaatcattcttcaccttattttcttgaaagaagtttttcactgtgtctagaacttgctgagtcactaggttggcctgactgcactcccaggaatttccctgtctccctctttttccccagtgctggcacatggcttcttatgagggttctggaggatccaactcaggtcttaatgcttgcctcccaaacacttcaccaactgggccacctcccagatctagtttatttccatgtgttgccaatttctggaatgtcaaatggcttagttcatctctcattggccagcaggactttgacacagccatagagtacagagccataagaatttaaatagcttttgtgcaaaacctctcttatttgaacaattcatgttgggcatatttcccaataaattactattccctagtgccccccagttctgtcaccatagctgatggctatccaatctgaaagaagacccaacatccactggaccagtaccctatctattgctgctgagaaagcaagagacagaaactgccattctgaaaagagaagttgatgataataaatatagtttatttaagctgccctgttagagatgtcttaaaggaaggagtacagatttgagtgtgttttaaaagcaataggttgtgggtgtagcgtggtggctgataacttgctagattccatgaggtcctgagttcaattcccagcaccacaaaaggaaaactaaaaggacatgcaaatataaagtgtgaaacatccctgcacattatcttgttataaagcacacatttatgtgcaagtctgcctttgggaacttacctttttcccatcagtaattgattatatttatagttaccagaacgtggcttaacaaatgtctattgggttgagctgacaatactttaggcacggtgctggcattcttaggctcagttcttctcatctttgtagcacttcttcttgtcatttacacataattgctcaagtgcagaaagtcagtcttattttacattatgctcattcatctctgagtacagggaaaaaacactatactgagagctggaaaactttagagacattctagctgtccctttttctagtgagaaagtccagacaagtccaatgtttcctgaaattttagtctcacttttccctatttgaaacctggatgtcagagatgcatcctaaaatacatctatctcagaagaaaatgtggctaccacagaggatctaaaatgtacttagagaaatcctaacaaagggaccatgcagctgttacctctacatgctttagtattttttattttttttgcttattttcctaagcaaagataaattggaaataattttgtttgggattatgggtttatgtcttcaggagaaaagaattagacatagatttaaagatttgttctccataaagaaaagaaatattacacacacacaagggtaaagagatttctaaggatttagtgggaagtttattgtatctttgaaacagtgagacattgattctgtgactgggtagcaagaaggaagcacagacatactctgcctaagaatcaagtctgatctgagtgactccttatagcttcatgattaacctgtaaagacagaaaatactcatctcattaacaagtgaagaaatcaaggcacagaaaagtcagtcactcttggtagaaacaaggtttcaaactctgtttactttgatttgttttcccctctcttttgttgtggggacttaatgtcagtagtaacagtagaaataccactgctcacaggaaacatccttactaattaccatgcattgtgctcagagctttgaatgcatggttctatttaattatcactacagacctgtgagacagtgggtatttctactgttcagatgatgagtcggagcctgggaggcagtatggattctcagacctcccctccaccacccatgtatggaacaattatgtagagtcaacgctgtgtttctagtgtgggctagaaaaacctgcggttgaacctgccaagccacagggtactcatctcctggcaaccaccaacatgccttggtttagcctgtacacagatctagtcacttccaggtgtgtgacacgtatttcccacgttgcttggttcagaaatcactaacatccttattctgcttctcctttacaggtgcttgctggctcacagttaagagttcatactcaaggtactaatagcatctccgagagtttaaagctgaggaggcgggttcgtgaaactgataaaaactgctcagaaggattatatcaaggaggcccattttgctgtcaaccatgccaacctggtaggtcacatgaagcattcagagatgagcgtgagaagcagggtgagagattgaggtgcccgatatggaagaatgtgttggaccattatgcagctattggctgtgctatagggtagagcattacaaagaagggggagcaggactataaaattgttttccaagcacaattctttcatctttatcatatttgtctgggctgcttctaaaagaacatcatttacagatgatgtgcatagctgaagtgagaagacgcatttttagttctatttctcacaacctaaggaaaattcatttgtgaggattaaaaagcctaaggcatctcaaagctcaccatgctgtgcctgactaatttgggggctcccttaacaagagatttgtaacctcaggggtatgtgttagagctcctctcttcagtctgactctaacgttctctggcctggcactgaagcctgcaaaaactacatttccattttttcagctgaataaccagaagaaccagaagagcagtgaacagcagccaacagtttctcaaacatcagtgttttgaaatgcaaatcaatttcagtttggaactctctcacgcatcagaaaatgagaggctaaggggagcataattctgtaaacttagtttccaccttttgggttgaccacagtcatatagaattatctatcttggatgcactaggcggataagaagttggctcagtggcatataggtttgtttgataggtctcaggcaatagactttcaaaaagcttccgtaagtttcatcgttagcatctcaggcctgtggtactcaaagtgcaaagcaggttaaggtcacgcctatacaaagacaattttactaagcctagcaggaaagtttttcttataatacaacccacgtatacctaagctcctaaacacttactcttttccaaacaggaattggaaatcatcaactggcttttttttttcttttaagttgtcatagacaagcaatttatgagttaaaatctgtgtttatactttgaaagtttgatacaaactatactttacatgcttaaaatttaaaagaacaaactaaaacaaaggcaatgcgttttgcatattaaggtttctaaaacttttgtctgtgtgctttgttttactctaattttgtcttgtttgcatttaaaaggggaatcttatgcctggtgtttggatctgaggatgctctcgttccactgtggggtgtaaatggtgcaaacatttaagaaggaaaagggaacatgggtggagaacccagcaatgttttttttgctaatacagtaatggattaattgatctggaaatgccttaaagattacaagtattgtgtatatggcatttcagtttgatacccaacagtgtagggtttggcttgtaaattctggagtaatagaagcctgggatagtttgtattaagcagattctaagtgcctcagcctttgttttatttttctaacttagtccttagttgtacgatttcttttagcaattgcaacctggcattctggctgtgttaacagcttttctctgtctcttcactaatacatcccaactgccattccacacgcactcacagctctctccacctgccttctccctggttgaatttcacatttaccaagagttaagttagtttcaagtctgtttacagcattgatgatagtaacatagaatacttattactgatgataaaaacccagtgaatatcaaatattgggaaatgacaagttttatttttttttttaaagaaaactaggctgagcattttggagaccatcagaaattcagcccgttggagtgattcaactttcttttcatcaaaaagaagagaattgggagaagggggtggggtgggtaaagaagccaaacggaaattgcagggggtgatttgggtggatgcaactttaatgaagagactataactcatctctatgtcaaacgattgacatacttatggagagactctttaaaatgaaaacacaatatagacttttccagtgattccatctgtgaactggtgcttttgattgattaaaatacactgtatgcttacagcaatttttaaaattggaaatcgattcttcttctttacaatcatcccgaccacagtgtcctctccttccatgcttcctgtcttccctccccaccaccagctgcacctattcccttcagaaaagagcaggcctccaagagacaacaaccgattatgacaacccagcaggaggaaagcagagtaggcaagagagtcagagatacacccgctcccactgttaggaatcccataaaaactccaagatgacagccattacatatatgcagacctggggcagacccaggagggctctgtgcttgcttcctctgtctctgtgagctcatatgatccctgcttagttgactcagtaggccatgttcccctggtatcctactctgcctctgcctcctacagtcttcctcccttcccccttccatgaggttcccggagctctgaggggagcaacacaatggagacctccaatttagactctttctctgcatagtatatggctgtgagtctccatacccactcccatctgcagctggggagaagcctctctgatgacaactggacaaaggacccatctatgagtatagtagaatatcgttgggaatcattttattgatttttttctttctttttnnnnnnnnnnnnnnnnnnnncaggtaccagcttgacgtctctatgttcaaagcagctgggtggatgttgtcctcagcaatggtggcctccccaccaccaccaccccacacacacacccgtcagcttttggagagcaaccctctgttctagcatcagtctgggttgtttaggaattcgcacaggaccccctcaggcaacaattcaaccagatgcaacccagttccaccactggaagccttgcctggctagaaaagatggccagttctgactctgtatcctccattacttggagtcctcactaaaatcaccctcatagattccaggaagagtccatcacactaggtttccacatcgccccaaaatgtccaccaattccagctctctctccccaaactctctccctccatccctccccatctccaacctgatacctcgcactcccatccccacccatcccagtccacctgcaaaatatattttgtttcccctttgcagagagatccatgaatctcccccaagagtcctcctctttaactaatttctctgggtctgtgaattgtagcttgactatcatttaattaatagctaatattcaattataagtgaatacataattgtgttcgcacaaataccatatttgtctttctgggtcagggctacctcactcaggatgatgtttttctagttccatccatttgctcacaaatttcaagccagaaatttttaacatctgagtactactccattgtgtgcactaccacatctttcttttttcatttctctattgatagacatctaggttgtttactggttattacaaataaagctgcagtgaacatagtggagcaagtgtccttgtgatagcatggagctttgttggggtagagcaagagtggtataactggaccttgaggtagattgatttcctattttctgaagacctgccatattgatttctgtatggctgtacaagtttgcactccgccagcaatggaaaagtgttcttgctcctcatctcaccagcatgagctctcacttgtgttgttgatcttagccattctgacggatgtaagatggaatcgcaaagtagttttaatttgtattcccctgatggctaaggatggtaaacatttacttaagtgtttctcaaccatttgagattcctgtgttgataattttctgtttagatctgtgtcccatttgaaattggattacttgggatatatatatatatatggtttcttaacttctttatatgttttggatattagacttctatctgatgtggagttggtaaaaatattttcctattctgtaagttgctgctttgtctaattgacagtgtcctttgccttacagaaacttttctgtttcatgaggtcccatttatgatgtttctgattaagatgcactgtatacaaatacaaaactttaaaaaataaataaaaatttaatacttgaaaagcctttatcacattttgatatccagtaggatgaatccaacagtgcattttttatattatatacacacatatatacatacttatttgttgcttctatatgtgtatgtattgtgtatgtaagacatacacacttatctgttgcttctatacatgtatgtatatatacacacttatctgttacttctatatatgtatgtatgtatatacacacacacttatctggtgcttctaaacatgtattatgcatgtatatgtgtgtgtgtgtatatatatatatatatatatatatatgtatatatatatgatannnnnnnnnnnnnnnnnnnnnnnnnnnnnnnnnnnnnnnnnnnnnnnnnnnnnnnnnnnnnnnnnnnnnnnnnnnnnnnnnnnnnnnnnnnnnnnnnnnnnnnnnnnnnnnnnnnnnnnnnnnnnnnnnnnnnnnnnnnnnnnnnnnnnnnnnnnnnnnnnnnnnnnnnnnnnnnnnnnnnnnnnnnnnnnnnnnnnnnnnnnnnnnnnnnnnnnnnaaatatatcaaggcagttgctatgtaggagcttttaacattttcctagcttttccaaattttctgcaataaatatgtgtgtgttactatcagaaaatgatacatctagaaaccttatgttcaaggaaataaccatttatttttttgtatttttgtaaatttagattgtgcactttagaggaaagaatctgaggctaattgtatccatataaagctaagcatgctctactacctagctcatgagatatttcagttcccttaaacagcagtgctgtgccacctgcaggaagcgcagtgcctcctctgttctgctccccctgcaaagcactactgtggggctgtctggctctgaggcgctattttaatttgctccagactctcttgctttactttttaaaagcagacttgcttctgtttactaaaaggttacaaaaggtcacccatattttcactttactcattgacttatcaagtaaataattgtgcttcgtcagcaggaatcctatgaggtaattcaccaagccgtgccctaggaaacacagcatagattccatttgctgctgtgtccatgtggagcagatttgactgcgtttgtcatttgtattcctggctagagttaattgttagttacactgttaatgcctagatttgctagttactgcatcttgctacatttccctgtacatttgctgcactgagcccattactcactgaccctagcttctggctgcaccggctgatgcttagcatctctgcctgagaaggtgaaggccctggaggctaatctcttgtcttacttctagtgggatttccttcagttcctagaacatccttagcacgaaacaggcatttagtaaacgcttgtgaaatatgtgacctttccaggaggcattgctctataatgcttaatcatagaaaaagaatgacttactttaataaatcaaagcaaaagatgaatgtgtatttcaaattgttcgtgataataacaaacaaatagtaaacaaaatttattagaggtttgtttttgtctacaaaagaagtcctgtgttcctggaaaagaaactgaaaggggagagaagaaaaactgtgaatatttattctgtggcctgggcatggctctgaccataaagacagagaagtcctcattatttgtgtgacaaaaacttgggcttacagacatgaagtgctctatcaaagatttcacaactacttcaattttgatcaatatttctagaaacttccagtgctctttttcttaaactgcattgtctatgagcaggttttgtggactttgaaagacaaaatgagaatcagaacacagtgagtttattcagtaatctcagtggccaaggacagccacctccatgatctggcctctccttcctttcacagaagtgcatctggtcacttgaattgaccctttactcatatgttcctgtggctaactatcctactatttttttttcttttgagacagggtttatttgggtagcactggctgtcctggaactggatctgtagaccaggctgacttgattaaaggcatgagccaccaccacccagcttaactatcttacttttataagaatattgtttggctttttattgaagacttcctggcttttttttttcttttaactttctattggttctttgtgaatttcctatcatgcatccccactcccctcccccttccttcatatctaccctccatccttccctctcccttcccccttccttcatatctaccctccacccttgtaacctccagggcctgagaggtaatcttcttgtggaagctgtagtgtcaatgtatcccacagtattccctcttgtccacatttctttctttgcaaaagttcgttccaatgacatattggtgtggcacgaggcctttggcttctcttactctgtcagtactgaaatctcactgtgactcctcagatatcctgttgttgccctgtatcatggagatactgtagtttggagtctgtaagattagccccttcatgtattctaacagttcatccgtgggatggatgtggaggtgggccaatgcaaaggccctgatctgggtccgagaggtatctgagctggtcagcctgacagctcccatgttctcacaccctcaggcctggctcagctatactctgctagccaggtgaggtgcgtggcctgctctcccaagagttgctgttagtgagggatatggccagttctgctctcacaatcctgggcgaggtctcatgtctgccttagatggtgatggacaagggaagggaagagggtgtctttccctcatccgtgccaccactcagcagacaggaggtagaactggctctcctccactcatgccctcagggccaggaggctcacctgcatcttccacacccagggccagctctcttgtgttgcccaggcaaggtgcagggctggctctcccaagggcggcagcagataaagggcagggacagatcttctcttgtgatcctgttggggtccagctcttcagcctgccaccagaggccgggcaaaagggaggtgaggggatctctcctttgttgaagccaccacacagcagacaagagacagaactgggtctcccacatgcacactctccctcacccgtaaccccaacatggtgggtcagctctactgtgctgcccaggagagatgcagtgagtgcactgctgagtgccacaggtggtgaggggcaagtgagtatctcttcctgctggctctggatgtgattctttccccaaatagctgtctgtcttttacattgcatttgcatataatcagcctaacacagcatctcctgatgttaagattctttattatcatccttacatactttgcctaatgttaacttggagactgccctgactccagaaattcaatttattccttccttccttcttcccttccttccttccttcttcccttccttccttccttccttccttccttccttccttccttccttccttccttccttccttccttcttccctccatctctccttcctctctttcttcctaatttcctctctttctttctttctttctttctttctctctttctttacttctttatttttttcatgacaggtaaaaaaaaagttgaggactgcaaaatgaatgggggtacaccaacctgcgccccatgcacagaagggaaggagtacatggacaagaaccattatgctgataaatgcagaagatgcacactctgcgatgaagagcatggtatgtatctacaatgcaatttagagaggccaatcctgagcctccatatagaaccatgcagtttgagattggcacttaccctggtccatgccagcatacaggaaggagcggaatgaggctagctgggtaatgtggagctatcttgtaaggtggtaatagattctaaaggccttcacagtgattcttccaaatggaagcaaaggactaaataactcgatgaaaacagatactccagccacaatccaagccacccatagaaatctttcccctctatttctattaaaacttgtctgtagttcttgttcatggcctaacaaagaaacccaaggtgtgggaatgatgtcccttcatctttggggatcccatctatcatcattctatttggggacctgactttttgtagctatttcaatctcttctcaaggccaggatggattttaagaaatgacagaagcagttgtacttaggtttgacatcaagaaaactctgggtatcaaattttaaagctctttttctctcttctctctctttttttttaaaggcatagggcttttacattagtctataaagaagcgatgcagaaccctggctatacattaaacctgcatcaggagctgttgaaatactaatgcttaggtctcagctcacaattaagtcagaatctccaagtgtggcttggacatttgtctgataaagcctagtttaggcttatcatgaagcagcatgatggtgataatgatgatgatgatggcggcaatggtttccaggccatgtatttaagttgcaaggctttctattaaaggcatggcgttgccatctaagcaatggtaggtagtatctggccttctggattatctactcaccaaaggctctttttcatgttggtatttccttttggttagtaaacattgttactaaaggtgtgatagtgtaatagctatatctaaacaaaaaccaaaaaactatgccatccctggccatttttcatcacttattgtttttattattattattatttttagatttatttactattatacataagtacactgcagctgtcttcagatgtgccagaagagggcatcagatctcattatgggcggttgtgagccaccatgtggttgctgggatttgaaatcaggaccttcggaagagcagtcaagtgcttctatccgctgagccatctcaccagccctcatcacttattgttaactagctactacaattaaaactttttaaactggctttccaggtttagaggtggaaacaaactgcaccctgacccagaataccaagtgcaagtgcaaaccagacttctactgcgattctcctggctgtgaacactgtgttcgctgcgcctcgtaagttttagcattcagtgcttaagtcactagctatgagatggaacatcctgccttctgagagtagaaccacactgaatgagagttcggggctgagttctgttcttgtctgtccttcttttgctcagttggcaccaaacgccactgagctcttttaccaaagccatccggttcaagggatgttgctagccacttacggttgtgatgggagacacgtgactgtcatcaaggttttggttctagggcaaagacatccaagttgggggggtgtgggtgggtgaagtaatcaatgcttattgcatgtcagctccttatggtgtctggcacacataagacatttttgctcggattggtgcaagttatgcaggaagtccttttgactgtctgaaaggtgagagtatggaagaggcaggaaaatgcaccagcagctacaagtgggtaggaagtgtgttcaggcagagaaccgcagctttaaaaaggcataagaaactcccatatctgctggagggtagaaaagccttggagcgagctggataaggactttgccttgatgcacaggggttcgcttttgactccaatctggaaagtctggatgtacagcccacttgctgattaattgagctagtttgagcagatcacttactctgtctggacttcagttttctcactcacgaaatgcaaagaatctttaatgaactccgcgcacctgccacatttctctggagacccacactaggtaatatattttgcaaacacagcttttgctaacgggtaggtacatggtaatggtagatcacttgtccggcatgctccaggagtctcgggttcgattcccagcactggaagaaaagtagcttttgttttgtaagaggctgacattgtacaaaatgtttataacggctatttccttggcattccttaaacctgtaactcaccttcagagccttctggctgttcatctaatactaaatctattaatgctagctgtattagagacatgctgctttatattttactattaggaaaagcatttgtgttgcctccctctcccgccccaagtgtctgagagtgatgagaggcaaggtatacattgtggggaagtagctaactgcgttcagcaataacacaatattagctccatatactttataatcacgatttaattttcttctcactggcactctttggggtagatagcataattatctctgtgctgttggtgagatttcagattcaggctcctgcaggtcaactgctttcccacccttgcctgtttaggtttcaggaaaaggtaggctgtgaacctgcagaggttagctagctgaagaaagtcccccaagtgcctcttcactgtcctgagcactgcctgctggggccctgggcagcatcttaggtggtggctaccagcaggcagttttaagggttttttaaacatttttttggaaattgttcttgataagttatttttttaaaatagcttatttttagctcttatatcttaagaactcaatgtgtcaccaatttagtttttaaatatggggcccagcgatatgcatgtgactgtggtgctgaggagggccagaagatgctgctggatgggacttacagaaggctgtgggctgttaggtgtgggttctgggagctacaccttcttcttcatgggcagccaacgccctaaccattgagccagttctctagcccctatgtcttaaactagatttaagattttcaaccactcagtcgcactccttagtttgtgtgaattttagatggcgatctagaaatatctgaaaagacacaaatggcgggaatgagaggacagataaaagtatccctaatctgtaatgtacattggaaaaatggagaaggaatctacgcaggccttctgagttcttctgccttctccccctaggtgtgaacatggaacccttgagccgtgcacagcaaccagcaatacaaactgcaggaaacaaagtaatcctttcccacttccttcctcacatgtcagaataaaaagatcattggcttattattgattgagagaacagagatctgccttgtctaaaaaattactcaatttcatacaaaatatccaatattcgcaggtcccagaaatcgcctatggttgttgaccatccttgttttgttaattccacttggtaagtcctaagtttgttcaaaatgtagattaaagtgacctgagaagtagccactgtgcccattgagaaatcccagaaagccaggctgcgtgttataatgacacccagtaaacctggccttctctgtgcctgtcctcactctacaacctgtttactttaagttattattttaaaaaatcactcctccttattttgtgtctttaatttaaaatgtatgacaacgtgtttccttcaaagattacttaataatatcagtagttaagggaaagctgggtatcatcggggttattctgaaaaaccatctcgctcgaagcacagcaatgataagatacaccaactttcagtgactcagaatcttctagtctctcctgtgttgctggaacaagaagctgtcttgtcaccccagttctcttagtgtgaggatttcctaagaatggcatttgagtctgacagaaatctcttcgatctttcagtatttatatatcgaaagtaccggaaaagaaagtgctggaaaaggagacaggatgaccctgaatctagaacctccagtcgtgtgagtatgcaaatgcatacaacaaccaattagcactttctttaaaacaaatgcaattagcactttctttaaaacaaattcaagtccctccatgcccattttagaagaacatttgaattaacacaccaaagctaatttattactaagttttgtggggtgctacacaaaaaagggtctgcctcctatagccatttgggtctagatggaactggatctgacctgtacacttctttctcaaatagaagaccatccccgctctctactgagctgcacaataaagcatggtattggaaaagatactggaacttgttaaagactcttaccagagtttaataagggaagcagttgttttctgacccctgctgacccagaagagcactcagagtcaccagcagatttaatcaaccagtattcatatgttgccgtcagcatttacaatgacttatttaccaaggagctgtcagcctaccggctgcttccagggaatgatgttagactgaattatcatagcacccatgcacacatgtgtcatcacgggtgggggacatgattaaggagcacagtttaagattaaagccgtgcattaaagtttatgattgtgcgtgaatcccaggtatagttgggttgtttgcattgttttctcaaaacaggggggtgggcttctgaaggcaagcttacaagagatacttactaaaatgaaataaatccttataaggttttacataaatactgtagggagaaatgaaggaacatgtgcctaccagtgtgagctgggtagggatgtgtaatgttccctgttttgtggaaatgcaattggctaaagcacgggactcagatttccaaacccccgcaaagattttgctcttaaaatccagcacgtgggagacagagacaggcggatttctgagttcaaggccagcctggtctatctaaaccaggagggtggaacctttcagaatcaaaactgaatgactgaaagagctcatcttaaccacaaaggctagtttcttttgtgtgtgtgtgtgtgtgtgtgtgtgtgtgtgtgtgtgtgtgtgtgtgtgtgtagtcataatctctggcaattgtatatatttccttctgaatttagaaaaagttaaatgacatgcatgtatgttttttctctctttgcctctgctttttttcttcccaggaaaccataccaatgaatgcctcaagtaagtctttctattattttatttcacagaagtagctttctttatgggaataggcataagtcggaacaggctctaagattttagagtgaaataatgtttgaattgcagtgacactttaggctttaccgttatgtgaactgtcagttctagccaaagcttaaattgatagcagtctcaatttaaaatatacgaagaagcgataaaacagaatattatgagaggttcaagaaaaacattttcataatcagttagctgtatcacgggaccctttggaatccgatcaaatggaaccatgaactctatacatgtcctcatctctgcaacaacatgtccaattctgtcctgtcctgtcccttgacctgtgactcagccataggggtgaactgacctttaaggtttgtgggtttgctcatcaagtctctagggggcattagaggtgatcttttttttaagcttctgatttcatttctttttttttttttttagaatgaacacattttttatttaattaaggaaagcctgttccaaacatcagaagtctctctataatcctctgtatataaaattaggtcatttaacgtgttctccacattgaaagtatatagatagttccacaattaagagcatttgctactcttgtaggggacctggatttgattcccaacatcctcatagtgtctcactgccatttgtaatttcagttctaagggatgtgactccttgttttgattctatgggcaccatgcacacatatggcacatgcatacattcagacaaaacacaagcatgcacacacatacacacacagtggggggggaagggagggagaaataaagaggtgatgaaaggaggggaggaaggagagagagggagagaactaaaataaaaatcctgttaacaattgcccaaattaatttaactgtgacgtaatagaagcaaaagaacaaggttccaatccatggtacaatgtgttagtctgttcatttctattttacaactcacttttattccttatttaaaatagaaaatacatgttcagtatacaaacttcaaaagatgcactagtataatgtgacatgaaatttcacttcttactataattagtgactgtgcacactgtcagtactaaactttaaacacatctgcatatatctgcttttgtagttatgtgtgcatgtatgcctggacctatgttatgcttgcatttgaattcagatttggggaaagtttagttttacatgaatttgtgtaaatttttttaaatgagatataatggaaactatttaaatgtgcaatataatggctttttaagtcatcaaagtaatttaaaatagttaaatgcctcttaaatatacatgataacttctgaaactaaaagtaatatgtactcaaccaattttcaaaatctatttggaacattaaacacgatagaaatagaaaaaaattcttatgaagtcctctatgaaaggaaactgtgacaagatcctaattatacagaaaccattccatctccaagggagaatatgcagtataactgtggtttcatagaatgaattgggtagtgttccttctgtttctattttgtggaatagtttgaagagtactggtattaggtcttctttgaagttctgatacaattctatactaaacccatctgtatttttttaaagttatttttaagtttgtgtggttatcttcttttgggtttgtttaaagaagattacttcttgctttttcttgggtacagtttccttccttgtgttgaagttttccatctactatcctttgtagggctggatttgtggaaagatattgtgtgaatttggttgtgtcatggaatatcttggtttctccatctatggtaattgtgagttttgctaggtatagtagcctgggctggcatttgtgttctcttagggtctatatgacatctgcccagcatcttctagctttcatactctctggtgagaaatctggtgtaattctgataggtctgcctttatatgttaatgaccatgtcaccttactgcttttaatattctttctttgttttatacatttggtgttttgactattatgtgatgggaggaatatcttttctggtccaatctaattggagttctgtaggtctcttgcatgtttatgtgcatccttttctttttttattagatattttctttatttacattcaaaatgctatcccaaaagtttcctataccctcccaccgccctgctcccctacccacccactcccatttcttggccctggcattcccctgtactggagcatataaagtttgcaagaccaaggggcctctcttcccaatgatggccaactaggccatcttctgctacatatgcagctagggacaagagctctgggggtactggttatttcatattgttgttgcacctatagggttgcagaccccttcagctccttgggtactctctctagctcctccattgggggccctgtgttgcatcctatagatgactgtgagcatccacttctgtatttgccaggcaccggcatagcatcactcaagatagctatctcagggtccttcagcaaaatcttgctggcaaatgcaatagtgtctgggtttggtggctgattatgggatggatccccaggtggggtagtctccggatggtccatccttttgtcttatcgccaaactttttctctgtaactccttccatgggtgttttgttccctcttctaaggaggagtgaagtatccacactttggtcttcattcttcttgcttttcttgtgttttgcaaattgtatcttgggtattctaagtttctgggctaatatccacttatcagtgagtgcatatcaagtgacttcttttgtgattgggttacctcactaaggatgtggaccttgtatcttaaacagattggttgccttcacacaggaattgnnnnnnnnnnnnnnnnnnnnaccataggtgtgtggattcatttctgggtcttcaattctattccattgatctacttgtctttcactataccagtaccatgcagtttttattccaattgctctgtagtacagcttgaggtcaggcatggtgattcgaccagaggttcttttattgctgagaatagttttgctatcctaggttttttattattccagatgaatttgcaaattgccctttctatcccagtgaagaattgagttggagttttgatggggattgcattgaatctgtatattgcttttggcaggatagccattttgactatattaattctgtcaatccatgagcatgggaaatctttccatcttctgagatcttcttagatttcttttttcagagacttgaagttcttatcatacatatctttcacttcctgagctagagtcacaccaaggtattttatattacttgtgactattgtgaagggtgttgtttccctaatttctttctcagcctgtttatcctttgtgtagagaaaggccattgatttgtttgagttaattttttttctttgaatattttttcttttttattttttttccattttattaggtatttagctcatttacttttccaatgctataccaaaaagtcccccatacccaccccccccccactcccctacccaccgactccccctttttggtcctggtgttcccctgtactgggacatataaagtttgcaagtccaatgggcctctctttcaagtgatggcctattaggccatcttttgataaatatgcagctagagacaagagctctggggtactggttagttcatattgttgttccacctatagggttgcagttccctttagttccttgggtgctttctctagctcctccattgggggccctgtgatccattcaatagctgactgtgatcatccacttctgtgtttgctaggccctggcatagtctcacaagagacagctctatctgggtcctttcagcaaaatcttgctagtgtatgcaatggtgtcagcgtttggaagctgatcatgggatggatctctggatatggcaatcactaaatggtccatcctttcgccacacttccaaattttgtccctgtaactccttccatgggtgttttgtttcctattctaagaaggggtaaagtttccacactttggtcttcgttctcttgagtttaatgtgtttagcaaattgtatcttatatcttgggtatgctaagtttctgggctaatatccacttatcagtgagtacatattggagttaattttatatgtgcatctctttcttaatgttagggaagttttcttctataaatttgttgacgatatttactggccctttaatctgggaatctttgctctcttctatacctgttttcattaggtttggtcttctaattgtgtcctggatttcctggattttgggggttactagctttttgttttttcattttcttttactgttgtgtcaatgttttctatggtatcttctgcagctgagattctctcttctatcttttgtattctgttggtgatgcttgcatctatgactcctattcttttcctaggtatttttatctccagggttatctcccatttggaatttctttattgcttctgtttccattgttagatcctgcatggttttattcaattccttcacctgtttggttctgttttcctgtagcactttaaaggatttttatgtttcctctttaagggcttctagctgtttttaaaggagttatttatgtccttctgaaagtcctctattatcctcatcatgagatgtgattttaaatcagagttttgcttttcttctgtgttgggatatccaggccttgctgtggtgggagaactggattcagaagatgccaagtaaccttggttttccttgcttatgttcttgctgtttgcctctctccatctggttatctctggtattagctggtcgtgctgtctctgactgtggcttgtctcttctgcaagcctgtgtgtcagtactccttggagaccaattctttttgggaggaatttgggtatggagagctgtggcacagggtcagttatggtgcacagacagaaaccaaaaggatccccagctattcctttattcctgtgtcctgatggctctgggtaggtccctcttgggccagggatttgagaagaaatggtggtcttacctgtgctcacaggtgtgtcagcactgagaaaccagatcttgatggtatttgggtatggatcactgtggcacaggatcagctcctggaacagaccaagcttccgatttcataaatgaaataagaagatataaagatgtcatgcatcatgtctggctcagagagtaaattataaaatactttagcaagtttgggaggacaactcaagcttaccctaggggtctcacctagcgcagatgtgaacccggcttctgtaagggggtttctcctagacagacattttcagaaactattttctgtttttcagatcttagcttgagtaaatacatcccgagaattgctgaagacatgacaatccaggaagctaaaaaatttgctcgagaaaataacatcaaggagggcaagatagatgagatcatgcatgacagcatccaagacacagctgagcagaaagtccagctgctcctgtgctggtaccaatctcatgggaagagtgatgcatatcaagatttaatcaagggtctcaaaaaagccgaatgtcgcagaaccttagataaatttcaggacatggtccagaaggaccttggaaaatcaaccccagacactggaaatgaaaatgaaggacaatgtctggagtgaaaactacctcagttccagccatgaagagaggagagagcctgccacccatgatggaaacaaaatgaatgccaactgtattgacattggcaactcctggtgtgttctctttgccagcaaatggtagttgatactcagtgagggtcaaatgactagcaggttccagggactgcttctgttattctctgcagttgctgagatgaaccattttctctgtctactgcaatttttacattcaaatgtccatgaaatttgtattaaatgtgaagtggaatctgcagtgtttgtgtttatattcatatactatgaactgaggagaattataaactgaaacaaatactcgcagttaattgaagaccttccattgatggacagttcttttcctctctatgtggaaatgtataatagaagaaataatttttaaattaaagtatctctttttgcatttctattgctctgttgtcttgcttgttattccatttttctttactctagatgacgacttaaatgctacctgtgcaatgaatgaatctttaaagcttgagttgacctcttaggaggaaattcctttccaaagccttttaataattaaatggttcattctatggctgttactgtcaagaatactttagcttggcagatgtctgatattcttgaggaatctgatgaccgtggtctcaaaagtgcatttaagcagaaagattgcacagcttgggggatttgcctatagttttctctgaggtatgacagttttctctgaggtatgtcctgtccagctttctagttggacagagcagaaggacaaacccagtagagttcagatatgaaactcccacgttttaaggtgagattaagcataagaacatcctgtgccttctttaatgagtttgaacttgaaccaagaactctgagtccctttgaaaaggctttgtattggaggatgtgagtctcttccccttggcttcacccagaggctccgggaatgaccactcccacatcaataaccatggctgtgttctggacttaaagtgaccttttgctccaaagttaccttgcttcagtgattgaatctttttttttgtggtacacatcatgagaaggaatacttatgtcacgtatgggctgcaggaaaaaggactatgtacaaaaggaggtcagggacccccatgggccttgcatacttaaacttctaagcattcttcattagtaaccacagagtcctctggtatttgaccaggccctatgcagtactacattgttagtttccatatagtgatctcgatatggcatacagcacaacattatttgcaattatttcccgtgctctcatctgaatggaagttttcctgcttggattttataccaggggctggaagataactcagtagtagaccaccttcttagcaccctaaggttcttgaatcaatccttactacccannnnnnnnnnnnnnnnnnnnctccttgggtactctctctagctcctccattgggggccctgtgttgcatcctatagatgactgtgagcatccacttctgtatttgccaggcaccggcatagcatcactcaagatagctatctcagggtccttcagcaaaatcttgctggcaaatgcaatagtgtctgggtttggtggctgattatgggatggatccccaggtggggtagtctcgggatggtccatccttttgtcttatcgccaaactttttctctgtaactccttccatgggtgttttgttccctattctaaggaggagtgaagtatccacactttggccttcattcttcttgattttcttgtgttttgcaaattgtatcttcggtattctaggtttctgggctaataaccacttatcagtgagtgcatatctaatgacttcttttgtgattgggttaccccactaaggatgatatcctccagatgcatccatttgcccaagaatttcataaattctttgtaatacgtgagtagtactccattgtgtaaatgtatcacattttctgtatccattcctctgttgaggtacatctgggttctttccagcttctagctattataaataaggctgttatgaacatagtgcagcatgtgtccttattactagttggaacatagtctcagtataagcccagaaaaggtatttctggatcttcggtagtactatgtccaattttctgaggaaccacaggactgatttccagagtggttgtacaagcttgcaatcccaccagcaatagaggagtgttcctctttctccacatccttaccagcatctgctgtcacctgaatttttgatcttagccattctgactggagtgaggtgggatctcaaggttgttttgatttgcatttccctgatgattaaggatgttgaacattttttagatgcttctcagccctttggtattcctcatttgagaattctttctttagctcggtaccccatttttaatggggttatttgaatttctggagtccagcttcttgagctctttgtatatagtggatattattcccctatcagatttaggattggtaaaaaatccttttcaaatcttttggtggcctttttgtcttattgacagtgtcctttgccttacagaagctttgcaatttcttgaggtctcatttgtcaattcttgatcttacagcacaagccattgctattctgtttaggaatttttccccagtgctcatatcttcaaggcttttccccactttnnnnnnnnnnnnnnnnnnnnaaggaatacttatgtcacgtatgggctgcaggaaaaaggactatgtacaaaaggaggtcagggacccccatgggccttgcatacttaaacttctaagcattcttcattagtaaccacagagtcctctggtatttgaccaggccctatgcagtactacattgttagtttccatatagtgatctcgatatggcatacagcacaacattatttgcaattatttcccgtgctctcatctgaatggaagttttcctgcttggattttataccaggggctggaagataactcagtagtagaccaccttcttagcacccttaaggttcttgaatcaatccttactacccaggtaaataagtagatagatagatagatagatagatagatagatagatagatggataggcaggcagacagataattaggaacggaaaggggaagtctacataatgcacagtatttgtagtttctccctagcttttagaacatcagtccactgtattcttgtgttcattgttaatgatatgcccacttctggtctaaatattcctttctaggcaactcctctcttttcctctaatagactctgaaggttcctttaccacactttcttggtgttcagcaatttaacttaaaagagttccaatgtggatttattaatctctttctcctcccccatttcccctccctcttctcccctttctgctgcttctttccctatccttcattatccctgttttcttgagatcttcctctgtggtctaggctggcctgaaatttgtagtaatcctcctgcttcaccctcctaattgttgagattatagtaaacttagttttaactcatttgctaagcagtatgacttttattttattttttatttatttatttttatttatttatttatttgagatagggcttctctgtatagccctggctgccctggaactcactttgtagaccagactggcctcgaactcagaaattcacctgcctctgcctcccaagtgctgggattaaaggcatgctccaccactgcccagctatatttacctttatcccttgagattataattataccatctcgccttccctttcctctctctaacaccttcatttccctctttcaaactcatgtccttatttttctttaatgatgctacatgtgtatatgtttatgtatatgtatacgtatatgtatatatgagtgtacacgcacacacacgcacacacacgcatgcatataccatgtccttgctgttctgaagacttggatcttttctctttgaataactcctgtatgagtccctcaattctttcctcccagagtagagcatcacctcctgtagctttttgaacttctctctgctctgattgtttgaaattatagttttatatgaagatcgtatgtagggagatgtttcattactctcctcaaattaaccattcccattttttatcgttttgtccactgttcgtgacatttctaattatctgtgaatgctcacttatacatatgtttctgcttcctattcatggatattttaaggttacgtggaaagctgtgtctatcagtctcttttcttgttgtaaacaaatatctggcaagaagcaaccaaaggaagaaggcttgccttgtgctttgaatgttcagtcagtctatcatgacaaggaggccagggctgggggaccatggcaactggtcaagctgtgtctgtagcaggaaggagagaccttggagggctggtgctccaccagccttcttcatttccattttattcacactcggatcctggttcatgggatgggatggtgtgcagactctcagtgtgggtcttccctcttctattaagcctatctggagcatacccacaggcctacctagaggtgggtctcttaggtgattttaaatccagccaaggctacagtcacaatcttattccatcatcctactttaaggagtctacagctcttcatgagtccttcctaaaaatacttttaaaattaaattttacttgtgatctcatgctgccaatcataaactcactgtcctcacatggctcccaagaacttatgcatgtgcactgtatacacatttgtgtgcacatgtatatgtctatgtgcacgtactgagatgccatagaataagaggtatcctgatttagcatcctccaccttattctgttgagacagactcttactgagcctggacctagactggcagccagtccaccatctctgcctacttcccattaccaagcttacagatacatatgtgccataactgccttttacaggagttctaggaatttgtactaaggttacctgttgagccacatcactagccatactcatgtgaccttcttggtgtatttttgaatttgaattgtagatctgaatgacaaggtnnnnnnnnnnnnnnnnnnnnggtccatctcataatcagccaccaaatgcaggcaatagtgcatatgccagcaagattttgctgaaaggaccctgagatagctatctcgagtgatgctatgccggtgcctggcaaatacagaagtggatgctcacagtcatctatagcatggaacacagggctcccaatggaggagctagagaaagtacccaaggagctgaaggggtctgcaaccctataggtggaacaacaatatgaactaaccagtacccccagagctcttgtcgctagctgcatatatagcagaagatggcctagttggccatcattgggaagagaggttccttggtcttgcaaactttatatgctccagtacaggggaatgccagggccaagaagtgggagtgagtgggtaggggagcagggagggggagggtatagggtacttttgggatggcatttgaaatgtaaatgaagaaaatatctaataaaaatttttaaaaatatgtcttaatatatcctgaatgtgctatggtaaatgatttctttacatttattttaaaagccatgcattactagtcctttattcctaaaagacagataaaaatggaaatccctgtgtttgttttccctcttactaaatgtaaaaaaaaaaaaaaaaaaaaaaaaaaggtctcagctataaaataaaaggcccaaggatctgtcaataaaatagaacagtgggctccaaacaaatgggaaggaaagcggggccgtggttccacacggccacaagatggcactgtttctccagcactgactcaggtcctggttgaaagtttctccaaagtatgtcacagtttaattctcatattcaacttgccaacaaaagagcaaaacaaagcagatattacaagagttttatctaaaataaggcaatgtctgattctaagtcaacccctttttatggcctagctgtataattttagatttaacatcttggatgttctttatccatatctgtaaattaaagtcacagtccatcagttgttcctataactgtaatgcacaggaatgagacacccatgagaggatgtgataaactgtaatagagtatgacattggttcttaagattaacgttcatagaaaccacctgaggatgtttggaaatgtgtcctgcagatgatgtggctttgggaagggggggggaagcacttgtctcatacccatgagtccctgggtttcatgaacagcactctaaaattcatatccccaggtccagacatgcttcagaaggtttgagactggaaatattcatgtgctgcataattaatcagcaattatgaaaatgtgcaaagtctcgggtcacagcctgaaaggcttcagtatgccaacacccatggaaagaaatatttccaacttagagattaattcactatttaactaaaagttgaacaagcactccaccatttttagactaactaaaggtacgtgtatattatattataatacaaatatatcaagtgtaagtgcccattctcttaagttaatagaatggacttgagaaggaagtgtttgctgggtgacagtcagataacaggaccaggtgcagaacatctggaagtcagctgatagacaggtatgctcatgttgtaggacccagacagagttgatggagtccccctgtgctctgccttgtgacccctatacactcttatttgtctataaacaagtgacttggtgtcttctattaaagactgaagcaagctctactgtactgaaagagagtgagaaaatttagcaacaaagttccatgaacctcttagaattctttgtcacacaactgccaaggtttgttggctaaagccaatggaactttttctaatctcttctcttccttctccgtctgcaaggggtctcagtctggttcccagaaaacatggtgggaaagattgaaggtctagctctaggccagaggccagtgtgttatcctcagaacctgggtgtgcatgctcaaatcccatcttaggtatcaagagtgcacaacaacaaagtctttacaaattgcagcaaaaccggcttcatttggaaatatattcaatactcatcaataaagagagacagcagtttatgttgaaccactaggactcttgatctttctacaactatctatcaaatagttcttactttttacagctaggcactattctaggataacatgctaataacatgctaataacatacaaaaagaccaccaatctggagctggatctctcataacaggacggacaagaatttgtgtaatgattgtgcagaatactatgttatgagattataaatgctccgatccgtttatcaggacagggagaattgaggcaaaggtagggagagagagaaaaaaaaagcaaggtgtgttactactatatagagtggtcaggagaggcctcagtgagatggagcaannnnnnnnnnnnnnnnnnnntccctacccacccactctcatttcttgaccctggtgttcccctgtactggggcatataaagtttgcaagaccaaggggtctctcttcccagtgatggtcgactaggccatcttctgctacatatgcagctagagacacgagctctgggggtactggttatttcatattgttgttccacctatagggttgcagaccccttcagctccttgggtgctttctctagcttctccattggggactttgtgttccatcctatagatgactgttagcatccacttctgtgtttgccaggtacttgcatagcctcatatgagacagctatatcggggtatcttcagcaaaatcttactggcatatgcaatagtgtcagggtttggtggctgattatgggatggatccccaggttgggtagtctctggatagtccatctttttgtcttagctccaaactttgtctctgtaactcctttcatgggtattttgttccctattctaagggggaataaatatccacacgttggtcttccctcttcttgattttcttatgttttgcaaattgtatcttgggtattctaagtttctgagctaaaatccatttatcagtgagtgcatatctaatgacttcttttgtgtttgagtttcctcactaaggatgatatcctccagatccatccatttgtccaagaatttcataaattcattgtttttaatagctgagtagtactccattgtgtaaatgtatcacgttttctgtatcctttcctctgttcagggacatctgggttctttccagattctggctatcataaataaggctagcatacattttcattggtttaaatgcttacttagacctcttagcagttcagtgcttggatgaataccttggttctaggcagaaagaagataataaactgtagtgagctgatttgctgtattatataaagtgctgatcctatgaagtagttctgttggggtatgacaaaccccttccagataccctccagtggaaggctccaaagatggaaacatactgacggaggttgtgctgtcacctgaaacaccttggagatctgtgatgtagatgttatgtatatttataagcttttgggacagaagggttttccttcagatatagtcaactttgtattttaaagtagaaactgggatggggcgagggcaggtagctcagagcgtaaagcatttggtgcgtgtgctttccagcctgaatttgcatccccagccctaaaagaaaccagtcactgtaatggtggcacatccttgtaaccccattgttggaaagcagagacaggtaatgccagaagctcctgaccagctagtctaccagaaccgtgggagtaagatgtgttctcaaaccaaagcggtggaaagcgatagagggggacatcctaagtaagaatggctacatgtgcatgtgcacctgcgaatgtgcacgcatcacagacacgataattaaatatgttagaagggaagatgttagttaaccaagtgactgcaaggagacatgctgattgtgtgtgtgtgtgtgtgtgtgtgtgtgtgtgtgtgtgtgtgtgtgtgtgtgaatatgatgtatatgatgtattcagcttttatatcacctgtttactttctagtcagaaagacaagatcttcattctagacacttcaccatcagtaaaataacggtcaatctctaactttgtttctaatataatactgctttagggggaagattttttagtgagaggagacacgtccttgatactttgagcttcattagaagatgcctccagttacagggtagaaggatctacctgagccacaagtccagaatcatacaagtggacaaaatggtcctacaccccagtaaataaagtgagaaaaaatatgaatcacttgactgttggttactatcacatgacttaattaccttgtttttgatgagtaaatccatgaaatgtaggataaaaatgtctcagctccagatatatccatttgcctaagaatttcataaattcattgtttttaatagctgaatagtactccattatgtaaatgtaccacattttctgtatcaatttctctgttgagggacatctgggttcttaccagcttctggctattataaatagggctgctatgaacatagtggagcatgtgtcctgagtgaggtaacccaatcacaaaaaaagtcacttgatatgcactcactgataagtggatattagcccagaaacctagaatacccaagatacaatttgcaaaacacaagaaaatcaagaagaaggaagatcaatgcatggatacttcattcctctctagaatagggaataaaatacccatggaaggagttacagagacaaagtttggatctaagacaaaagaatggacnnnnnnnnnnnnnnnnnnnncaagctctactgtactgaaagagagtgagaaaatttagcaacaaagttccatgaacctcttagaattctttgtcacacaactgccaaggtttgttggctaaagccaatggaactttttctaatctcttctcttccttctccgtctgcaaggggtctcagtctggttcccagaaaacatggtgggaaagattgaaggtctagctctaggccagaggccagtgtgttatcctcagaacctgggtgtgcatgctcaaatcccatcttaggtatcaagagtgcacaacaacaaagtctttacaaattgcagcaaaaccggcttcatttggaaatatattcaatactcatcaataaagagagaaagcagtttatgttgaaccactaggactcttgatctttctacaactatctatcaaatagttcttactttt

SEQ ID NO: 8 - DNA, 1480 bp, Mus musculus
gccgcaggctgcccacacaggccgcccgctgttttcccttgctgcagacatgctgtggatctgggctgtcctgcctctggtgcttgctggctcacagttaagagttcatactcaaggtactaatagcatctccgagagtttaaagctgaggaggcgggttcatgaaactgataaaaactgctcagaaggattatatcaaggaggcccattttgctgtcaaccatgccaacctggtaaaaaaaaagttgaggactgcaaaatgaatgggggtacaccaacctgtgccccatgcacagaagggaaggagtacatggacaagaaccattatgctgataaatgcagaagatgcacactctgcgatgaagagcatggtttagaagtggaaacaaactgcaccctgacccagaataccaagtgcaagtgcaaaccagacttctactgcgattctcctggctgtgaacactgtgttcgctgcgcctcgtgtgaacatggaacccttgagccatgcacagcaaccagcaatacaaactgcaggaaacaaagtcccagaaatcgcctatggttgttgaccatccttgttttgttaattccacttgtatttatatatcgaaagtaccggaaaagaaagtgctggaaaaggagacaggatgaccctgaatctagaacctccagtcgtgaaaccataccaatgaatgcctcaaatcttagcttgagtaaatacatcccgagaattgctgaagacatgacaatccaggaagctaaaaaatttgctcgagaaaataacatcaaggagggcaagatagatgagatcatgcatgacagcatccaagacacagctgagcagaaagtccagctgctcctgtgctggtaccaatctcatgggaagagtgatgcatatcaagatttaatcaagggtctcaaaaaagccgaatgtcgcagaaccttagataaatttcaggacatggtccagaaggaccttggaaaatcaaccccagacactggaaatgaaaatgaaggacaatgtctggagtgaaaactacctcagttccagccatgaagagaggagagagcctgccacccatgatggaaacaaaatgaatgccaactgtattgacattggcaactcctggtgtgttctctttgccagcaaatggtagttgatactcagtgagggtcaaatgactagcaggttccagggactgcttctgttattctctgcagttgctgagatgaaccattttctctgtctactgcaatttttacattcaaatgtccatgaaatttgtattaaatgtgaagtggaatctgcagtgtttgtgtttatattcatatactatgaactgaggagaattataaactgaaacaaatactcgcagttaattgaagaccttccattgatggacagttcttttcctctctatatggaaatgtataatagaagaaataatttttaaattaaagtatctctttttgcatttca

SEQ ID NO: 9 - DNA, 984 bp, Mus musculus
atgctgtggatctgggctgtcctgcctctggtgcttgctggctcacagttaagagttcatactcaaggtactaatagcatctccgagagtttaaagctgaggaggcgggttcatgaaactgataaaaactgctcagaaggattatatcaaggaggcccattttgctgtcaaccatgccaacctggtaaaaaaaaagttgaggactgcaaaatgaatgggggtacaccaacctgtgccccatgcacagaagggaaggagtacatggacaagaaccattatgctgataaatgcagaagatgcacactctgcgatgaagagcatggtttagaagtggaaacaaactgcaccctgacccagaataccaagtgcaagtgcaaaccagacttctactgcgattctcctggctgtgaacactgtgttcgctgcgcctcgtgtgaacatggaacccttgagccatgcacagcaaccagcaatacaaactgcaggaaacaaagtcccagaaatcgcctatggttgttgaccatccttgttttgttaattccacttgtatttatatatcgaaagtaccggaaaagaaagtgctggaaaaggagacaggatgaccctgaatctagaacctccagtcgtgaaaccataccaatgaatgcctcaaatcttagcttgagtaaatacatcccgagaattgctgaagacatgacaatccaggaagctaaaaaatttgctcgagaaaataacatcaaggagggcaagatagatgagatcatgcatgacagcatccaagacacagctgagcagaaagtccagctgctcctgtgctggtaccaatctcatgggaagagtgatgcatatcaagatttaatcaagggtctcaaaaaagccgaatgtcgcagaaccttagataaatttcaggacatggtccagaaggaccttggaaaatcaaccccagacactggaaatgaaaatgaaggacaatgtctggagtga

SEQ ID NO: 10 - DNA, 45121 bp, Homo sapiens
cttagacttaagctcaaagcctccattcaaagaaagtggccaaaatgtcccccctctggagcaagttgcattctgattaggaatgagactcaagccatataaagtcaagtacagttacaaggcaatgataagaaagaatgagatagctcaattccaaatgaatctggatttatctgatatgtaaatttaaaaagagagagataattttcccagactccaaatgccaaatcagtttcactccctcctcaaaagtgctgagaaagttctaaatttggaaaggtcacaaagggataaagtgagtcagaggaggctttggtttgccttatatgaaaagtgggatttggactatggaggaatagggtccttccagaggggatgtttgaatgacagagtaggaacagggcatggggaggccaactgcgaggaagtcagcacaagcaaagggcaggcccagcaatatccaagagagagcggggccagtccacagggtgttcagtgtggagcctccagacctgtgtcctaactcgagctctgccacatactagctgtgtgcaaattagttaaactcacctaacctatgtttcttaatctgtaaaatgaggataatattagatgttaagattaggtgaggatcaaatgagacattgtgtgcataaagcacttttcctgtgcagttaaacccttgataaatattagccacttattaaccatcgggttaagagagaaatgacttttttttttttaaagaactggccattgctttatcttccatcgtcgtgatttatactttttaactatattcacaccaggaaaagttgatagtaaatttcattttgggtgaggtctagactagtatccgtggaaaggaaggcaaattgaagaggtatgatcctaggacagaggaagaaccaaggtcaaaacagggacatttcccaattcaatccaacagctgctttgttaacagtgccacaagcagtggggtgggcagagtgggagacgcatcatatcctgggaagggaacactgtagggagggagagagaggctggatgggggaaacggtagataaaagattgggcaaagtaatttagtcccagtcccagatactacgtgtttcagtctgtgctcgtgggtatgtaaaggtttcagatgggctttccatgaaaaacagcaatgaggcaaaccgtcccattcactaaaaagacaggcattatcatgatactgtgcaaagagcccaggctttagagtcaagcaaatcttgatacctttacttgacacatgaacttgatcgagttacctctatgtgaatcaggaaagttattctttccctgtaggtgtgggtatgagaattaaataagttagtatatataaaagggtctaacacatagtgagtgcttgattaactggtatgtgttagttcaagaaggcagtatgttgttatatgcgagaagcaattgctttggttcaaaccccagctctacagcttactggttgggtgactactgcaagatcctcaagtgcttgggcccatgtttgtttcacctatattgtgcacacaataagaagacctacctcccaagatttttatgagcattgaatgagatcatatttataaaacccactaaatggtacctggctcatactaagtgatctaaatgaagaggtattatcattaagaagcaattaaaagttgcatgtgtatgaagttaacagcttttaacataaaagacaatggattatttggtaagagatctcaccgagcttaaatgtgtttttttctttttttttttgaaatgaggaaaggaagacataaatggcagaatatgtggtacagaactgtaagatacatgtcccacgacagaaataaaaaaggcagagattcactgaggggggaattcatggacatttatggtcacattatcctgattggctgagggagtcagcaggcttctagccagttttcttgctgttcacagaaataaaagctcagtgtctttgaaaatgaactaagtttttttttctttttcttgataggaaaatgtatttatgtagtcaagtaagacttgtttctgctaagtaaaaattcagcctaagcagtgtaatatgaagctaaatggagactggatacaaatatgtttataatgagattactgaatttgttgatttccctacatttcccatctactaccactaaagaaatgctgtaataataatataactggccaaagtggtaaaagtggggttaattggtccttatctgtttgaggtaaacaaccgaactgatgagtggtttccctgagcaaagactcttgctacttcatgtgtcctttccagaacgtggcatcaacatcacatgggagctggtgagaaattcataacctcatacttagacctaccgaatcagaatcttaatcttaataatattgacaggtagtttatatccatattgaggtttgaaatgcactgagttagagtgtggagttatggccacactgtcttaattagattatctttatttcaatccaatttgcatggctatgtgagctatgattcttagaggagtgaacataaacagcaaaaattcttacttagcagacttacccagtgcaagaaagagttcccttatctcactgtattatgatcttagtcaatatgacccggaatttaagaaaataatatgacaagagtatggttttaatcaaccggaaaccatgtgttcaacagaacaacaaaacaagaaggctttgtacttacttagggagtttacatcttgatgataaggccactgaggtaactaaagaggaaatggattcagcataggctttggaagttcacttctgttacctagtaactgtgtgactttgggcaagtctttccaagtttcttttctataaaataggatggtaacaggacctactttacagggagttgtaaggtttagataagttaacaggttatgcaaaaaaaaaaaaaaaaaaaaaaaaaaaacacacacacacacacacacacaaatgttctggacattttataagcattagatattactgatatcttatttttgtttatttttaaatgtctgtccctttaaaccattcctttcaacatatttgtgtggtttaaataaaaataagtttgaagaaatttcagaaagaactttgataaacccattgaatgacttggaaattccaaggggatttcaaagccaggtggaggaatgcctgcttagtgtctttcctcagtgcaaaggctgataaaggcctcaatttctccctcagtttactgtgatcagagacttaggctgcctagttatccttgttgcctggacaaaaaactctttagatgcatgcaggtttgtgtagagtttgtggggaggtttcagatggtaaaatgcctcttcctacctcaggtgaggggagggttactatcattcctttttcacagagctattctagttctgtttataagtagtgttctttgtatagtggatgttgagcaaacacttgttaaactataggaagttataacatcgggagaatttctaacaactgcaaagtgttctgatatgtaataaattgccttgagaaatagtaggagccagtgctggaaggagtcaagctaaggctggtgtagtctcctagggctgttgtagagaagagtctaaagtgggaggtgttgatcttatggtcccagaggtctctcccacactacctttctgcctgtataggtcagaatctattaagagtgagtaggaatggattacaccccacagtcatgaagggccttaaatgatagtagcacactagtgtcatatgtcaagtggcaaatgacactagcaccaaatgtgattctgcatttaagttctaagtattaaatgcatctatttgctatatgaaaacataagatatcccagtgtttgcaaactggttcaatattgtgttgatttttgttttgctttaatacactaagggaacttcaaaaggctgatgtggtccatgctctctgagccaggcctctcttgacttcttatgtttagttattcatgaaaccactgggcctgtctaaatggccaagtcatataggaagagacagagtgaaagggagagcaagagctagagtgagagaaagagagagagacatcttctcaccttcagacctgatcagaggcaataatgggagaccatgggaggggagagcctgatctgatgattccttttcagttattttctggaaagtttaaaaaatatggtattcttcatggagaagccaagatgttaggctgcaggcagtgcttatgctctctagcctagtgaggaggaaagcagtataggtaaataaaatgacatttagttggtaatataggcagggcctatatcaactgccacctataaaaggcgttggtgatggtctttagggggccattggcaaattgctacaacaaaataataaaataaataaaataacaaaatccaagtttatctcccagaatctatctgggcatatcattactgttggaaagacttatgtttaccaggtgagaaaactgatgctgagaggggttaaatattatgcacagcttctcacatctagtgaagtaactgaactaggatttatatctagggactctgtccttcataggacaagttgctaatttgggggtgttctcagggagaggaaaatgtctatatgctcatatgcacagattatccaaatcaaaactctttctccccattgtcctttctcagttgaactagatgttaataccactattgtattagtcgactaagattgccttctgcagaaaaccacctatgtctcctttctacccaagtgctctggggctcctcccctgcccattctcctccaacatcccattccacattctctttctatctctgcaggactccctgtagtcctccctgcccatccattatctccctcaagctgtcccctcagccttttctaacagggaaaggctggtgccctggtaaagagtcccccacccccatcccactccctggcactagatgggcttgggagacaatgactgcccctccctcatgctgttctgatgtctcttgttccttccagtcacctcccttccaggcccatgaggagggcctgaggcccacactagctagtcttttctctggaggttgtttgggggcagggaggaagtctaaagtagagagaaagcgctgccatgccttaagccaacctttccagaagtataatgcccttgccactagtagtttgggaaacaatttttattggcatgcaggcaaatattttgtttcaatagtggcatatttatttttatggataccttctatttttggcaaggaatgctgattttccatttatggttataatgtaatgttttattttaaaaacaaaatgacttagggaacaaaataagttgacttaaaaataaattattagttaaatatatatttagtatatacaagtagactacagaaatggcaaaatagattgaagttgaagaaacattgccttaagctaagcccactcaggatgaaattttatctgcccccaaatcaacatctcttgaaaagtggtccctatctttccttgtgtcagttcttaacacccagggggtaggcatgcttctcatgtttgttttcatagaatatctgtgttttcaggggaccaccatatgcaaaaatgtcaggggaggggtactcaattggattaagaagccagggcccacagaacagatgttttcaccctactaacccaattgctgtctgctttttagttgccacagtctaaacattctttaatgcattgtctttttcagtcattgctcaagaggtaggttagtataccagttttcatagtgggaaaaattaggagacttaataatttgctgcatatcttggtggccaagttttccagccctggtcagttaggctttaggacacttttcttaggcttcaggaatgtgagcatggaagtagtacagaaaggaagtagtacagaaaggaagtaatacaggaaggaagtagtgcaggaaggaagtagtgcaggaaggaagtggtacaggaaggaagtggtacaggaaggaagtagtgcaggaaggaagaagtataggaaggaagtagtggaggaaggaagtagtacaggaaaagtggttgtaagccatttaacttactttttttcatctgaactgtgacccccaaattatcaatttgtcttgtgaagtcacttcatttaggaaaagcaatgtaaaagtaaaaattagtatttattgtgtgtactaggtgctttgcatatgtcatttctttaatcctgtaggaaataatatgttctccaggaggtgacaatgtctatatgattagattcacagattacctatccaaatctaagatctccgtcctctctcttcctttcccaagaacccatacatatttctattaattggtagaaataattattaatagactttgtcacttggccactgtgggctctgacgccctctagtgacagaaaaattctttggtagaagaagtaatatccctagatagcagtctacagaattgtttaagcaattatctttacttgagcttgaaactagaatagctaatttgtaacaattaacttttgtaacaaaagaattattatactgatcaaagttctgataatttatcagttaagattttttcagttgtaagaatctagcttaagcagaaactaagaatttgtagagttgggtaactttgggtggtccagggttcaatttaagaaccaaatgcatccagaacttggatagctctaccaaccttgatctttcagcatggtttcctctcagtgtggtttcctctcagcatgagttgactgttttcagctctggcagggccacaagctcccttcacaaccaaccacatcagtttcacatctcacatatttctacttcaaatccaatgaaaaagaaagggtttgtgtcccagtgtttccagtaaagatcccaaaatctactccaactgaatgtgatgtgctgattggcttaagccaagtcacatttcccacccactacctccctccacctacacatatacccaagccctgggattggtaccaatgccactgtgatggttaattttatgtatcaaattagctaggccatggcacttggctatttagtcaaacactatcttagatgtttctgtaaagcaatgttttggatgggattaacatttaaatctttacactttgagtaaaacatttgctttctataatgtcaataggccttatccagttagttgaaggccttaaaaaagaaaaaaaaaaagactgacttccactgagtgagtgagaattatgccagcagacggcctttggacttgaactataactttttcatgggtctccagcctgttggccaatgctaaagttttggacttgccagcctctacaatcatgtgagccaactcctatctatctttccatttattcattctcttggttctatttctctagagaaccctgactaaaagaaccactcacatcaaatagttaagaagaggggagagggacagtttttctaaagacaacttggaagtactattaccagaaggaagaagaaggagaaaggcaggataaacagtcatggatatacactatagctgggagttattaaaatcaacttattgcaatttagtaaaaacaatttggttgacaacattttttaaacattaggaccaaaggggaaaagaacaaaagtcttagtggtaaaaagatgtagaagtttttttttttttttttttttttaatcttaactcttcctgtttttttacatagtcaagattcttgtttaagtgttattcagaatgttcagaaaccaggatatcttttgagtagaagctttaacttatatggtatggtttgaataaggatggttgtccaaaacatctccaacatctgttggagtgcctgaaattctattattaaaattttatttctttgcccttgaaggcctgaggactctcaggaatatgctggtaaaataaaaataacctttagagatgcccaaactgttttccccagaacaccagcattcattaggtgttcattcaatagattcttcaaaggattccaaaggcaaagaagtttggggaacagtatatataattacccaaccctttgacattagcatactaagggccctgagaagttttggattaagaaagttttcaaattaaagtaacccagaattttctaagattatttgaccatgaaacatatgtctccccacaaagcacatattcctatctccttgaacttgaggataattagacgtacgtgggtagagggtaggggaagggggtatggcatagaaagagcaggaccttgggagcaagaatatctaagtttaattcctgactctgctatttattaactaaccatctttgccaatgttgcttaagcttttttggctacatttttttatttgtaaagtaagtttaataatcactcatctcactgggctataatgataagtattaagtaaggaagatccacatatgtgagttgctggcttataattcacactcaagagatactgattttgtcaattgtcctttcccctttttttctctcttccctccttccattccttcttcccttacctctcctttccttccctcacaccccttttccttccttctttttacatttttttatttaaatgaacttttcattttggaatagttttaggatttcaaaaaatttgcagagataatacagagaatgcccatataccatcctccttatcccacttctttttgtgtctattagatgctcagagtgtgtgcacaaggctggcacgcccagggtcttcctcatggcactaacagtctactgaaaggtggaacagagacaagcctatcaacacctacaagactggtggtaagtgcagtgacagatgcaaaacacagggtgatggaaagccctcaggagggtaacctaacctagatttgagggcccaaacaggctccagaagaaaatgtcaactgagaggaagcctgaaggatgaacagtgggctaagcaaagggttattaatgtgttattaatgggttgaatctaattgggaagggagagaggttgcagagtgaggtgcagagcttggtggacgatgccaaaggaatactgaaacctttagtgtgtccagtctggaactgcatccaaattcaggttcagtaatgatgtcattatccaaacataccttctgtaaaattcatgctaaactacctaagagctatctaccgttccaaagcaatagtgactttgaacagtgttcaccagagcacgaaagaattacaagatttttttttaaagaaaattggccaggaaataatgagtaacgaaggacaggaagtaattgtgaatgtttaatatagctggggctatgcgatttggcttaagttgttagctttgttttcctcttgagaaataaaaactaaggggccctcccttttcagagccctatggcgcaacatctgtactttttcatatggttaactgtccattccagaaacgtctgtgagcctctcatgttgcagccacaacatggacagcccagtcaaatgccccgcaagtctttctctgagtgactccagcaattagccaaggctcctgtacccaggcaggacctctgcgctctgagctccattctccttcaagacctccccaacttcccaggttgaactacagcagaagcctttagaaagggcaggaggccggctctcgaggtcctcacctgaagtgagcatgccagccactgcaggaacgccccgggacaggaatgcccatttgtgcaacgaaccctgactccttcctcaccctgacttctccccctccctacccgcgcgcaggccaagttgctgaatcaatggagccctccccaacccgggcgttccccagcgaggcttccttcccatcctcctgaccaccggggcttttcgtgagctcgtctctgatctcgcgcaagagtgacacacaggtgttcaaagacgcttctggggagtgagggaagcggtttacgagtgacttggctggagcctcaggggcgggcactggcacggaacacaccctgaggccagccctggctgcccaggcggagctgcctcttctcccgcgggttggtggacccgctcagtacggagttggggaagctctttcacttcggaggattgctcaacaaccatgctgggcatctggaccctcctacctctggtgagccctctcctgcccgggtggaggcttaccccgtcttagtcccggggataggcaaagtggggcgggcgcgggacgcgtgcgggattgcggcggcagcggcgcacgcgggcacctgggagcggcgggctgctgcgggaggcgttggagactggctcccgggggctgttaggaccttccctcaggcccgggtgctcagaacgctggaggacttgcttttcttgggccttgatgcgaagtgctgatcccgctgggcaggcggggcagctccggcgctcctcggagaccactgcgctccacgttgaggtgggcgtggggggcggacaggaattgaagcggaagtctgggaagctttagggtcgctggagggggaccccggttggagagaggagcggaactcctggacaagccctgacaagccaagccaaaggtccgctccggcgcgggtgggtgagtgcgcgccgccccgcgggggcggggagagagcctgcagccttcagaacagatattgctcattttctggcagttctcagacgtaggaaataagtcagcaccgaagcagtggttaagccggagggctcggaagaacggcaccttttctttctcgaaaaagttatatgggggctgaatgagcttctggaggcttgtttaccgttttttattgtcacacagaaaaggaaactgccttgtctcccttccgggaattctctctttaagactgtaagtcgctgcctgagtggtttcattttgttttgtttttctgcccttctctttcttcttttgccctttcttagcttgcactcccatggtgatttctgcttggtctcctgctggggttggtggtactcgttcccaccgcacagaacccggcgcctattattggccaagaaacttgagcagcctgttttgaaaagtccctcgctcagaaatgccagcttgcagatggctaatcaaagagacgtggatccaggaggctcatttgagtaccggagcctctgagagtccatggatttttattttattgggccccaacaaagtgccaggcatagcgagagaagtgtttacaaatgtgatctccgcggattctcacgagagccatgtagtggggaagataaccacatccccattttacagatggcgaaatgaggttcagagagcttcagtaattcagccaagatcacacagctagtaaatgggagatatgggattgaactcagatctaattccaaaactcaggctgttcgctgattgcatctgatatccagattacaccaagaggctgagatgtctgggtccattttatgattagaaaaaaaaatcctgttcctttcagaaatagtgtgcactatttgggattctttagaaacttccttggagaaaattaatgattcaagattgagaaaacatttatacaacctcaggccacactcttctctctcttgttattaaccattgcaccactgctatgttggctgctttgaaaatctcatagtttttggacagcagtattagtaaagtgtaagaaaattgtcaaagcttggagctatgcttgttgaacttttgtaccaatagcacctttaccagaggctgcgtgtttaaagcccgaagaaaactttgcttttctgaaagaatacacacacacacgcatatgtaaatattcatacatttatgtatatatacatattataatacctataagttaggtataacttatatttgtatatgatatatggcctaggaaattaaggcttattaaataaaatttataaatgcagatgagtcaaatacaaagatcagacataactctatcacctaagtaatcattgtttacgttttgcagtttatcttccatttctcccctctaatatgactcttttaaatttagttacacagaaattggttttgcgctcacgacatgcctaacatcaggcctttatccttaaagaagtttcaacactcttgtgtcacctcatgtgtctacagaaaatgtttgcttttatgccttcacggttatgttttcttagtagtagcaataaataaaatagatgcaaagtgctaattacttggaatacagaagcaaattttaattctattaatgggctggacatagatgggtggggagctgttttctgcttttcccctcttcccctagtcctctgactctggtgataactatagtcaacaagtatccccatccttaaccccttttgcttctctttctctttccttctctcaaccttcctggtgttagttttctctttcctatttctgagtgtttttactccgacacttacaataaaaaagtttgaaatcccaaaaagttgacaaatttctaaaggagacagaaaaagagtcaaacttactttacaaattaatttgagaaatagctgtgggttgcattttttttttttattgtgcatgaccctgttattggccaagaaacttgagcagcctgttttggaaagtccctcgctcagaaatcccagcttgctaattgaagggatgtggatccatgaggctcatttgaattccgaagcctctaagagtccatggatttttattttattgggccccaacaggttttgtcttgcattatttaggacattggccaggcaatcactggacagccagtttgctctcctttacattttgtagaatggttatcttatggtcaaaggaaagggagagggcctttggaaaataaagctgtgtatttacaagcagtcatacagaatagttttgtggggaaaataaagaacagttatttaatttgtaatttaatcatttttcttaaaccaacccaaagagcataaaatggaatatttatttatttttgtagcttaatttgtaatttaataatttttcttaagccaacctaacgaacatattgggctgtttattttcatttttaatgggccatatttacatcacaaaggacttgagaagtcttacaaatacaataaaatgataaaatatgaattaagacattagcaaccaggatggaaaaacacaaatttgtaaatgatggccaggtttgcaagcaaaaattaaattgataaatggcagcacccccactaccagctatagttagactgatgaaaaatcctctaatgttcatgcctgaaatacagttaccacccttagcagcaaattagaggcaaagaagttctggaatttggacgttgtctctgagtaagctctttgagacactggacaagtaatttccttctgaatactcttatactgacacataggagaagtgtcagtgtttcaaaggaatctctttgaaggctactacattgctttaggggtgccagattaccagagtaaactgccagtttgagagaataactgtttcttaagagatggtctgaaacctaagtaaggaaatccccccacttgaaagcccctaggaagttaattgcttttggcaaattatcttgggccccaaaagtcccttgatgagcacatgttttgtaataggtactaaagactatttacttatgatgaaaaataaaataacacaatttaaaacttgaaattgataaaaagcaacttgaaaccaaatttaggacagtgaacccatccctttcttatttttaaataggtaaatatagaaaaaatgaccacatgatgtgaaacaaaaagcaaatatttaaaaactacatttatactttatctcaccacactaatgtaaagaattttgattttacttataaattcttagccttgtctacacatatacataattgcatgtttaatttgagctatatatagtctgttttttgttcctttgcatgttacacaaacctttttctatttccacataatttttatctcatattttttattggatacattatagagagagcatttattaaatgagctgggattactataatttttattatttattttttaatttattacttatttttataatttactattgaaaaaaagcatttcttaaatgtactgggatacatatatatatatgactttttcttgttactaaaaaattactcatagaacttacatattaaaattttaggacttgtgatgaaaaataataaaataatttaaaacgataaaaagcaacataattttatatgttgtaccttgtacttccttataaggtacaacactacaatagccttagtgtgtagttttctttttgctatgtatgtatatatatattcataaaagtggaaaaataacatttaataaatcctctttattttctggaaaatccttgctttaaaaaaagtctttagctttttatatagttctacttctaacaccaattaaatatcttcaattcagtctcaagcaggaacaaatcttcagtccacttgcctacctttactgtctttgaagtgacagtgtgagtagtaaagcccaaatcagagagaaattgacttttgtaagattggtaacttcaccttccccggaaggaaatgaggtggttcttccctttgatcacaactgctttcttgatttgaaataaactgttgtacagcccagtcaccccatctttagacatttagaaatggcaatcatagttatataggacaactagcctgagtcccactaagtagaaatgatagtgaatttagtataagattatacctttaggctgggcaggtgactcacacctgtcacccagcacttcaggaggccaaggtgggtggatcatggatcacttgagattaggagtttgagaccagcctggccaacatggcaaaaacccaactctactgaaaatacacaaattagctgggtgtggtggcgtgcctgttatctcagctactcgggaggtcgcggcaggagaatcactggaacctgggaggtggaagttgcagtgagccaagatcatgccactgcactccaggctgggcgacagagtgagactccgtctacaaagaaaacaaagaaacaaaaaatcatacctttagagcaaggccagccttgtgaattagcaaatctgactacaaattcaatcagcagatgtactcagcccagcaaagtgagcaagcttactataggttgtgttaaggcatggactgggataaactggcaaaattagagtaaatttgacaatttgacattggattcattaatgatagcctgtccttcaatgaagtcaggcagcattgtgtttctattcacctctgtgttttgtgaggctataaaaatataagatatgagaaatgtgaatactttttatttgtgagggcagatatcttgaaaaagagagcgagaggaagtcagagtatgcgggtgaagactcttgtttttttgctgaggatttagctttggtttttagccattctcacagagatcattggtcctaattaactggttgttgttgttttttttcatgtgaatgtctgtaaggtttcaggcttgattttaaaaattgggcctatactcacagaaagacaaatactgcatgatctcgtttatatgtggaatctaaaagttttgaatccataaaagcagagagtagaatagtggttaccagaggctagttgggggcaaagttgggggatttagggagatattggtcaaaggatacaaaatttcagttaggaggaataagttcaagagatctagtgtacaacttgatgtctatagctaataacaatgtattgtatacttgaaaattactaagagtagattttaagtgttctcgccacacacacacaaaagaaaatgataagtatgtgaaggaatgcccaatgtaattagctcgatttagctaattatcttccaaaatatgtacataattatcttccaaaatatgtacataattcaagacatcatgttatataccataaatatatataatttttttatttgtcgaataaaaataatacaaaaaaaccctgggcctatactgcccacaggtagtggccacaggcagagctggtcccaagcccctccctctctctgtagtcccttatcccaggttgctttattcttgtatgacccacgtggcccctctgggcttgtaagggctctggggctgtattttaggactctatagcccttacattacccatttcctctaccaaaggtcatttctcttatcttcaagcttatttttggaagggtcattatttcttcatgagaagtcaaattctgatttgcaagtgctgaacacagatgccattagtctataaaactcttatattctcacatgtaaatgtagtaacctgctaacctcagattctgcttcctctaacctagttgccctgcaactgtgatgaacctcaaaatcaccaagggtacttccccattctcagagatcctgattccttaggtctatgtaggggccttagcactttttattaaataatgcatcactacaggattctgatgtctgtcggggtcttgagaactatttttctgactctagcactaaactcaaaatgtaatttcagatggaatttcctaggctcattcattttattttatttatggcttggccagtcatggatctaatcagtaacttgcaactgttgcttcaactacctctgtcctggactttccagagattggctttaagaaagaaagaggacatccctgggataagattaccatgtgtatttttatgtacacattttgaaaaacatacaaatgaatgggatctttgcttatctcttccatgtagaaaaatttattttacttctatttcaggttttcaataatgtagtaggacaagatgacatcactatatccctgttttttacacagatatattagagatgcattatcttattggaaattttaaactattcaataataaactattagtcttttagaatttctttttcctcaagtgttgataagtaactgaaagtctacaagcagacaagcagaattagtcggtggaacttcatttcttgctccatttttgtcctcagcagtagagggtggtgagatttcaacccagcctagcaggaccaataagtctggaaagaagtagctctagttcatattggcacctgctaattctagttctgaagaccatgggaaatctcttgcctatttagctcagtgatcatccaagatgggaaattcttgggctcagctgtgagggatcccaagtttatatgtaccactaatgtctcacaaatcaagaatccaagagaatcaagagactatagttcattccttatattaaattcttaggactgccaactgggtggctacagttttgggggctagaagtctgatatcaaggtgccaactggactggttccttctgaggaccacgagggcaggatctgttcaggcttgtagatggccttcttttccatgtgtcttcacattatcttcctctgtttgtatgtgtgtccaaatttcctcttctttttttttaatttagaaatttatactgtctacaagctttatatagctttagttaaaaaaaagcaaaaaaaaaaaaaaatcaaaacaaaaacagtgaagccaagacactcttccaaagtctggacccttccggccttccaaatacaagagctctggaagttgtatataccaaatttcctcttcttaaaatgtcaccagtcacattggattaaggcttaccctattaacaccattttaacttaatcacctctgtaaagaccctatctcctgatacagtcacattcggatgctcaggaagttagggtatcagtatcactatatgaatttgggagttgggggaggacacagtttagcccatgacagtcctgaatctcctttgctagatgcatgactgtgggccagtcacttcaccagttgggatactgccatctctatcagaaaaggggtttgggctaggtcatctataaagtcctttctgctctaaattgtaaatataatgagataccaacatttagtttaattgtttaaaattttagaagctaactggatgctttgctggtgtcaacactcccctttacaaaaaaaaattcggccgggcatggtggctcacgcctgtaatcccaacactttgggaggccgaggcaggcggatcacggggtcgagagattgagaccatctggccaacatggtgaaaccccgtctctactaaaaacacaaaaattagctgggcctggtggtgcacatctgtagtcccagctactcgggaagctgaggcaggagagtcacttgaacccgggaggcggagcttgcagtgagccgagatcgcgccactgcacctccagcctggcaacagagcgagactccgtctcaaaaaaaaaaaaaaataaataaaaaaaaataaaataaaataaaataaaaatctcactttctgtttctactgttctctcaagtacccctctgccttctgttacttctttgctgcattctgagaggaatggggtggggagcactctttcctgtagaaccccataacccatctattttcatcaatttatttgaaattcaaagccaggggttaaaatgtccactttcaatttgagatgtctaactttcagataaatctattaacatgcatttctaagtgacttttaagctaagcattttattttattgagctcgtatggaagggtaactattatacttgtataataaagtgcactttcaaaaatactcggttcaaatgtaaaataatattcgtaatattttaagacaaacctcctagaacttatatgtgtctttcttcccagagcagtctctatgggtgcctaaacaatactgcattattagatttttttcagtttataagccacacaagaaagttaacccatgtcatctctagaggcataaaaatagacagttgttctgagaaacatatctgtttattcctagttcagtaacagcgcaatgagatcctaaattatgaggtactttttgtttatcttattgtctcattggcaaccagcaactcctgttgcatttttgacatgggaatctatcagggtgtggttaataaagtacgtttccatggtaagtattctttaagaaaaaataaaccaagatttcatcagagacagaaattactgcaaactgtacttaccagtttctggtgatttgtataactgagctttcaatttcaaaaattaaaaagttctctttagtgtaacatatttttgtgtctagtaattttacttcaaaaataaaagagaattttctttaccatcaaacaacgttgctgtaatgagtggtgatatatttagtcctagaggaccaaagagaaataaaatggctttgattatgctggtttaagaaaatatatccgattaaacagaggttaatatttgtgatgtttgatttagtaaaattataagactaccaaagaaaactagaagagcaaaataaccaaaatttatataaagaattcaatgttgataattcaaaggtttagaattttttccacctttcaaatactaagttgctgttatagatttactaccattattacccagattttccattttactaaaaaataataacacagttcgttatgataaatcagtatagatctttaggctcaacacaaccctgctaccttttaaacttttttattatacaacaaacacatatgcattatcaagaaaagatgagtttagcaaaatgaagaaaaatagtcttatcaactagaaataagcaccattaaaatttctgtgtgttaaaagataatatactgctgaaactttttttttcttgaaatgtccctcttttctttcacttttcattttcttaatccctaaccttctactgttgaattttctggaccaccgttataccccctcatcaatagggcatttttttctgcagtagctgagcacaatggtcatattgaagaaattcccttgtgggggctttgcctagaggtaaaatcctcttggccgggtgcgttggctcatgcctgtaatcccagcactttgggaagctgaggcgggagcatcttctgaggtcaggagtttgagactagcctggccaacatggtgaaatgccgtctctactaaaaatacaaaaaattagccatcatagtggtgcattcctgtaatcccacctactcgggaggctgaggcaggagaattgcttgaatgccggaggcagaggttgtagtgagccaagatctagattgtgccactgtgctccagcctgggtgacagagcaagactccgtctaaaacaaaacaaaacaaaacaacaacaacaaaaacaaagtaaaaccctcttcactgtgatgactctaaagcttgcttttgtctctctaaatcacaacaaaccgtttgcagtgtgatgctgtgctcaaaattgagaattctcactgactgttccaggcatctgtctactcattcttgccatgctgagggctgtcatttctcaccactgaatgcctttttttttttttgtgcttctttttaaaagtcttttcctgtttgctttgaacttcaataaaaacagggggtaagaaggtaatatgcttttattttgtctgtggggtttttttcttccttcttttggttccttttcagatcctagctcatcaaggccatttgccacactgacactggaataagcctgaatgggggtctatatttcttccagtagttagtttaattcggtcattgagctgttgctctatttgtaaccgtcatgctagatccgagggctgactattcctgagaaagtgtggagatcctttcagactgccatggtgctagggcagagtttcagtcattatcttctgtgtctgctaattcttgcatcatttcttctactctgtaacctggttggctatgaaaagtgattcttcctcactgatgctgcaggcaatgggtgaatatccaattgttctctcaggttcttgtcatcggatacaaagaacaaatttcatgtgtccctgtttctgagaggttcaaagggagcaaatgcacagattctagcttaggatgacttccagcttctaactatttgtctgtgcattccatttcctcacccctgcgagaggttgcagtcatggtaacggctgttctgagaaattcagtgcccaaactggagggaggggaacacaaactcagcttcttcccaagcttcagggcagggctggcaagttttgccttccccgccagcaagagccctggctttaggggtcttgctacagttttcccagactggaggtcttggggctggattctggttcttagcgaattcttgccaaacacctcccctttccccagtatccatttgttttgaaggttctttgcaggcttcttgccaataattgtcttaaaacaaatggagttgtttgcatacctagatggagtaaaatatttaggaaactattctacaaatatgaaacagcccagatttgggccagaagtcctggtcctgagtctcttgttagccactcttaactgtgaattattggacaaatcatttctcgcactctgtgtaatctgtcacctgggtacttgatgatttaaaccaggaattgtggcccttctcataatactgtctcctaaatattgggtgaatttagtatatcaaggagggcagggcactatacccgtaggggactctctctctccctctgtctctttgcctttctcagatatgcatctttggtggcagacctggggttcaaaccacagttgttttgaaatttctctttccttctccactatgctccccctcactgaaactttaataataaaagtagcacacttattgggcatgtatttgttatgttccaggttctgtgctaacagctttaagtgcattattccacgtattttcacaacaagcctgtgaggaagaggttatttccacttatagataaagaaactgagacttggagaatgtaagtgattttacccacaaacacagggcagtaagtgggaggccctgttcaccttagaacacctggcttctatcattcatggtgctgtttctagtgtggtttgaagaacctgagatccaaactgctatacaagtgacctgctgctttcttggagagagaaatctgaaagacagtggagccctcacattgtctttgcctgtgcacagcagatactgccaattttgggtgggttacacttgtttaccacgttgcttacttcagaaatcaataaaattctcttcatgcttttattttacaggttcttacgtctgttgctagattatcgtccaaaagtgttaatgcccaagtgactgacatcaactccaagggattggaattgaggaagactgttactacagttgagactcagaacttggaaggcctgcatcatgatggccaattctgccataagccctgtcctccaggtatgttacacaaaacatccagagattacagtgaaagtcacagttaggagtagcacatagtaatcatgactataataattttacagtttttggttcccctatattatataacataactgagagaaaaacaactatgaaattattttccaaagatgagttttatttatatttatcacgcttatttgatgtggttatggataaatttaatttacaagtgacatgcacctctgaaatgagaagactggtctatttggctccatttttttctaagcaaaaatgactcatttgtgaatatgaaagcttatcatgtcaaaactgattaggatctaccataacaatagtggaactctgaaagcaagagacttctcctcttaagggatatgtctcagcacttcccttcaatcagaaggtctctaagaaagctgtcctggcactgaagcctgcaaaatatatttgcattttgcagctgaataactagacgaataagaaaagcaacaggcagaaaccaacagcttttttttttaaatcaatactttgaagggcaaactaatttcagatcacaaatccttcaaacactggtaaattagaagctaagcaaaatgcaattgtgcaaacatttcttcaactttgagtagagttgaaaaaaggaaaatagcacatgggttcatgtgatagattaatagaacaaaaaaggactgtagtatgtttcatggttgtcctcccaggcttccagcactcaagctgtaaaacaggatgggtcctgtttgtgaaaagattctaccagtctccctgtgcttcatgtccagattttaataaccgttatggaaaaatctcccctataacccaacccatttatacttaaacccatttacacttaaatcttctccaacacgaataaagaatggcgtcctggctttattataacctgctaaacacaatcaatttgctctatgaattgaaatctttgttcataattttaaaacctaaaatgtaaattaaaatgaacaaaatatgctttgcacatcaaactgtcaaggatttttgtctattgctttttcggttttgctttgttttattttaatttaagaagtgaatgtaaattgttacaaacttttaagaaatacatttggatatatgagtcaaaaatttgaaaaaaaattttttttaacttttttttcttattattatactttaagttttagggtacacatgcacaatctgcaggttagttacatatgtatacatgtgccatgctggtgcactgcacccactaactcgtcatctagcattaggtatatctcccaatgctatccctcccccctccccccaacccactgtttatacttgctaagatagcaattaatttatacgaaaataccctgagaaaataatcaaaaataaaggaaaatattgtacacatgatatttcattatcaatatgatgtaggattccttaggtaaattctggaatatttaaagactgaaatagtatgtatcaaagtcatgttttctgatatatttctaatataatcctcaattatataaaccttcttaagtaatttccaactgatctggctggattaactgattctccctgatccgtctataaaatatcctggatggcatccaaccatgttaaatactcttcccacttcaattccctcttgttgaattttaggcttatcaatatctaagttgcttccaaatctgtttatgctcattagtgttgtgatattcatatgtaatttgattgaatattgcataaattaatgaaatacaaatacagagaaaagacagattttatttctaagaaaactaggttgagtgctttggagaattcaataaagatgagctgctaaaatgttgttgatgaattttgtgagggaaaaataaaagttaagtagtaggaaaaatcacaaaaatctctaaagccattcatacagattattggtatgtttatgttttcctttcatcaaaaacgaagggagggagggagggagggagggaggagaaaaaaagaaagaaatgaaaaaggaagagaaaaatagacaaacaggaaattataggtgatgcattatggatgtgacttaagaaagaacctgggattataataacttctatatcacaaaattgtcaaatgattatatagttatattttataaattaaaacaaaatatttacagtatttttaagtgatttcctatgtaaattgacatttttgattaaatgatcaaagaagtcctccccacatcatcatattcaataagaaggattctatggtatactgcacacatatttcatatatacacattgtacatatatatatatacacacctgttatatatatgctcatgcatatacatgtatgtatgtattatatgcataggaatgcaacaaaataacggcaatatctccagattgttgatatatagttttttgtttgtttgtttgtctgtttttttgagatggagtctcactctgtagtccaggctgaagtgcagtggcatgatctcagctcactgcaacctctgccttctgggttcaagcaattctgcagcctcagcctcccaagtagctgggactacaggagcacaccacaacaccgggataattttttgtgtttttaatagaggcggggtttcaccatgttggtcagtctggtctcaaactcctgacctcaggtgatctgcctgccttggcctcccaatctgctgggattacagacatgacccactgtgcccggcctgatacataagttcttattatactttcctgccttttccaacatttctataataagcatatgtaccattatactaaaaaaagtattttaaaatctgattttcaataaaacaactacttattttcttattttaataaattttgttttcatactttggaggaacgaaagaacctgtggtttactgtatctccattataccaaggaagttgtgctaggcacattctgtaagataattcattaaagagaccaattcattcagagaccagtataataccactagcaaaaaataaaattatacttggacttgggttctgttttctttaaatattgctacaatgttatatagccctatgcactatttttgaattttgttctgggaatctccagtttgttttttactattgacagactattatctttacttactaaaatagcatatatatttacatgtcataatttgctcatgtagtaaatattttgttttatcaaaaagaatatatgaagttattaaggaattcatgttcctaggaaacacagcagaaattaattttgctgtataggtgagcagagcagattaaactgcttatatttttaaaactagttataccattaacaattagagtcactagtaatgtttttctcacacttcccttgatattttctgtcactttcttcttaattctctattcccttaccttcatctagctttccccatagcatttttttagcacttgatatcaatatatttatttgtgtattgtctgcctgcatcccaagaaggtgaagtctttggtgatgaagggtttatcttatttcctgcataatatcaaacttctaaaaagttcctaggactcaataggcatttaataaacacctatcagataaatgaattttttaagagaacacattacataatgctttctaatagcaatacagtgacaaactttatttttaaagtaaattaatgcaaatatgtatattatttaaaattgtttgtttttaagataacaagcctgatagataataaattttggcataaatatgttaatgcttatcaaaactcatcagtacatatcctgtcttttgatgaaaaagtaatagaaaggggagaacaaagagaactctcatgctcactaggcaggccgagtgcagctctgacagcaatgcaagagaaatattactatctccatcatatgcaggatgaaatttaggcttggagaaaacaacactttgttaaagattttatagctgctcaagatttgaccaaggcttttaaaacttcaaatgttcttttccttattacactgtttcttatcaggatttgtggactttggaaagtaaaatgaaaagtcagagcaatgtgagttagtttgataatctcagtggccagtaacagctatccccactctgaatatataccaaccaacctctcccctttctccaaggaagttagttcttggcaaaggcatttcatgcagtgtactttgtcattctaaccttcctttttttttgtatgctcctgttgctaatcatcctatttctatgggcttcagtcactcttttagcttttgtcttgggagactttctgtctgttgacatgacttttaaaataatcttctcccccattgtatttatatctcattagcctaccccccctccccttgtgttttagaagagttttattgtctgtcatccctctatacttcccaccctgttacctgcccgtgtcctgttcaaacacttgctccttttttccttgggcaggtgaaaggaaagctagggactgcacagtcaatggggatgaaccagactgcgtgccctgccaagaagggaaggagtacacagacaaagcccatttttcttccaaatgcagaagatgtagattgtgtgatgaaggacatggtaagagtcttaaaatgcaattgaaagaggccaatcttggaatttcatgtagaaccatttataagacaatttgaaattggggcctactgtggtgctatgttgacacacaggaaagggaaggacaggtggctagggtaccgcagaaccaggtgccgagctaactactggtctagacctttatgagtaagtctaggcaattcttccagatataggagaatgagtaaatatgaaccctaggaacagggttcatcagctcaaatcaaaagctcagaaattattttttttctggccttgacttacgcttatataatggtgctcgttcatggccagaaaaattcagaagcctgcagatacaaggacacagaaatccaaaaggtaggtaggaatgctccccctttctttggggatttagtttgtcctgataattccatctggggacctgaattttcatggatatctcaatgtattctaaggacccagattgaagtataacagaagtgtttctagttttgtttgacatgaagaaacctctggacataaagcttttcccatccctattcagcctataaagcaatgtttctcatccctggcagtgcattagaattgcttagggagctactaaaaatgtttcatgtttaggtcccacctcagggcaattacatcagagtctctgagtgaggaccttggtattggcctgatggagtaagtctggggtagagcctaacattctacatttttaacaagctcccaggtgatgctcatgctgccagtccccaggtcaccctttgagtgttaaggctagagactagaggaacaggggagacgtctaagtattggtgaggtttgtcttggttgctgctaaatgattgctggccatttcaacctggggtttcctgttctgtgtttaaacactgactgtattactggtgtcatgctgtgactgttgatataagcagtggatctcaaaaatccatgcagctcctgcccaccattttcatagtctgcttataattagccgctataactaatagtttccaaactgattttctaggcttagaagtggaaataaactgcacccggacccagaataccaagtgcagatgtaaaccaaactttttttgtaactctactgtatgtgaacactgtgacccttgcaccaagtaagttttagtctttctctgattaaaacactagatataacatgagagttatcattttcctagggaagtaacactgactgagagttaagaattagggttctagtcctgctttgcctccaagcaactagatgactgtttgctcatttaaacactggtgaacttcctgtgtaggtgacactttgctggccacttaagctaaagatatgagccagacatatgcctggcatcaaggtatcagtccagaagcacagacagtcaaggaaagcaatggttattgtgtttcaacagcatgagaatagcatcagaagagacttatgttccaggtgttacaaattatacagaaaaacttttcaactctgcctgaggagatggaggtgaagacatgaatgtgtctcatgacttgaatcttgaagaaagaaaagaaagagcattaacaggtgcacatggatggaatgcacattataggcagggaaacagcagctgcaaagagacaaaggaagctcaggaaaacagaatacctggctggagtgtaggaaagactgagaagcgttcagggctgaatcatgaagggccttgtcttttaggctaaagaggttggttttgacccaaagttagagaacctgccttgtaagtcatcttgggaagcttttaggagttcatctaataggcttaagaaataagcacatgatgccttatgttttatttgctaggaaaattttatgtacagttgtcccaggctctcccctggccacaagtgtctgagagtgcccctatgatgacaggctaggtaggcattggggaagcagctgacttagtaaaataataacaataatagtaattccaaatatttcataatcttgatttaattttcttgtcatcataaccttttgaaatagataatattatttccatgttattgatgagataaaaggctcatggcagtgtgacttcccaagctcacctagtcaggtaatgggcagaggctgtgaactcagacaacctgattgtgaatgtttgtctgtctgaaggaaatcacacatgaacctcttgagtctcctgatcaccaccggttgctaaaagtggcagcctctaagggccagctgagtaccctccctgagctacatcatgggcttggctatcacctggccattttcttggtctataggaattttttgaaattacttttgacagtttattttaagagctagtttaagctataggatttacgtgttcagtttattactaggtttaagtttatttttgtatccacttcatctctcttgtgtgtcactattttcctatcttcctttaactcttgaaatcttaagacagtcattccttatgatatttttcatccagccatccaaattatattaacttgtgccagctttagatactaatttagaaatatttgaaggaatacgtttgccagagatgcaaagatgaataaaatggcccctaatttacaaagtgccattgaaaattataaaggaattattctgccaggcttttgaatttctcctgtatttttttttctagatgtgaacatggaatcatcaaggaatgcacactcaccagcaacaccaagtgcaaagaggaaggtaattatttttttacggttatattctcctttcccccaaccccatggaaagatgtgaagaaaaaccaatcactcttgattagtagaaagtcctttatttaatcttaaagattgcttattttcatataaaatgtccaatgttccaacctacaggatccagatctaacttggggtggctttgtcttcttcttttgccaattccactaattgtttggggtaagttcttgctttgttcaaactgcagattgaaataacttgggaagtagttcacaaagatttgcctcattcttacctataaaaagctaccactttggtagatttatgtattgttaatttcttgcccctgaatgcagccttgagagctgactgataagaacaaatgaaattattcctcagctagtttctgagcaacagttttggggcattgagtggtattctcatccttcctatgaacaggtgttctctgcagcagcagaattggccaaaaatcagaagtaattcttcactattcattgagatctccctatgcaaaaagagaacacaagaagcaaaggcattcccaggaaacacattgcagggaacactttaaaaacttgtacttcactgcctcctcttcctcggcctaattgcttgtttttaattatttctccttcttaacttaaaatactatggggacacatgttatacaaaggtgacttagtagagtcagtagaaaagccaaaattagatattatcataattagtctagaaaaatccctttaagtcattcatcaactacagggtcacaccaactttcagtaacttagaagtattcaattttcccttctcagaacaattatctgtttcttcagttcagttgaagaagaaagtttgccttgcctttagcggttgtttagctgaaaatacatttgggatatttaagcactgtaattgtgctcagagacatacagattcttctatctcacattgactttaatgcatacacctattgagtatgtatgcttgagttatttgtgtgtgtatttcatttctgggcatccatagcaagttgatgttgacttgcttgtcctacggcttctgcatcctgccatagtcttgccgtccacatctttgctggacagagagtggtgcttgccatatggtaagtcaaaagccatctccttgctaggccagcctgtggtaattagatgactaattaagatatgtcctttcactagaacacttgacttagtagtacgaaagttccaaaatcagcggtctcctgcgatgtttggccacttttaagtttcactgaatttctcctttttccttcttatatttctcttagtgtgaaagtatgttctcacatgcattctacaaggctgagacctgagttgataaaatttctttgttctttcagtgaagagaaaggaagtacagaaaacatgcagaaagcacagaaaggaaaaccaaggttctcatgaatctccaaccttaaatcctgtaggtattgaaataggtatcagctttccttgaaaagaaaaatagagaaattagtgatttggctttttgttacttccttttacttttttgtttcttgtttgtttcattttgtttgagatggagtcttgctccatagcccaggctggagtgcaggggtgcaatcatggctcactgcagcctcaaagtcctgggctcaagtgatcctcctgcctcaactgtgaccctgggactacaggcatgcaccaccatgccaggttaattttttatttttattttttatagagacagggttcactttgttgcccaggctggtctcaaacttttgacctcaagcaatccttctgcctcagcctcccaaagttctgggattataggtgtgagccatcacatccggcctgttactttctttatttaaacattgcttgtgtttgtgggtgcataggttaaaggggcctcacagatgaattatgatatggtacccaaattaaaagtaaacttgtacacaaaaaccgtaagaatcaacaaaggagggaattgagagtgtgctgaaaatgagctgaaaaaagaacttggccaacctccatgttccgtgttgttgttatccctgcagagaaacagcctttaccaggcatgggttcagtatccaagcctgagcaaagagattgctcttaaagtttgtcataagggcacagcttaactttctctggctgccggttgaccttatgtctcaccatatcttttcccaacatggtatcaatatatttcagatagcaagaaatacaccgagaaaagaaaccagttgcacttaatggaattattttcttatttggggccagggctcagtgggagttaggattctttaaattaatatggtaaaaaaaatttcaatttgagccattttctggtattaagaataagaatagttacagggaagaaaattttagagtagttatatttattatttattttaataagtctatatgaaaaataacctcaacctattttatgaattctttaggtttcttgcctttaaaaactaagacaatattgcttagtttctggcaaggccggaacctttcagaataaaaattgaatggtaaaagtaaccttcttaatcacttaatctagcttcctaattttatacatcaagcaactgattgtacttctttctgaattaaggaaaaattagaagttcacatttagaatattctaaagatatatttttatttgtctttctctgcttccattttttgctttctaggaaacagtggcaataaatttatctggtaaggcttttatcattttatttcatagagatggcatcctttagagtaataggccaatttcagagtaaaataatgttactaatttcagtgacatattatgggatcttgttatttctcatacaattctacctgctcagcataaagcatttatcaggcagtttgtttaaatttataatgaatactcatagttaaaaataatcaagtaacaataagacacaatagtctgaggcttaagaaacttttccttcataatcagctagatgtattacagaactcctgcctaaaaagatctagaggttaaagtgtactgtagactcaggtattatcagtgtacccaactctataacaacatacatgattccattcagttgttctttgatctgtgatttagagataagatgatcataaactctttgcttatacttttagatttgtgggtcattgatcattggatccataagagatgttataggtgatcttttccaatcctcttaatttataaatgagaaaagaagatacagaaatgttatgtattgtggcccaggttatttaacaaattactgggtatatggcaggatttggagttagaactcaaggttgtcttgtttctgtattcccctagtcagctcttcatagacctttaggacttagctatattctgaagtactataaaaagagaaataaacatggttttcactaatgggaatttcatttagaaaaacaaattttcagactattttctatttttcagatgttgacttgagtaaatatatcaccactattgctggagtcatgacactaagtcaagttaaaggctttgttcgaaagaatggtgtcaatgaagccaaaatagatgagatcaagaatgacaatgtccaagacacagcagaacagaaagttcaactgcttcgtaattggcatcaacttcatggaaagaaagaagcgtatgacacattgattaaagatctcaaaaaagccaatctttgtactcttgcagagaaaattcagactatcatcctcaaggacattactagtgactcagaaaattcaaacttcagaaatgaaatccaaagcttggtctagagtgaaaaacaacaaattcagttctgagtatatgcaattagtgtttgaaaagattcttaatagctggctgtaaatactgcttggttttttactgggtacattttatcatttattagcgctgaagagccaacatatttgtagatttttaatatctcatgattctgcctccaaggatgtttaaaatctagttgggaaaacaaacttcatcaagagtaaatgcagtggcatgctaagtacccaaataggagtgtatgcagaggatgaaagattaagattatgctctggcatctaacatatgattctgtagtatgaatgtaatcagtgtatgttagtacaaatgtctatccacaggctaaccccactctatgaatcaatagaagaagctatgaccttttgctgaaatatcagttactgaacaggcaggccactttgcctctaaattacctctgataattctagagattttaccatatttctaaactttgtttataactctgagaagatcatatttatgtaaagtatatgtatttgagtgcagaatttaaataaggctctacctcaaagacctttgcacagtttattggtgtcatattatacaatatttcaattgtgaattcacatagaaaacattaaattataatgtttgactattatatatgtgtatgcattttactggctcaaaactacctacttctttctcaggcatcaaaagcattttgagcaggagagtattactagagctttgccacctctccatttttgccttggtgctcatcttaatggcctaatgcacccccaaacatggaaatatcaccaaaaaatacttaatagtccaccaaaaggcaagactgcccttagaaattctagcctggtttggagatactaactgctctcagagaaagtagctttgtgacatgtcatgaacccatgtttgcaatcaaagatgataaaatagattcttatttttcccccacccccgaaaatgttcaataatgtcccatgtaaaacctgctacaaatggcagcttatacatagcaatggtaaaatcatcatctggatttaggaattgctcttgtcatacccccaagtttctaagatttaagattctccttactactatcctacgtttaaatatctttgaaagtttgtattaaatgtgaattttaagaaataatatttatatttctgtaaatgtaaactgtgaagatagttataaactgaagcagatacctggaaccacctaaagaacttccatttatggaggatttttttgccccttgtgtttggaattataaaatataggtaaaagtacgtaattaaataatgtttttggtatttctggttttctcttttttggtaggggcttgctttttggttttgtcttccttttctctaactgatgctaaatataacttgtctttaatgcttcttggatcccttagaaggtacttcctttttaaccttaacccttttagtagttaaataattatttccataggttgctattgccaagaagacctcttccaaacagcacatgattattcgtcaaacagtttcgtattccagatactggaatgtggataagaaagtatacatttcaaggggtaggttttattattaagaaagccaaatgaggattttgaaatattctttcctgcatattatccattctagctacatgctggccagtgggccacctttcttttctgcaatttaatgctagtaatatattctatttaacccatgagtcccaaagtattagcatttcaacatgtaagcatgtcggtaagatagttgtgctttgcttagggttccctcctgtgttatggtctggaaagtgtctttaggcagaaagtctgagtgatcacagggttcactcattaatttctcttttctgagccatcatagtctgtgctgtctgctctccagttttctatttctagacagaagtagggcaagttaggtactagttattcttcatggccagaagtgcaagttctactttgcaagacaagattaagttagagaacaccctattccactttggtgaactcagagcaagaactttgagttcctttgggaggaagacagtggagaagtctttgtacttggtgatgtggtttttttcctcatggcttcacctagtggccccaagcatgacttctcccatgtcaatgagcacagccacattcccgagttgaggtgaccccacggtccagaatcatcctcattctggtgaacctggttctctttgtggtgggcatactgggtaggagaatcacccaaaggtcacccatgagctgcagaaaaaaaggctatttgcagaaggagctcacagatcacattgaaagcattgcatattcaaacatcttggtcttctttattggcatgcccacagggtcttctgacctctgattagatcagacactttttagatattgaatcatcagtttctgtacaactatctgaataaggtatataatcaatgaaatttagaatttttttctatgcttactcctgattggtaatttgtttgggtttagaattctatacaaggccatttgtaattttcctcagcactttaaaaatattaaaccatgttttcttaacatctgttgctgttgattatgtctgctcttggtgtaaatatcattcctttgtaggtaatctgtaattttttttcctctggtaatttttaaagcttcccctactactttcctatgtgttctgcagtttcacaacaatgactttcaatgtgtatttatttttacttaatctatttaataagatttaattagaaaggcagggctttcatcatttctggaaaaaatcccagctattttctctttaaatagtgtttctttaccattctcattctcttcttctgaaactgttgttattatctgttgaagcttcttgagttattttctaggtctcttaattttttttaaaacaataattgtctccgtatgttgcattttaggaaatttctcattactctttttaaattaactgttagtttttactaagcccggctagaatagtctatccactgaggtatgtattttgttttctatatttttcattcttaatgtttcttattgttccttttacatttttacttgtatatgtttcattcctgctttttttaattttctttcttctttctcttttctctctttttttttttcttcttgcagtgcagacagactttattagtacagcagaggtgcccacagagcaggcagaagggatcagtgcctggatctgtcccttcctccttctgccctcgctgagccctagtgtgtccggaattggtgggttcttggtctcactgacttcaagaatgaagccgcggaccctcacggtgagtgttacagttcttaaaggcagcgtgtccggagttcattccttctgatgttcggatgtgttcggagtttcttccttctggtgggtttgtggtctcgctggctcaggagtgaagctacagaccttcgcggtgagcattacagctcttaaggcggcccgtctggagttgttcgttcctcccggtgggttcatggtctcgctggcttcaggagttaagctgcaaactttcgcagtgagtgttacagctcatgaaggcagtgtagacctaaagagtgagcagcagcaaaatttattgaaaagagtgaaagaacaaaacttccaccctatggaaggggacccgggccagttgccactgctggctctggcagcctgcttttattttgttatctggccccacccacatcctgctgattggtccattttacagagagccgattggtccattttacagagagctgattggtgcgttttgacagggtgctgactggtgcgtttacaatccctgagctagacacaaaagttctcaacgtccccactagatcagctagatacagagtatcaacacaaaggttctccaagtcaccaccagagtagctagatacagagtgtcgattggtgcattcacaaaccctgagctagacacagggtgatgattggtgtgtttacaacccttgagctagatacagagttgccgattggtgtatttacaatcccttagctagacataaaggttccctaagtccctaccagactcagaagcccagctggcttcaccccgtggatcctgcaccggggctgcaggtggagctgcctgccagtcccgcgccatgctcccgcactcctcagcccttggatggtcaatgcgactgggagccttagagcagggggcggtgatcgttggggaggcttgggcatggtgggctgcaggtcccgagccctgccccatggggaggcagctaaggcctggtgagaagtcaagcacagcagctgctggcccaggtgctaagcccctcactgccccagggccggcggggctggctggccgctcccagtgcagggcctgctgagcccacgcccacccggaactcatgctggcccacaagcaccatgtgcagccccggttcccgcccatgcctctccctccacacctccctgcaagctgagggagccggctccgaccttcgccagcccagaaaggggctcccacagtgcagcagcgggctgaagggctcctcaagcacagccagagtgggtgccaaggctgaggaggtgctgagagcgagcaagggctgtgagggctgccagcacactgtcacctctcactaggaggctggggcctggcctggaccagtttctcttgttccacctgaaacacatgagaatggagagcttagggctggccttgcttctggctcctattgtcataactctaatgttatcacttcattgaaaagattagacctctccttccccagtccctaggcagggaaccccagccactggggagagacaactttgtggggcctgggcttaggtatatcctctagacacttccgaccccaccccacaccctttagttctctgaggctcaacgcactttctttatttcattgacaatttatcatagtttaatataacttattccattatttaccttcttgaagatcctactgagttattttagagtcttttttagagttgctctattattttaattttaactgcagtgatttcatgctgactttgtaggctggctttcctcatgtgattttccttatgaatttttgaaatttgtaggcttatcttgaatagcccatttttttctctctgcactcatctctccatatttaatagttctgtgtgttcttttgccagttcttccagagtccccagttctgagccaagatttactgagataatcttgaggctcatacatcatggtgatatcaggactatcacagattcagtcatgcatttgggggcagcttggctcagccactggtcataggctgtgccgaatcttctcagacccttaggcctgtagcttcctagaagccacagtcccagggagtgtttggcagtaggtctgtcttagtagctctgtcttagctgtcttccacaagacagaaagttcagagagagaagaaggaaaagaaactggttaggcagacagttaggaggggtccttggtaaaactccttcaaacagagaaatagcctgaaaaaatcaaagctacaggcacagatagagcagcctggggaaaaatttagctttagctgcagagataagggagcaaggcctaacaaagaagcctttgttctttggataatcagcgggctcccaggaaaaagtttcctccccttttcagacatgtacatgatgggctccatgggaacttgcacagggagaggggcttacctaaaacatacccacagtttcataaacaagagaagctgtactttgtgcttacctaagacatacctgcagctgcacaggtaaggagagttacacagacagctactacacagttaagggaagttacacaaacagctacagagatgaaaggagttttttcttataaaagcttttggattcaactgtaaaagtggcaaccctctttcagcctcctctttgctgcagagagctttcttctttcaattattaaacttttactccaacctcacccttgtgtccaggctccttaattttcttggtcatgagacaaagaactccaggtactacctcagacaacaagactgaaacattgtggtgcactggcaagactgcaacagttctacatcagcccgtggttttaagaagggagcctggttcctgttctgcctcaggtggggcacatttattccgtaccaaacctaaaagcaggctttgctttgcttccaagcattgatccaactaagctttggcttgttgtgcacaagtcatcatcttgtagttgtttccattcttataccatgaaaggattgatcttatttttgagcttggctatgcctttttattttcctttagagacgttctatgtatcattgctatttgctcagattggtaggaggtggccctcaagaaatgaacttacaatttggtattaaccccagggcccattagataactagaaacaatgttttgttttgttttacatttttaagttaaaactaaggatcaagttgtttttcagttatatagggccctttgacaggacttgatatggtttggatctgtgtccccacccaaatcccatgtcgaattgtaatccctaatgttggaggtagggcctgattggaggtgattggatcatgggggcggagttctcattaatggtttagcaccaatcccttggtgctgttcttgtgatagtgagtgagtaattgtgagatctggttgttttagaagtgtgtagcaaaggccgggcacagtgactcacacctgtaatgccagcactttaggaggctagggcgggcagatcacctgagatcaggagcttgagaccagcctggccaacatggtgaaaccccgtctctactaaagatacaaaaaattagctgggcgtggtggcacacgcctgtagtcccagctactatggaggctgaagcagggagaatcacttgaacccaggaggtggaggttgcattgagctgagatcgtgccattgcactccagcctgggcaacagagcgagactccatcccaaaaagaaaaagagaagtgtgtaccacctcccctgacccttgctccttccctggtcatgtaagacatgcatgctttcccttcacctcccaccatgtttgtaagtttcctgaggccttcccagaagcagaagaagctacatttcctgtacagcttccagaaccatgagccaattaaacatcttttatttataaattacccagtctcggctgggtgcggtgactcatgcctgtaattccagcactttgggaggccaacgcaggcagatcacaaggtcaggtgtatgagaccagcctggccaacatagtgaaaccccatctctactaaaaatacaaaaaattagccgggtgtggtggcgggcacctgtaatcacagctattcgagaggctgaggcaggagaactgcttgaacccaggaggcagaggttaaagtgatccaagattgtgccattacactccagcctgggcgacagagcgagactccatctcaaaaaacaaacaaacaaaaaattacccagtctcagttatttataccaatgcaagaacagacaaatacaggactcaggagaaaagaaaagagactgtagggtttcccacataggtctgcatcttatgatagtggtgaattgagagtcatacagatctgggatcaaatatttattttcctcataaaggtagaaacaaatggcttaatctcttcgagtcttaatttccttattttttgtgaagattaaagtgtatatgaagtatctaccagtgtttagctctgtaccttgatagatggtaacaacaacaataaaaaacctcagatgcttaagcaaaatggaaatttattgacatatgttactagatgctcagatatggggtgggtttgactaacctaaaccagtgcctccagtcaagattccttgttattttcttgaatctaccctcttcatttatctacttcttgtccatctcttcatatatttgcttgccaaactggtagtgacaaggtgcctgcaaccattctcgacctatctaaatatcacagtccagaagaaatgacacttatgccccccgtcctccaagcacctcccctgacccttgctcctgctgctccttgctgctgagagccattcttattcaactgtttagatcataagcgacctctgaattaatgacttatgattggagaattggatatgtcgattggcttaatccacaggccccattcttggagcctggcataggatcagcttcccctgagtgtcaaaagattgggagtggggaggcaggaggacttctgttaagaggatgatagagggttctgggtaggagtgtcaggatgtgtttaggtactcaagctgacttaaactgtagaaaaaaatgtattacctcatatgacaggcagtccaaaggtgtggctcactgaagcctacttgtaccagctcacaagagctaattactaaattcttaggaattttgaaagccagttgttaaatcgttgatagcttgatattgtcatactgggagtatttacactatagaaattgtcaaaggctacagatcaggaatctcccccgacccccacaaagacagttactggctactgggcagaagtcagtgttggtggctgattcagtgtctcaatgatactatcagggtcacaggattcttttctagttttccaatctgtagcttcaacattggcattcaattagagttatttgtttttgcatggtcatccaatggctttatcagtgaatcaacagcatgattctttatccgtattcaatagcaaagaaaaagagagaaaaacatgaaaaaattctcccctcagatatggatcatatacctggccttttagtatgattgagccaaatttagtcgtctgcctacctgtgtggtctgccatatactgattgactcaggcaactcaggagccacctctggagctgtggacaggatcagtttctcctaagctttatgagttatgggaaaaagtagatcagaatggaaatactactagaaaaacaaaagggtgaaatggatgctgaatagtttcctctgtagaaaagaacaaacaatatcaactacacatattctccatgtccctcacaagttgagtaggcacttatagagaaaatctagatcctagggcaaaaggaagttcattgttattggccttactgtttcagaacccccaaaacagacacatggacttttttatgaagtaaagagatcttcaagaatctttacaccttttaaatgacctcaactgagtctaggtcaagtcatggctgctggagaatgtttttgattggatttctttgaaagaagccttgaggcaaggtttgggtacaggtggttcatttaagacgtgattccaggaaacatggtgatgatgttgtaaagtaagacagggaataaggaaaagcccatagtgcaggccctgataactatgctattgctatagacaagtggggcccaattctactggggtccctctgaaaggctatgtaggacaaacctccacattgtaccaacaaggcacagggaagctgagtcttgacaccaactccagtctttcattggttgaggggtctttctagggcattaactccctaatatccctaatacttctggcctgtcttcttccctccagctttggtatcctgaggacagacacctttaagcagagagatggaggaggccatgtgtcacatttgttagcaggtgatctcttgatgatccagggtccaatagtgtctatggcaaacagcaggctgctgagatgtctaagtatagaaggactagggtatctcatgggataactcgttctgcatgaaaaaggtaatgggcatggtgaattttgtttattaagaacaccttagttggtgacattaattttcagtatagattggcgtctattgcttaaatctcttgcccatggatgaaagcaaagaaaaatcaataaagaaagttgaaagagctattttacaaagcttggaaaaacactggtctctcatccctgtgtcaaaatatagtgcagatttatccagacatccaatcttcctttcctttcctcgcttctcccctctcctccttaacacgtgcatattgtccaaaccaccatcttgctttggtataaggggaattccactcttgtgggtgtccaaaggccactcctgtggaattcttacccttatgccatctaaaccatgcacctctgatatgcactcacatataattgtcttctgtagatgtttaattatctcccctttgctaggccataagccatctgagggcagaaatcatgattagcacagagtaggtgttcagtcaacatttcttgaatgaatcagttaatgaaggaacattatgtatgcagtagtcatttgtgttctgtatgactggcatttgatggaaaagtcacagcgagtgttagggaagctgaacttttttttttttttaaacattgtatcattaatttatcacgtgtatccaagctcctttgagtttccctgcccccatccctgtgtcattccagccatatccagctactccttccatgcttcccccattcttgtttctgactctattactcccagtccaaatcttgctcttcactgtctgcaccttgtgctctcctctctctcaaaaaaatctacccaaattccacccctcttcacaggcccagggaaatcactagttcccgcaggaggctgtaggctgtaaccaactctctgaaagctttgagtcctctctgaggtcatctgtgcttgtcctcgttccatcaggcactcctatgttacttgacctgtggtctgcatgtacagatcttgtaccccatatacattgtaaggtccttgaaggcagaaaaggaagcataaagaagtgggtaggagtgtaagctctgaagactgtgcatttgaatccctgccattcctagatttgggaccttgtcaccttgggcaacttatttacctcctctgggccttagttttctcacttctagaagagggaaaatgatagtatctgccatgtagtgctgctctgaggattaaatgagatactccacttagagcccatggaatggtatctggcatgtgataagcactaaatatagctttcctataattacagtaatgcccagggctccacaggcccagcccagcaccagtacaggaatagtatgacattgatgctagagttggcagattgaggagaacacacaaagggctaatgatgttcaaatacacatcagatttc

SEQ ID NO: 11 - DNA, 2551 bp, Homo sapiens
gcaagagtgacacacaggtgttcaaagacgcttctggggagtgagggaagcggtttacgagtgacttggctggagcctcaggggcgggcactggcacggaacacaccctgaggccagccctggctgcccaggcggagctgcctcttctcccgcgggttggtggacccgctcagtacggagttggggaagctctttcacttcggaggattgctcaacaaccatgctgggcatctggaccctcctacctctggttcttacgtctgttgctagattatcgtccaaaagtgttaatgcccaagtgactgacatcaactccaagggattggaattgaggaagactgttactacagttgagactcagaacttggaaggcctgcatcatgatggccaattctgccataagccctgtcctccaggtgaaaggaaagctagggactgcacagtcaatggggatgaaccagactgcgtgccctgccaagaagggaaggagtacacagacaaagcccatttttcttccaaatgcagaagatgtagattgtgtgatgaaggacatggcttagaagtggaaataaactgcacccggacccagaataccaagtgcagatgtaaaccaaactttttttgtaactctactgtatgtgaacactgtgacccttgcaccaaatgtgaacatggaatcatcaaggaatgcacactcaccagcaacaccaagtgcaaagaggaaggatccagatctaacttggggtggctttgtcttcttcttttgccaattccactaattgtttgggtgaagagaaaggaagtacagaaaacatgcagaaagcacagaaaggaaaaccaaggttctcatgaatctccaaccttaaatcctgaaacagtggcaataaatttatctgatgttgacttgagtaaatatatcaccactattgctggagtcatgacactaagtcaagttaaaggctttgttcgaaagaatggtgtcaatgaagccaaaatagatgagatcaagaatgacaatgtccaagacacagcagaacagaaagttcaactgcttcgtaattggcatcaacttcatggaaagaaagaagcgtatgacacattgattaaagatctcaaaaaagccaatctttgtactcttgcagagaaaattcagactatcatcctcaaggacattactagtgactcagaaaattcaaacttcagaaatgaaatccaaagcttggtctagagtgaaaaacaacaaattcagttctgagtatatgcaattagtgtttgaaaagattcttaatagctggctgtaaatactgcttggttttttactgggtacattttatcatttattagcgctgaagagccaacatatttgtagatttttaatatctcatgattctgcctccaaggatgtttaaaatctagttgggaaaacaaacttcatcaagagtaaatgcagtggcatgctaagtacccaaataggagtgtatgcagaggatgaaagattaagattatgctctggcatctaacatatgattctgtagtatgaatgtaatcagtgtatgttagtacaaatgtctatccacaggctaaccccactctatgaatcaatagaagaagctatgaccttttgctgaaatatcagttactgaacaggcaggccactttgcctctaaattacctctgataattctagagattttaccatatttctaaactttgtttataactctgagaagatcatatttatgtaaagtatatgtatttgagtgcagaatttaaataaggctctacctcaaagacctttgcacagtttattggtgtcatattatacaatatttcaattgtgaattcacatagaaaacattaaattataatgtttgactattatatatgtgtatgcattttactggctcaaaactacctacttctttctcaggcatcaaaagcattttgagcaggagagtattactagagctttgccacctctccatttttgccttggtgctcatcttaatggcctaatgcacccccaaacatggaaatatcaccaaaaaatacttaatagtccaccaaaaggcaagactgcccttagaaattctagcctggtttggagatactaactgctctcagagaaagtagctttgtgacatgtcatgaacccatgtttgcaatcaaagatgataaaatagattcttatttttcccccacccccgaaaatgttcaataatgtcccatgtaaaacctgctacaaatggcagcttatacatagcaatggtaaaatcatcatctggatttaggaattgctcttgtcatacccccaagtttctaagatttaagattctccttactactatcctacgtttaaatatctttgaaagtttgtattaaatgtgaattttaagaaataatatttatatttctgtaaatgtaaactgtgaagatagttataaactgaagcagatacctggaaccacctaaagaacttccatttatggaggatttttttgccccttgtgtttggaattataaaatataggtaaaagtacgtaattaaata

SEQ ID NO: 12 - DNA, 1008 bp, Homo sapiens
atgctgggcatctggaccctcctacctctggttcttacgtctgttgctagattatcgtccaaaagtgttaatgcccaagtgactgacatcaactccaagggattggaattgaggaagactgttactacagttgagactcagaacttggaaggcctgcatcatgatggccaattctgccataagccctgtcctccaggtgaaaggaaagctagggactgcacagtcaatggggatgaaccagactgcgtgccctgccaagaagggaaggagtacacagacaaagcccatttttcttccaaatgcagaagatgtagattgtgtgatgaaggacatggcttagaagtggaaataaactgcacccggacccagaataccaagtgcagatgtaaaccaaactttttttgtaactctactgtatgtgaacactgtgacccttgcaccaaatgtgaacatggaatcatcaaggaatgcacactcaccagcaacaccaagtgcaaagaggaaggatccagatctaacttggggtggctttgtcttcttcttttgccaattccactaattgtttgggtgaagagaaaggaagtacagaaaacatgcagaaagcacagaaaggaaaaccaaggttctcatgaatctccaaccttaaatcctgaaacagtggcaataaatttatctgatgttgacttgagtaaatatatcaccactattgctggagtcatgacactaagtcaagttaaaggctttgttcgaaagaatggtgtcaatgaagccaaaatagatgagatcaagaatgacaatgtccaagacacagcagaacagaaagttcaactgcttcgtaattggcatcaacttcatggaaagaaagaagcgtatgacacattgattaaagatctcaaaaaagccaatctttgtactcttgcagagaaaattcagactatcatcctcaaggacattactagtgactcagaaaattcaaacttcagaaatgaaatccaaagcttggtctag

SEQ ID NO: 13 - DNA, 96599 bp, Mus musculus
  misc_feature (3201)..(3220): "n" at positions 3201 through 3220 can be any base.
  misc_feature (9284)..(9303): "n" at positions 9284 through 9303 can be any base.
  misc_feature (24284)..(24303): "n" at positions 24284 through 24303 can be any base.
  misc_feature (28552)..(29294): "n" at positions 28552 through 29294 can be any base.
  misc_feature (37287)..(37691): "n" at positions 37287 through 37691 can be any base.
  misc_feature (38785)..(38975): "n" at positions 38785 through 38975 can be any base.
  misc_feature (43542)..(43561): "n" at positions 43542 through 43561 can be any base.
  misc_feature (56238)..(56604): "n" at positions 56238 through 56604 can be any base.
  misc_feature (64207)..(64226): "n" at positions 64207 through 64226 can be any base.
  misc_feature (65794)..(65813): "n" at positions 65794 through 65813 can be any base.
  misc_feature (70927)..(71719): "n" at positions 70927 through 71719 can be any base.
  misc_feature (73054)..(73136): "n" at positions 73054 through 73136 can be any base.
  misc_feature (76927)..(77052): "n" at positions 76927 through 77052 can be any base.
cctgaaaagagtctttaattttccctctgaaatttcacaagccaggcttccatcttctgcactgttctcaacatcatcttccaacctcctacacaacatctgacagagcacttaacagggaatggatcttctagcccaaagttccaaagtccttccacagtcctcccccaaacatggtcaggttgtcacaggaataccccactatgctggtaccaatttgtcttagtcagggtttctattcctgcacaaacataacaagttggagaggaaagggtttattcagcttacacttccacattgctgttcatcaccaaggaagtcaggattggaactcaagcaggtcaggaagcagtagctgatgcagaagccatggagagatgttacttactggcttgcttcccctggcttgctcagcctgctctcttatagaacccaagactgccagcccagagatggtcccacccacaaggggcctttccccacttgatcactaattgagaaaatgccttacagttggatctcatgaaggcatttccccaactgaagctcctttctctgtgataactccagcctgtgtcaagttgacacaaaactagccagtacaatcatcttagggccaggagtgggatagaaggaggtgcacacagaaccacgcacatatgccaaagctgaaagccataccagcctggtctgtggctgcttagattcgcttgtcgcacgtcacaccactgaaagaagcatctcccaccccggagagtgactgtccagatctggattcatggtgggctttcagagctgtgccgagcagaaaggcacacagccctttgttttcaaagtgcgcccagtgggctggactccactgcctgtttgtttcctttccacaactatactgtctgagcagaagaacgccacgatggtcctcagagatggtggcttgggcatttttgcctgcctgcatgtctgagtaccatttatacacccatggagtttatgttacaactcataaaagtaccctggagtaaattcctgaaactatctgcaaaaagtatcccaaagtttacgctgatgaaaatgaaatctataatcaagtattccttttgaatagaaaaaaaaagggccttccactaaatatggaaatcatcaggctgcatagtaggtggtataaggaccaaacaggaaagttccagaaagaaagatataaataatgtattcaaatcgaaagtgtttgacatttcaaagtatctcctttgggttttatgcatggtgccaccgaggtgttcacactgtgtttgtataaaattttaattttctcttaccttcaatgtggaccatgcttaagttaacaataaacgaaagtatctacacaggaagaagcatttatgtgatcagaggtaaatgctgggagagataacagagtgagtggcaagagtcctccaggctctcagtctggaagaaatagccattataaggtcgtctcatggaagggtgccagcattggtcgtatgtcctgtgaagcacaaggccataattcaaccagcttcacatcactgagaagtcaagggaagacgtgacgacaaataaaatggagataagtagagaatatcctgtctaatgatgggtccattaagttggtgaccctgacatggctgggcacacagtgtgaatttaatcaggcccacccaccccatgtgtctccatcatcagtgcccatggcataggcttgggctgcttggtccaaacacttccttctctcttctatcgtatggtggcttgaacatggctggctgttttctttctcatctccaatgatctgaacttggagtgtgactggcagatggtaatagcaaccgttatcttctctccgtcctttccatcaacagactgtcttcccagcccagagcaggattaaacaggtaagaagtaaacctctttgttaagaagagggaagtctgacaggccgtggaggcaggcacccaaaaccccagaactctggaggtggaggcaggaagataaaaagttggagatgaacctcagctacatagtgaattcaaggccagtctggattgctctagacctaatttcaaaaccaaacatacagagaggagcttaaagtcaggatccttagtttgaagttcaaaaacaaacagacaacaacaacaacaacaacaacaacaacaacaacaacaagcatgactgactgtttagttgcaaagttccacacatgataaaaaaaaaaacttaaaattttaggaactattacaaaagaagttgttcgtggacaaaacaaacaaacacccccccccaaaccaaaccaaaccaaaaacctaaaagaatgttagaaatcaaactataaaacacatcccagaaccattatcatgacacaatctcaaaaaaaaaaatcattatttttttttcactcaaaaacctgagataagtagagtatgcctaaaatttgtgtgtcccccacctgccaccgtaaggtgttttgggtatgtgcctcaagagtcattaattagattcacattatttacttgtgaagaaggaaataagaggggaagttggacagaaattagtatttttgcttaagaagtaaacacactgaccggagttcagcatgtttctcagcaaatccctggaattatggattaagaggcaaggagggaacagtcacaaatgcctccagggggccagcaagttaagaaacctttgtgcttctctgatgtagaagaggcgatttggaaatttacagcatgatttttgaaaccgtacgtggattccataattcccactgctcataaagtccagactccttgatctagctctgcccacctcttaccacacgttatgtcctcccaactctttctgccaactctcagaagatgccaggtctccgactcatggggcattggtcccagcttgttcctctgttcaggttccttatccacactggtatgtgatgtcacggcttcctccctgtttacatgctgaaatctaacttccactacccagaatgtgaccttatatttacatacttatgtgtttgtttagagacagggccttactatgtagccctggctagcccagaaatctctatgtagaccaggctagcctcacattcagatctgcctgctggaatccaggcatgcaccatcccatcgagcctttaggtgggtgctgaggacttgaactctggtcctcgtnnnnnnnnnnnnnnnnnnnnaactctggtcctcgtatccccccagtaactactttaccaactgagccatgtctccagctctactttgctgagtttaggggttacacatctgaaatttctctccttaatccctaaaggagtcacagcagtcctttcggatgaacatcaagatacagctgtggagccgtcctcacttcgctgctaaggcagaagcttgggaaatgatgacaaaaaccaactcatgtcagggtttggaagtggcaagccttccctttggacaagaacactcatcacacagagggggttggggagaggggggtggtgagagagggaggaaagaagggagggggggagagagagagagagacagagagagagaggcagagagagagagacagagagagacagaggcagagacagagatacacagagacagagttggggggcagggacagacacagagacagagttaggggaagggagagctatagagctatcctggaaatcgtagagttatgtttcctttctatttatcagaatacttattactaagcattgggtaatctgttacccaaaactcatgattctcatgatgttgtaacaaactaagggttgtttctttttccagtgaaatagaagcaaggagcaaacactcaaaagtgtctccaatgtgtttccagattcacagaactccctttaaggcgtgcacatcaccgaagtcctgctgcctttgccagaatctgatctgtaacctcccgtagtctttactcactctgtacttcaccgggatgatctctgcagtgatctctctgcacggacttaaacttgtattgagcatgcggactttgccttgtattgagcatgtgctctggcaggcatggaaccctcactgtgcatcctcttatgtcctcccgcctgaattttagaaccacagaggagtgccccagtggctggcacaggagtggttccagtgacgggggtggggggtgcagaactgcaaccttagctggcagagggtctctggtttcatctcaagggtacttagactttggttaacaagctagacagtacaccttcttacaactgtgatgtgcaattctaaggcctgtgataatagctagaggccatgtccctgccattccggggatgctatattggaaatcgacatggtaattgactagactatttaaaaaaaaaaaaagtgttccagatgactgtggttttggttcctttggtccattgctatatagccagtgctaagtagcattttctggacgcccagcacgtatttgtgaattgagtaatgatgttattaaaagtatctcctttatcagtaagataaattagatgtccattttaaaaaggggttcactctgagtgtgtcttcagtttctctggtttgccaagatgtactcatagagagagttacacacaccctgcttaaatacctattgtcctaactctcctgaagagatccctatccacacacccagggagatcctgtaggacgcccattctgcagataaaatgaaaaatgcaatccctgagaatatattctaattttactataacgcaaatggtactcttctcacagactaccaaaaagactgtatttttctatattgattcattttccacagagatgtgtgtgtgtgcatgcgtatgagtatgtgtgtgtgcatgcgtatgagtatgtgtgtgtgcatcatcaaagagtcaagaaatattttgtgactatgtggatcagtaccatgtggatgttctgagtcatatttatatctctgatctacagtgacatttcatcaagggcgtaagaacacggtcctattcatcctacgttttatgagctcaagggcctggaaaattgcaaacagtacctatgtctaagggagccccaggggctcaaactagttgtgtgtgtgtttggtgagggggcggtgctgtgatgtttcccagattcctggctcctgatgacatgaccaatatgcgtttgtagggaaagatgttatgagtactttaagagtgtaatcccagaatttgtaaggccaagcgaggaggatcctgacttcaaggcagcctgggcttgagatggtctgtgttttcctagtgtgagtattgacctgaatttggaatatatatgaatctcactggcatctaggaagtgatatatgtcagtagctcagagtttattttgaaatcatcaccaaatatggatgcttctcaacttgtaaggtgcctgacccccataaacacatttaccagtggaagcactgtatcctaaaatgctattgacatacctagtttagagaaagagtgtagcaactgggacattgcagtgtgtgggttgtttcacagggtggccctgtggttgaatgggagatgaaaaggtctgccattgcccaacatggcaacaaagtattatactgcttagtgctagtccaggaaaagacccacattcagaatttgccgtatgctttctactgagtccttgttgcttttgtaccattgcataattggaaaattgtaagtaaatgattgttaagttcaggaccatctgtagtgatatctcaggctctgggcgtggatgagagcgcccaaagagaaaaaaaaaaaaaaacccaaacatataaaatgagaaaataagagggttggagacggggtgcctggaaacaccataatttaggaggctggcagcaaaagaagagccagccaagaagcggaacagaacgggacagaacgatgtcacagaagcccagcgggggatgggaagtgcagactgcaccaggaaaccatgagcagacaaggatgggaaatggcacattcgaaagattacgaatgggaagcacatagaaatatccataggtctatttctgaggataaaattgcgggactccacctccgtatgtgtgtgtgtgtgtgtgtgtgtatgtgtgtgtgtgtgtgtatacagttatgtacatggtggatgtaaataagacagattcctgtctttgcttactttaagaaaatactaccaattgagctacatcttcaaccttgtttctttttaaacaaggtttccctatgtagctcaggcttgccttgaactcagacttcctcagcctggcaaatgctgggattgcagatgcttgctactacgcccaacaactcttattttctttcaacttctctatgttttctgacttccatctaatgttacatttgtattaaaatgttcttaatgggatctggcctaatggttcaaccgttaagaggacgtacaactcttgcagaggacccaggttcaggttccagtacccaaatggaaactcacagccatccacagttcagttccaggagatctgcgtcttcttttgacctccaggcacacacagaatccacatgcctacaggcaaaacatgcatgcacacaaaataaaaataaaataacgtttttttcctttttttttttaaaggatttatttatttatttttacatatgtgactacactgtggctgtcttcagacataccagcagagggcagcagatcccactatagatggttgtgagccaccaggtggtttgctgggaattgaactcaggacctctagaagagcagccagggctcttaaccactgagccatctctccagcccctcaaccaaccttttaaaatgctattgaagtataaaacaaatgcgctgagaaagtctggactattccgtacgaactcagagataagagcaaggaattgtggattcaaaaatagttgaccctctatgtgctgggccccaggctaatgacaaataagggatgtgagaatgactgtgacattctgcaaattaaggaaaagactgttggtttgcaagggggtggggatataggcacttgagctggtaacacgtgaggctagctgatagtctgctaccacattaaactgatttcacgtgccttataaccaagatggcctctattctgtaagctccagatgagcttctgaggggcagagaggacacgagttgggcttgaagggaagaaaatgtctgcttgatttggataaccatgtgtctattgacgtggacaaacccaagggaggtgactgggcatggtgctcagggactgccatgatccatctcatctggagaccctggggggttgcatggacctgtaactaggctgtgattgattgtgactggatgtgtactgataggactggatggatggattgctagaccgtgtgggaaagaaggaatcaagaactgaaaaaaaaaattaacagtccaagaaaacttttttatgtgtggttaaagaccacacataagtagggcattgctctttctgaaacagtgagattggggtgcacttagagcgggcaggactgtttcctgatggagaatctagtgaagacacaaatgggaagccaatcgtcaggaaagcacggagacaggatgctccctgtgcctggcaatggggtttccaggactagcctctgttcacggatacagggccttaggatgcctcttagagatttgtggacatggtcctctctggctcccctgagttttcatctctgaggaagctcctatcatagatagcagggaagagacatcggttggccccaccagacctcattgtttctgtcgttccttcggcctgcacatgaaggatgctgaaccgagataagaagctcagaaagaaggcgtgtggatggggaccggaggggctatttatgtaggcctttcctctccctgttctagggaagagaagacaatgggttgcacaccgattaaaataaacagagatagcacaggcccataattccaggattcaagagccaaggcaggaacgttgttagttcccggacagcttggaaaacaattctggttcacctagacttcctaagatgatcctgtctagaaaaaaaacaaaaaacaaaacaaacaaacaaacaaaaaacccagacacacaaacaaacaagcaaaaataaaaaacagcaacagcaaagaaaacaacaacaaaaggggccgcagagatgggggaagggggcttgctgagcaagcaatggggagttgagttcaaatccccaagactcttgaaaagccaggtctggctctgtgcccacctcattccagtgctgtggctggcagagacatgaagattgctggagtggctggctaccagcctagttctaggttcagtgagaaaccctgtctccaatcaacaccgtggagaagggctgagcaggacactctggcctccgtgagtacacatgcacacatgcacacatgtaccacactcacccatacacacacaaagccagaaaataatgacctgtggttattaggcttttaacttaggtgcctggtgggtaaagacatacaactaccatgcagtgtgtatatccctgtggttactgatatatgaaatataaatgcaaggagtgtgcagtgttattatgggagaaataaaggacactgtgcaggaaggatctattttgaggccacaagacagggtccttaatctcactgctctccttctacaagggcatgcatactttcctttatccctgtctgtggaatccactaattctatggcaaagaggaggtagaattatttttcagatgtttacacatagatagtgacagtctcctagggtgggatgctttccccagtggttagagaaggcaggtggtgggctgaggaaactgtaagccaggcaagaagcaggtgtaactaaatgtaagggaatacttttaaagttaagtgaccaaacagcaagaggttccaagcgagctggcctagtagagcccataggccgctgcacctgtcataggtactgggccctcttcttgcattcagtattgtctccacggaacagcacagaggacagcagccaaggatgttcaaccaataaggacagccaaatttaggagttaacaggcagcgttccctccaggttcagtcccaatcaagacagtttaagttcatgtaactcaaacccttgcattttgcaggaactggaccggttatggcaaagacatgaagtaactttggagagtgactttctaggggaaggccttcctaaccatcctagcttccacactgannnnnnnnnnnnnnnnnnnncccagtaggagatccaataaagtaggggcacaagtaatgccgtcttttcagctgacttcgttccttacattcctttgcagcgggcgactttccaagatgagtttgtatatgcagcctgtgcacagcggttctgagcacttaagccacaggtcgggaagggtccccaggcttccggggctctctctggtccatctccacccttcaggtaggatgtagagtcaggtcatctccttccttccctacggccaccaccagctggtggccagctcccaagccagcgccccgtccaccacttctggtgccccacagtcccagcgtggccccggtgaaaagcgcgcgcccttcggcgcgatccccacgctcacacgcgctgccgcttgttgctccccgcagccgcgacgtggggaagtgaaaatgaaattgacttttccgagaaatgatgaaagccgtgccggccgccaatgaacagcggcggcgaacttccgcacctccaggctggcggctggagccctccctctgcctccacctccgggttgcacaagcttgaaacaaacactggggaggaagggcggggagggaggagggcggagggggagcgagggagggagcggggccgggagagggcgggggtgggggggatttccagcctcggctcctcgcagtttcctctccttgttttgctttcgatctggactgttctcaggcaagccggggactaacttttagttttgctcctgcgattattcaactgacgggctttcatttccattttacacaccctaacaacactcacaccttgcgggattgtattggtagcgtggaaaaaaaaaagcacattgagaggtaacatttttttttttcaaataatagttgtggctgtgcgtgtgttttctctcgagggcatgttgacggggacaggaggagctatgtatgtatgtgcgtcctgatgctttgacacgatgttttgcagacggaaaaatgccggggttcataaatattaataccgatttttggaggaagagtcggcgcagttatggatcatctgattttaggggaagcaggggtctgctgctgttgccgctggtactggggctgctgaggctgcaaagaggaggaggtagagagggaggaggaggaggttagtgaaggtttaatttcacttttggatttgcagatgagaagaggtggctccatggacacagatctgctctgtgtgattctgcgctccaggtgtcgtgtgttgtgggtacaggtccgttggagtccggcctcatttaaaataaaattggtgtgtgtgtgtgtgtgtgtgtgttgtatgtgtatgagtgtttacagacactgtcgccaccaggtccgaggaagggaaccgggttcttctcggtgcccagcggcccttctttcccggcggtctctggtgtaaatagactggcacccgcggtccctagatgcccgtgcccgggcagtgaccactgtaaacttgaaggctgccctaaggcggtcccaggatgcgctcgcccgcggggcttggggtcgggtgaccggcgtctggtgccagtggacactcgggccgggcgggctccgcgcgcggctgggcgcgggcctggccggcgcgcccggcttcctggggactgggccgccgccacacgccaggaacgtcgcgtcctcctccccgccggccagcgtctggcctggcctccgggctttgtcactgcacttgtcccagcgcgtgaggcgcctcggaggcgcgtccccggagggctccgcgctcaggggtcacccaccccggcgcggcctagctgcgagtgcctccgggtccccgcgggcgcccccggggccggcctggcgcgctgggccccgacccgccttggctacggaacgggcgaggtgtgggggcggggaacctccggggaccgagcggcgcccggcgggctagcatggggttgggggtgaggctgacgaacgcttggggtctccgggacgtggtgggaatgagtgcccgccctgtgccctccgacccgctccgggcgccgggtgacattcgcccgccggccgaacatggttggtgcagagcggcagccaccacttcctctccgccccgccggcccggctctctgggcgagcgatgcgggccgcggccaatcgcggtgcccagctagtccctgtcgctcggccttgggggccggctcccctgagcggcccgggaagccttcgcgagagctcagggccccggctccccggacgctgtccgctgggccccggctctcggaccgtttgccaccctcagtccctcgccccttaggagcagggaagggaaggaggctagtagcctccgccgcgagccaggactgtgctcgggccccaggtgagacgcccggatcagtcggtggaggcgagatccttggtggtcggatgtaaataagacccctgggattggcaggccaccttgtcactcgtttgcgagcgggtttgcaggtccttaagcccagtgtgtttgaaacttgggggacatgtttcttgtcccctcctccctcccgcgtgggcactccttgtccttccttggttgtgtctgtaccagggaggcaaagtagtcctggggttagctttctgccactcgcctccctgtggctgggactccgggctgctcttgatgaatggctcctgagggtggaggacagttacatttcctgttgtgcattttcaggaatcacgggagcttgggagcttgttgtcatgcctgaagtcatttattagttttgtttgttggttgtttttgtttttgtttttgtttttttttatatcgactgactgcaagtaacatttgaagttagcagcctgcacttaaggtgcttaagggcaggtgcagggacccgtttgtttagcctactgtttttagaaggtggttgattgcatggtagacagatgcacactgcttggttagggcagagccctagaggttgccctgtttaacttaatcactcgcccaagtgcaggagtctctgatttttctcaactctcattcttttttggggggtggggtggcgtgtgtcacaaaaatagaaaccaataaaagcttggcatttggcttttctaaggcagcttcaagcaaatggaatatttcaggcttgagttggcatctctaaggggtaacgttggagcatctattgattgatggggcaaagtccggaacgtcactgtgattggtgaatgattataatttatagcctagcttgttgcgtaagaagttagattttgtcttgtgcttagatccaagagatcttgcctgttatgatttgttactgcttcttaaaattaaacacttacatatttcattctcaatgagtggtcttttttcccccccttgacctgcaaaagttaggaagagttgcacgtgtttcagaatgacttaacctgtaaaaatggcatcttcatgaaacaaaaaaagaggacttgtaatcaaattggaagcaaattgaggcaaaagagaaattgacatgaagtcctgaaggctctaggaactatgggctcctgaaatactttattaagtaaatatttaatataccagagcgagtgaaagctgtttaaatctaagagtggaagacttgaaactttggatagtcccttgacgcacattgatttcctcacatatccaagtgcaccactcttttaatctcagctttattcggtaaaatctggatcctcttttccagctttccccccaccccacccccttttttaatggcaaatagactactgaactacaccgggaattttattgcagatcccttatctgcctcctgccaaacaggccttagcgcaatctggagaacttatttatatatttgacaaatatttgtgggccatgaactaccagacacagtggcaggctctgtgaacccaactagaaccgtgaaggacagatagcctcttcaagttctacagaagttgcattctagctgtgagctgacaacaaccaaaaataaatccagtaattacctctgggggttggtctaagaaagggaatagtgtattctacttaccgggctgctttgggggaacaattgtgatactgtgtgtggaagaacattgtgtaaattatagtaacccacaaatgtgtcatgtattgactttctaagttctgttagattactgttaaagcgaatattagagaggtgagtgtcccggtacatactttttatcccattgaggctgaggcaggaggattgtgagttcaagtttagatacaggctgagagcttgtctttaaaataaaagtgaggaatcacaacaggacaggacagtgcctctgagggtacacaaatcatggcaaagaattacacatttggataactattatatgtaaagtatcaaaaatgtttagcagtgaaatattatgtgaatttttttctcttttttttggcctgctaggagaacagttgactggtatccatgaagaccaaatgatgtggggataactgacttggatgcatgtttttccaatttatttatacattaaattctttattgtaatgaacttacccataaagacatcataaaggtagagagaggcggccattcagacaaacacttgcccaatccccgtctctgtgatttctctgaacctctctgtggttggaaagggcccctctgaagtccacaaacatcacctggggggcttgcatttcgttaatcgttacatagttacacctaccactaacattaaaacctagaaaaacattagctttatgttctccttcatgcctcatggttccctttgcagtctgtctttccccatcacctaatagtactctttcttggtctcttttctaaatagcataggacacccacacttatagctgtgtacataggggtgtgtgtgtattataggctaggacctgagtatgagggacaatatgtttcccctttttataatgcaacacacaggtgtcactattctttggtctgaattttcttcaccgtcgtgtcagactcattaagttattgctgttatgggtatggcttagttctattctgcagtccattgcgctgtcattaaagggacttagttctattctgcagtccattgcgctgtcattaaagggacttagttctattctgcagtccattgcgctgtcattaaagggacttggttgacttggattcactgacgagtgcgcaacactatgtgagtaaaataatacgacattataagcgagaatgaacatcaatagtatagatttgtaatatatgatatgtgaacaaatacattgctgtgaagtaacaggaagtattaacagtaaagccaatgctattcatatgtatggcactccatactccttcctggacagggggagaggtgagcaggactttctacctctgtctgccctactcctgtactgctctttggtttgcatggattaatatttagttaagaatatcagcttaatgtataatggggctgagttgagtgggggtgttagccagtggagattgtagctaaggaggtttgatcaagctttgacttagccccaaaggaataataaattatgtataggtaccagatttaaacatgaagccattattttcaaataaaatgccaaggaaaacaatgacccagaaaaatgcaagccccaggcagctaccacccaaactgtggccatgtggtgaagatttcccaggctctgtgtgaattcagagcgagcagtaggcctatgatggctagcccttgactgtcaggtagccctttaagttgattttacaccttacaggattcatcttaggacagtccctgagacaaactgttcacgtaggaagccttcatgtgatttcttttcagtacttggatacctgtggcttccagtcagaactcctggtcaacttgtaaaaaaatgtgattcgggggctggcgagatggctcagtgagtaagagcactgactgctcttctgaaggtcctgagttcaaatcccagcaaccacatggtggctcacaaccatctgtaataggatctgatgccctcttctggtgtgtctgaagacagctacagtatacttatgtataataataaataaatcctttaaaaaaaatgtgattcgcatcaaatctagtaaaatctagtaagccttattctacccaaacagagggaaacccatgtgttggcgctctgggaaggtcctgacatactgggaccagctgaggccttccctcagaacttcgagttcctctggggacccaggaatcctataccattacttgaagtgaataatagttaaatgtcgtgatccacaaacatattcatttatcaaggatttgtagacaactagccatgtacagggttttgtatagagaaaggtgaatgggctcagaagcctagaattcactacatccatgcacaaaacacacacacacaaaacacacacacacacacacacacacacacacacacacacacacacacacacacacacacttgcacccacaagcacacatgtatatgccctgaattgaacccatagcctggagtgtgctaagcaagtgctctaccattcagctataccccgaaccttggcattgacttttatctctattattcattctttactaacttccccctttggaaccttaattccacaaactgtggtttgatagttctgcaatcctcaggggaccaggctagtacatttgcttattattaaatgaccaagggaaaggaacatttagaaaccattcaggattctttagattggagactggctccagtccatagcatttatagtatattacagaatatagtatagtatagtatagtatagtatagtatattacagtatagtatattacagtatatcatctatctcttcctctctcactcagtatgagcctcttgtcccctatggtgtgccgggcccatcattccagtcttcctccattgtgaggccagggcaaaagtacggaaccactcagtgttcaagggtctcttcccaggactaatatggataaccgtggatggttaagtcttggccttggcttagaggctatgccaagcaaacagcaagcaaaagctgcttgcttttacactgtccatacagctttgaataggactcacctgttttggggttgtccttattggcctgagccctcacagcccagatgatattcacatcatggctctcgtactctgacttttccatttccaggaagaccgcgctgcatggtgcagccttcgtgtgcaggaaggccgtagagagtgcgggagggttatttttcctgacttgttttgtttctgttctggtttgtatttccttccatcagctctaataagccagaaagaactagagttgaacaaatagatgtgtggggacccataagctcttggggatgcttccttaagtgttttgttttaattctgagagaacaaccaatgtagtcgaacatagatcttaatttaagattttgtgtgataaaagtctgtccagttttcattaaacgattttcttttttttgaataataaaatacctcccatgttactttcttaaattgatttattttcaaatgtacttatcaatatactgctatctttgtaccagctttggatgaaccttcactttaacttgctcttggtgagcctatgggtcaatccaaagagatagaggatgctcttttggcctgtgagcttcacatctctgactcattccacatcttgtttggttgatactttgaacgagaaggcactgaatccaaatggccttatttcagccgatatcagctatgcgttttgatattgttttccctaccctagatttactggagacgagaaaagctatgggaagagagtgtcctgatacctaaggagggtgttggtagggcggtgggtagaaaagtggccaagggggaattggagagagaataacgagaaagctagatggtgggttcttggtactggaagagagggaaggggcagttaggcaggcagagactctgttactgccacagctggcatggatggttaatattgatttttatttcatgtgtacgagtgttttgcctgaatgtatgtctgtgtaccatttgcagacctggttcttttagaggccaggcaagggtggcagattccctggagctggagttacagatggccgtgcgtctctgtgtggattctgcgaacagaacctggtgactctggaaagcatcaagcactcttaaccactgagccatctcttcagctccaagtttgaaaaaaacatttttttttaacattttaagcgttatatgccactaagttaaattccaggaaattccttacattacaaatcttcagctacaggatggagttaaggaaggaaaggggaacaagtacttagtcaagggtcaattgagatgctgaagagtttctgccgttgcctttggggttaaaccttttaaccccgtggaagatggattgtgacaggaaactgcagggcaggagcttacaggggacttgctggacttacaggagactgtcacctgggcatggttggggtcaccttgaaggtattgatgttgaagtattgggaactgaaggactgagacccacactctaagccccccaatctttctctaaaaaataacccaaaacaaaacaaaacacccccaaacctccccacaggcaatacaatgaatcaaagacactatggcagctctcataggcccgcctcctctcacccatgcttttctttgattggatgttactcttgtcagatcacaaatggtataaaggaaagcaggaaatatagaatgggcagtagtgtgttctcttcaagaataggtgatggttgaactgtgagcactgtgaccacaggtcacccactgttgggaaactgtggggaccataatgtagctgaggctttacacagaggaattttctggaattcaacttggcggtatatgcttacagtgttaaatgctgaatttaacatgcttgaacatttaacatgctacagtggtgcatgcttgccaccctaacacaccagggagactgaagcaggaggattgttacaaagttgaggttgtcttggggttacacagtgagtgtgaggctaatttggatacacagtgagactttgtttcaaaacaaacctcaaccaaacaagagttaaactttctgttctagtaatggtgcttctaggaacctacttcctggaggtgactggaggctagaacaaaggtttatgtattagggtgtttatagaatcagcttttactatataggtcttgaaatatctaacaagaaaagcatatgtaaattatgtcatagctgaaagataggtagtctttaaaattcataattttgaatggcatttaaagaggagaaatatttaacccatgctagttggctgggagaaaaggatattagattgtatgccacacaattttaaaaaaccgtatgtattttgttgatgtaatgctaaaacatggtgaaagaaaagagtttgatggtaggattatatttgatttttttaggcaccccttgagacaccgcacttttctaaatttgaatcaaatttggatcatagtcactgtcatacctaacgaagagttctcaaggcaatactcaggtgtccccactggttccctctagcaaatggggacaagaaaaaggaaattggcccgggcagtggcgcacatctttaatcccagcactctggaggctgagtcaggcagatctttgtgggctcaaggctagcttggtctacagagcgaattccaggacagctggggatataagaagaagccttgcctcaaaccaaactcccacaataaacaaacaaacaaacaaaaggagattgaacgttgctgaggatgctacctgtagactaagcttttcttctgctcactgtgctcccttgtgcagattccaggtctagaactgtggcctcttctagccaaggctgaaagacaccattgcctcactatgctaagaactagtaatggtctaagatgttaccccatttgacagttctgccttttatgattgtaaatacgacagaaatgcacgacatctgagcaggagacaagagctactgatatttgcaagcaagcaaacaagaggatcatgcagtgatggtccacgcacctagatcctggtgggtcatggttggggcatttcactgtgtggcggaactgtccctctccccttcctataggatcagggttcttctgacatacacaaccattaacatcttctgtggactgttccctatcctgtctgcagtagaaatgcttgggtagatagggctcttcttagctttagcaacctgggacaataatcaagcaagggatttggactgggtggtattgtttgaccctgttgaggagacgagtttttttttttcctatcagataagagcagttaatttagacaaatggccacagatctaattctcagggtgtatgcaaagtaagaggcctggcgaagcatcccttcccctttgcatcctataccttccccgttgacttcatgtcctttgtcccaggagggcagatattccccccatacccactttgcagatctcttcatagacaatcacttaggaagccgcagtcacactgtgatgtctgattttttgcagtggaagacgactctacgtgcctatttttttttaatctaatgaactattagaacagtttcactcctattatgaatacaaacttattttatcattgtgataaaactaaggttgggtgtatcaactactagcccagaggcagaaggatgaaaccagagagaggcaggattaatgaagaggacagtctccagtacaaaatacagcatgagccacttgcttatttcttattttcttttagtatctatattagaaaagtaaaaggaagaggtgacattaataatgaacgttgtttaacccattacttcccagatattattatttcaatataatcagtgcaaaaacaacgttattttgcattcccctttaaagcccagtatgttgctttttaagctgcagcttgtcttaattcaacctatctacattctgcgggctcagcagatacaggtgctagcagctaaccattagatggtccagcagatgggagatgcacagcggggagctggcgagatgctcggttgctatagtacctgttgcacaagcctgaggaccagaggctgatccccaggacccatgtaaaagccaggcctggtaatccacatttgtaatcccagcactcaggaggtggagacaggaggatgcctgtcagtgacaagccttttatcaaaacaaaggtagtctgtacctaaggagagatattgtagttatcccctgataccctaatacatacacaacacacacacacacacacacacacacacacacacacacacacacaaagagagagagagagaaacagagacagagacagagcgagggagcgcataagtgccctggggacagttttaatacaaggaatggagtttaaaaagaccgaagggaggcaggtgaagtcttttgttttcgtcagaacctcatggctctcctttgccctctcatcataagctttacttgatttttttttccccagccaaaatcaataaatatcccgagtgcccacaaaagcagcgcatagcacgtactgttcccatggccacgagctgtgtgtacacctgagtgtctgtgggcctctcggtgtgctgtgaaaggctctggttatttggacttttttttttatttccctctcctctgtgatatgttatttgagagtgtcacgtgtttctttgcattcctcaaggacacttgatacgcagtaagaactagataaatatttgttgctctgattttctgtttaaggcaaaagttagctcagaaagctgagctccaacttggaagggatggtacaggtctgctttgtgttagaaacctattggtacatgtatcttgcgcataggcatggagtctcgtcacttagcaaggagacttgtcactatgcagacgaggtgcaacactcagaaggtgaaaaattgttcagcttttccctttcataccaagacatttgaaagagcctgatatttcattcccaacagtgatatttacacctttttatgaatataaatctagttggtgataaactggagacaagcttccgagaattactgttttctgtatggattaaagtagtgatgcctttgttaatgctaccaacacagactcccagcccttaacctgtgcagtggaactcctctgaaatcaaatgcagtgttttatagctgcctccatttgttccccttgactttaattgtcgggctgaagcaccaggcctgttcacagagctaaggcaatttatttttactgaagccaacctaagaaatgcttaggtagcttgtcgctgcaagattaaatgtgaccttcatggaatcgtgttagcagggccagcagctagaaaaataaagactaaaccaaactgttcagcaacagaattcccagctgttcagtggggtagaactttcctggttatcccttccaataaaaacacagcaggttagttttaagtgaagtctagatggtttagggatttgcaaccgacagaagaacagaaaaatataatctcgttttaaaatgataatctggaaggctagtctatataatgagtctttcttggggggaggggcttggtgttttcctcatatgggagaatttaactctcatgcatagttggtctcacctttcaagttaaggacttcttaataaggaaagaaaagctgtaatggagaagtcaggcttgaggctgttgtcgcaacagcaggcgtctagggatgtggggcacattggtacctggcgccatatttgacactcccctttcttctctccactatagaaggaaggcagacgcttgaaaacccataagggaggcccaaggggactgtagatggactggttcttaccatgagatatgtcgcactgatggtgcgtgcattcagagtcattagaaaacataggagagaaattgctagggacagggggctttagggtatccaaaatattgattactgattgattgtatatttcttgagtagcagtacagctacagtttggtaggtgagatcaaggaaggtactcggcacaaaggattgactgttttgatcatgtcttgggtcatttacttgggggttatgtggtgaaaactgaagagggggcaggttttcttagctaggtattctccacaccaaggagcctcggttatttacagcgggatcaaacagctaggcaactaaagaaagagaatggttttagcagccactagaggttgtctgtgagtccaagggccagttcacagttctctcatcttgtctgtttggatgttactggtgtttgcccgtgacacttcacatatgtacctgcagcctatagagctcctgttgggggcctgattccattgagggaaactgatgtgactcaggcagatggctgtctccacttgatacttccctttccccagatgcagtcactggtcctgaataagtgctgccccactctctccctggaggcttgggctgagagaacctgcatcatggagtgatttgtagggctttcttctcacctggcctgagaggacatcaccatgaaggaaaaattggctttcagttaatagaaaaaatgtctactctctccccctcccccttctccccatccctctcccactctctcccctcccactccccctctccctctctcctctcccctctttccttttctcttcttctctccctctctctttctctttctctgtgtatgtctatagtgaatacttcaagtcacatgtgttaaaaatagttactattcatcagaaagactgaagaaaacagaggcaaagagtggcaaacttataaataaatgcactccttgtctctcgctctttcttttctgttgcaaattttaagtcatagaatttgcctttccagtcatctttaagtggagccctcaccacttaaccatttcctgaattaaaaaaaaagtctcaccagaaactcgattcatatttaaaagtcacttcgtttttctcggtccctggaaaccaccgttctcccttctcagggagcatggctctcggtgtcagtagaagcatctcacgtttgccattctgtctgacacatgtcacccggtggcatgttttctttggtcagccttgctatggcatgtgtcagaatctagctccactttcgaatgaaagatgttcacgcgtattttgttaatccgttcatctgtcggtggacactggggctgctattatctttgggctctcatgagcaatgcagctttgaatactgctgtaaaaaaaatatatcgatttgaggtattttttcctgggctcctctccatttctctgctccactaagcccctgtgggtatctctctactaagatgcttgctcctcttcctgtgttagagcctttcaaaaggctctcccaggccacctcttcagctggttcctcctgtacctgctctaactacttatcccccatcacctactgggtaagctgcatgtgaaaagggggtgcctctcctctaccatttgggacatgtctctccctcaagtctctcagtctgcttggggaaggcccagattgaacttcttgtcattacaacttttaccccctctgctacttccaggagccttctttacccccacccccgtcacggagctatggagctgaggggctgtggtcccacatcttccttaagcccttctgggcctctgtgatattggagtcctccctcggatggagctcctgtcttgaccctgtcccttgcgtctctcagctccctcctcccgctgcttctgtgtgccctcctgggcctgtagctttcttacaacctcccaggccctgtatggccatttatcttttcctccttggacccagagattttgttaaaacctccctatcttaccccaaatggcctagcctcagtacagtacagttcaatcaatgagcaaaaattannnnnnnnnnnnnnnnnnnngactgtcctgtaaactgtcttaagatttgtaagttcattgcacatgatttaaaaatctgtaacaaaatttagctgaagatttataacaaagggtttaaaagtctatgcaaaaggaatcttaatttgctctaacttactctgtctgagattcaacttttaggatatatcttaggatatattgcatataaaacttggattcaactcttgtttaaaaaatagatctactaggaaaatagatgtttttaaatagcaaccatgtggctcacctccatcttggtcgatgacctcatcgggagggaagctaccatgtgcctggcaggaatctttactaaatttaagagagtgtgtgcaatgtaactttaccaccgccaccattaagatgaccgtgtggtataacccaactaaggcaacactcataaaacttcactgccctaatgagatttctgcttatcactgaatctccttcagactaaggaggcaccggcaggtctccaaaaaaaaaaaaaaaaaatcttggaatgggatggatttctgtattatgataaatccccaaggttataaagattttcttagagatatgtgcctagccattcatgcttttaatcactattctataccaggattctataaaactttagataaggaaaagaggttttgttgaataaagtatgctttattctaaggttataaaggtatattcatgttagcagaaactgacttagaggtgtctgttgatctacaccagacttctaaaacatgtaggtaaagaacaatccatgtttgataaataaggtttatgaattctgaaagtctactcggagtaatggtaattgtcttaaaggtctatgtctagcctctgtctttgctaactctgttaagctttagatatttggataaactgaattataccagaaactatggtactttgtaatggtgtgctatgaaagagtcaagtaaagtaaggtgtgcagtctctttgtgaactttatttttggtctaagaaagctcccagtttccctgtgaactgaagtcatggacttattttgatgctaaaggatcttcaattaaatcttcaactcaaattttaaggctcagacttaacagggataaagctttaaagtactaattttataaaagcgactaacttgttgtaaaagcttaaagataattaagatatgcaagtcggtgctcaccttataaatgttccagttgacattcacacctgcagtcatgctgagtccaaatggcattcatttacagtcacaagctttctttagcttcttctttaggtttgcaaggctaagcctaaaacaagtaactaaagatgaagtttgtttaaaatcagctagacttaatagataacagtcttcaaactcttcagagatctcccgaaaatggcatttcaaatgtttaatgtaaaaaacttcccatgattgatagacagaaaggccagcgcttagtgtcagttctagggtctccaaagatgatggggtgcagtcaactctacttgggttgtggtcacatcagccactgcttcatgtctcacccgctgccagggtcctgcccaacctgtggaccctgttgcgttgactgctctgttttgcctcatcaatataggtcactgttttcaagttccttttccacaggaaaatctctgaccttctgggtttggcagcagcaggcctgtgctgtcctgtgtggcagctgtagaccaacccctgccaccctcctccaccctcaaccccagaaaaaacaaaaaaagcaaaacaaaaaccaaacaaaccaaaaaaccaaaaccaaaaccaaaaccatctgggaggctagggtagctagctggtaagtctctgtcattttaattgatacatagatcatttggattatacttcctgctacagtttatccgtctcagatctctgatggtgttgacggctcactagctacatcagtttaacagcatcaaagcaagacaactcctcccactaaggctgctgcagttgcccggactgttcatttcatattacctcaggtctcactttcctagagggtctaggtctcctgctgaaaaagacaggcaccgagacagtttaccttgctggaagccttcccacagataaaggtaaactcacaaagcaggtttcaatgtaacgttttactgtttctttatttaaaaaggcacttgctttgccatggctgctcctggtaatcaatcgccggtgcctcatggtaaatcaaagtcttattggtgttactcaccacagtattcactcgcaggggcatggggtattcaaaggcaggcactgaagtcccatcctagcctgggaatgactcttgggagtggaacctcggagttcccagcatctatactgcagtaccatactgtaccctatcctatagctggtgtactccaggcagaattccctcagctgtccttactgttgtagggaggaaggggtcttgtgaatccgttacatttccgggacttcctgagacccgggagttgtttaatatccccagtcttttggagcgtctccatagagcaggatgtttcacttcagatgtgctctttatacagtaggcccagcatctgcatgctgtctcagagggaagtccgtgagctcagccttaggacggtcctctttgtaatggttcagtactatactatgtggacagaaaaaatgtattgctgtaataacagatctcttaagtaaatcgagacaattgaatgtttgtcatgaatcatcaataggccgtggaacctcttgtttctgagacagggttttaggatgaagttgagatccatctcaaagttgtgatcttactgcctcggcctccttgtccaagtgtgtgctgccgagcacagccccggaatgagggacatcttactgattcttacaagagctatagtggatgaagacgtgtcacagtaaattcattgttagttgagatttatgctcaaatttttacttcattctttttggaaaattgactttattcaacgacacagcctggcaagttaatgcagatgatttacagtggactgtaaatatgggaacgatgcataagattgcatctaatacaaggtggggtagtagaagtctcagaacttctgattactccatccccccccttttaaggacattaatttatttttattcatgagcctgcatgtatgtctctgtgtactaagtgcattgcatgcccatgcaggtcagagtgggcatcagatctccaggaagtggagttatagatggttgtgggctacagtgtgggcgctaggaaccaaactagggccctctgcaaaagcagccggtgctctgaatagctatttcttcagccctggggaaaaaacctctccctcgccccccaagatcccctaaaattaactgtaagtactgtgcaaatgaacatgacagggaagaaattaagctgaagatggctctgcaaacaagtttaaagaaaactctctctctggagttaattccttcagcagatgcttgcgagcagctgtgtgtgaaacactgtactgggaagatgtaaaactgaaaaatcccaagcggtgctctccaagatcttatcgtttagtgatggaggaagcaggcgacataactgtctgcggtgacaaagaaaagaatgaagacgtatgagcatcagagaagcataacaagtatgaaactactcaaataaagaaaatatctaataaaataaaataaaaatcaataaaaagaagagaaactactcacgggacgagggaggaggtgacaccatggagtgggctttattcacagcttctggaaggagagagagagacagtgtcaggcaattgtggttggaagaacagaagagaaaaggaagacagggaaggctgtaaattcctcatgaagctggagcctggagagctgtcccgagtagctgagcagatgagtcggcaggggctatcacagtctctacctgacagcacatacgtgtgagtgatgccatgccagcacatacatgtgagtgatgccatgccagcacatatgtgtgagtgatgccatgccagcacatacgtgtgagtgatgccatgccagcacatatgtgagtgatgccatgccagcacatacgtgagagtgatgccatgctagcaatacatgtgccagcacatatgtgtgagtggtgctatgtcagcacgtatgtatgccagcacatatgtgtgagtgatgccatgccagcacatacttgagaatgatggtatgctttccacttccccagnnnnnnnnnnnnnnnnnnnnnnnnnnnnnnnnnnnnnnnnnnnnnnnnnnnnnnnnnnnnnnnnnnnnnnnnnnnnnnnnnnnnnnnnnnnnnnnnnnnnnnnnnnnnnnnnnnnnnnnnnnnnnnnnnnnnnnnnnnnnnnnnnnnnnnnnnnnnnnnnnnnnnnnnnnnnnnnnnnnnnnnnnnnnnnnnnnnnnnnnnnnnnnnnnnnnnnnnnnnnnnnnnnnnnnnnnnnnnnnnnnnnnnnnnnnnnnnnnnnnnnnnnnnnnnnnnnnnnnnnnnnnnnnnnnnnnnnnnnnnnnnnnnnnnnnnnnnnnnnnnnnnnnnnnnnnnnnnnnnnnnnnnnnnnnnnnnnnnnnnnnnnnnnnnnnnnnnnnnnnnnnnnnnnnnnnnnnnnnnnnnnnnnnnnnnnnnnnnnnnnnnnnnnnnnnnnnnnnnnnnnnnnnnnnnnnnnnnnnnnnnnnnnnnnnnnnnnnnnnnnnnnnnnnnnnnnnnnnnnnnnnnnnnnnnnnnnnnnnnnnnnnnnnnnnnnnnnnnnnnnnnnnnnnnnnnnnnnnnnnnnnnnnnnnnnnnnnnnnnnnnnnnnnnnnnnnnnnnnnnnnnnnnnnnnnnnnnnnnnnnnnnnnnnnnnnnnnnnnnnnnnnnnnnnnnnnnnnnnnnnnnnnnnnnnnnnnnnnnnnnnnnnnnnnnnnnnnnnnnnnnnnnnnnnnnnnnnnnnnnnnnnnnnnnnnnnnnnnnnnnnnggtgtgtttgttcataggccatggacttgacaggcagtgaaagaggactagatcctggccgtgttaataacaaggctcatcctttagactgactccccctcccttcttcctttcttccctccccctcttcctccttcccataatgttggggataaaaccccagaggttctgtatatgcatggcaagtacctttcctgaagaacaccttagcttgactgctttgtttgtttctaaggggggagtaatacaaagatggagaatatttcttgtgctctctttggttttgaatggattcattatgaagtgaagtgattctgagtcggtttataatactccacgtgaagaacaggttagggtagtctctcaagtttgagtaagattaaggagggtgaagaacggcagtgaaggccttagcagggtgggacatgtgtagggatggggctttcttcacttgggggagtcacttggcctttcctcctagcagttgctctgcctcctccccaagactacaccatgctaggccatagaatggcaggcagcacacctcaggtggaagactggaggcagctccttgtgttggctgttgtgtggttgagacttcttcctgtgcactactgctgtgttcccttggctgtggtggtcagagcacccagcttgatgggctgcaacgagggcatttatcaggtatttgctgaactcttcgcggtagccataagatgtgaagatccaacttagagaccttacctgtttccggggcttatttcaatttatttcatgcagcactgaattataaataactgccttttgaaaccagttatgcattctggagggcagtgaagtgcttttcacagggcagagtgaagtggcttgcctagacacattccataaacgtgggtcgagtttaaccgtatggttgatctgtctttctcattacctgtccattataggtagggataatagaggccatgtcctgtgcttcctggaaagagacagagcagacagtggctaggacagcatgacagtcacgtctgtacatgctctggcagagttggcagtctccttcacccagctcacaaggacccctagaaggcacaaggatcacatgctctcttgagtagccacgcccacccaaggcttgcagccatttccccaacatctgtctgttgcccagtggcaatacatctcttattaaggatggttcaaatgcacccgtatggctccttactcttgtctttctcccttcttatctttttttctggattatttttttttcttttccacccaaggatcatctatttttcaggcttagttcaaatgactcctcttctttgaaatcttcttggggaccttcatttcttctgagctttgatgtaagaaggtagagctctctcaacccagttaccaggccatccacctatggacaacacagggtggcagtcttgggagatgcctgtgcaatgttgggggtgagtgtgacatggaggttgaactggactgttgtgttggatgcccacattgggaatgcgatatagcaggagaggtctcagtgctactccagcatccccagtaggcttctctagtagtgcctttagcacatcatgacttgtctttgcttagctctttcactgtacctcctttgggcaccacgtctgagccatcttggggtctttgctcttcctcatgcttgaacttactcttcatggtgcatgagtcaatgaaggttgttttgttgttgttgttgtttttaaatgaaatgggttccctgggtaaggtgggaatagtagattggttcactttttagcctttatagttttttttcaatcgtttttttccttatcacccatccgtggtaaacttatcacagcacagagttaatatgttcatgcgccttcccctccctgctccatctgttctccaaaagggattcatctacttccttattgattactaattaatagatatcgttatacacagcgtgttagggaagacacttgccactaaggactttgcacagtgataagcgtgccttcaagtccatggtgtgggtgttggtgttgttaggtgggaggggtcagaggaagaaagggttgggaaggtggaatggaggtggattacagtggccggggtgagactcttagtccacattgtggaactagtcaaatgtcctgaccaaggaggtgttggggacatctatctggccatccctgttcagggcaggggatagacttctgttccacgtatgcctccgggctctctgtggggagtctgcatttgtcttctctcattaggtagagctcaccctgtcctttgatgtctctttggagaaggagatcaatgcagtctcagaggagttctgcaggattcgattgagattttggttgatgggtgaggacggtagacatgcttacaggctctacgtgggcaacattcaaatctaggtgtgcttgacacccaacctgagctatttctaccgtgttaggttttagtaaggtaaaagaaggaaagtgctgtgggtttaaagaccgttgaagctttacttacttatcgtgggcacgctccacactgcatgtgcagaggtcaaaggacagcttgcgagagccaaatctctccttccgctatctgggtttcagggactgacctggggtcgtcaggcttggcaccacaaagtgccttccaccgaggcatcttgctggcctcattgaggttttgaaaggagtttgcttcagaggagaatttggcaactatgcagtgcacaccagtttcaacttttggcaactgtctggaaattgagaggcagtgagtatcgtttaaaagtatgctaaggcactcctcctgctaacagggagagacgtggccctttgtcaagagagattcttgtacctagaagagggagccatgttacttctttgctgttggatttcattggtgataatgatggtttctctcaagaatagactcaaagctctgaaaactcagtgcctaagtttatagttcacatttgtatcttggaaccaagctttatctgaatgtaaggcactgtgttagagatgatggtgatgacgatgatgacgacgatgatgatgatgacgatgatgatgatgatgaaattaacaacactaagcgggtgccctttattgagtgattactaggacaactggattttggcaagaaggaggtggtcatgaacttgggtgcaaattgaagaagggtatcatttattctcacagagagggcagtgcagcagcctttcctacagcaggtgtttttctgtgtctgagaagccatttgttttcactgcattctgtgagcaataggcatgaaacaagagcagtgaacaaattgaagctttttgcaaagttttggtaggtttcaatggctgctctaagtatcctgttccttggcttttctcaccaatgtactgaacatattagtgtcgaagattgctcccctcaaaatataccctcctccctctttatttctttctaatgtgggcaggtgtttggcctgcctgcatgtctctgcaccacatgcaagcctagtgccagagaaggttagaagggtgtgttgcatcctctggcactggaattacaagtggtggtgagtagccaagtgggttctgggaattgaacctgggccctttgcaagagcagacagtgctcttaacagctgagccatctctctagcccctgttagtcttgttttatctttatgatcccaggaactgaacccaaggcctcacggatgctaagcaattgttctacactgagctatagctggatccctgaacagaccttttttataggtctgttaaagtaaagaaggacatgcatccatgaacgtctcagatcatctagattctgcctatatactgctatcctgcctttctcagcttctgagacatgtctgcccatcctccttgtgtagccccacccttttctttaaaaccacatctctgaggactagcacccccccttccttccttatttctattttatatgtacaggtgttttgtatgcatgtgtgtctttgtacaacgcgcatgcctaggaaagaaggccaaagagtgttccagatctcctagagctggggttacagatggctctgagctgctacctggatgtcgagaacaggacctgggtcttctggatgagcagtcattgcttttgacttctgagccatctgtccaggcccgttatgttccatcttaatttatttttcccatatataacctgcccatgacttataatggtttggtttttggtttgttgacttaaaagtgatattcatcagtatattttctcatggtgttaggcagtgcagctagcctcagctcctatttagctagctacaggaccacaagaaggtctaccagcatgctgcagtatgctgtgtggctgaaactctgttggggaggttagcattacgctctgtggctgaactgtggtgcataaattaggtgtaacaatagagcactttaaacttgaccagaactctttggggtgcagcctccctgagagctgaagagcatcttgctatttttcgggtgtgcatgaagacaaagcagtcgtatctgagctggccgatgccagaacaccttcatctcagagaggacaagggatgtgttgagtggtcctccgctcaactcctagaacaagaagctgtggttcagaccttgttttcgttctcctgttctgtgagactcggagtgttcagaggagatgctgattctgggaaaaaagggatcccgttcgcctcattttccacgtagagagaagactcgagaaggcagcatgagctggaatccatatgtttggaaatctggctgtggcaattgctttgctgaattgcccaaactgttgtcatctagtgctggctctggggccatgcacatgtagttcccccagcatggtttcaactttcctcaaagccaggctagaattgttctagaaaacgattattctaaaaactgatggaataaaataaatatgttataatttagttgtatctggacaataatttatttgtccaaccccacacagtttttaaaaaaatctttttaggtttgcaaaattattacatttgtagctgcaacaaattcaatgataagcatagttttttttttttaaagaaaacaggtttcacacatgactaaatgacttgagaaacattcctggaatcacatcgctgagattcatttaaaaattttgatgcttattgctaagcttctatcaggaaaatttgaacctatttatagtccatagtgcatgcgaaatataaagtattctaatatttttctttgtgtgtgtgtgtgtgtgtgtagactggaggacaactttgaatgtcattgttcaggtgtccttcaacataattacaaagacttgtttatttttattttatgtctatgagtgtttaactgtgtgcatgcgtgtgaaccatgtgtgcacagtgcccatggagatcagagatggcaccagatgccctagaattagagttatagacagttgtgacttgccatgtgtgttctagggaacaaatctgagttcagaggtgtccttaatcttggagtcattagtccagaagagaggcttccctggttgggaaaggatttggattttgaatcagggtctctccttggctggctctttcattaggctagactggctggccagcaagccctaagtatcctcttgtgtgccttctaatgcacacaaatagtgcacacgtgcgcgcgcacacacacacacacacaatacacacactcataaaaatacatcccaaacaaaacaaagtaagccaaagccaaagccaaaaccaaaaccaaaaaaaaaaaaaaaaaaaaaaaaaggaaagtaatccaacaaacctctggttgtagggaaattgtaacttggagagcaagtccctggtcagtgtctcaaccttccctcttttctgctggccactaggccacgaaaggcaagggacagtgctatggcttccttccaggtcttgtcttcctgcctgttttgccacaaaagctcaagtggacaggatgcgtgttgggtcccgctgagctcacctcttggctccctgtgttctctagatggacgatgcagagggcacagtgggatttcaggctttaaagcccaactccctttgctgctggatttcttgtgatggattgcaaaaaaacaaattgtttttatctgcccaattctggagttatgtaaggttacaggacttcctcttttaggaaaagtcccagacagttcgcttatcttcttgttccatctgtgtttgtgggtattgtagctttcattgtccttccttcaatctaaacagagttaaatgtgttggacccaatgagtactgtggccttatgcgttcctgtgtgatccataagcttgggaagatgacacatttcaggttccagaccctgggagactcttgccagagcgagagcatggccagatagatactccatctcccagcctttgtgttcgagggtccaaaggcacatggagcgaaaacttgtcccgtggggatttcctattagcaacgttacctctgaggctgaagatccgctttggttacccagcgcctgtgcttatggaacttggtgtccatgcagtgggtgaaacatagactgagacacagtcagaaccttctgggaagaaaggtggcaatggtagcgacctcacagggtgacatcagtgagaagccatgatgaattgaatggcagatatgcagtgcctggccattgctgttgtgatcgtcccctaccccagggtcacctgaggaatatagaaagcatgtttttgaggaaagctttatataatataatatgtaatatataacattatataatatataacataatatataatatatatacacacgtatacatatatacgcatatatatatgtatttgtgtgtatatatatacatatacataaatatacacacatatatacatatatacacatatatgtatgtgtgtgtgtatatatacatatacatacatatatacacatacacacacacacacacacacacacacacacacatatatatatatatatatatatatatatatatatgcagttcagttcaggcatagctagcttaagcacttgagccctttcaggagtcttgagggctttccccttgactctctggtgttactgttcttctcccaccccgtgcggtgtgtgttcagggaggccacagaacgtaagtgcttgcatgggtcccattcattccacagtgctgtgatatccttctttccatcagaactgaatgataaaagccatgtgtccagaaagctctccaggcttctaaagaaatgctttacggcttactcatcctgctacccatgtttagttttagcgtcactccacggcacttgcatggtggtgagacttaccccagtagaagcatcgattccagtttccagacgtgatatagatctcctccaaatgtatacagaaacaaataataaaccccatctagtttgtcacacatagcacccaactatattatagattgcctttatgataacttttggaataaaacatttacgtttacttgtttgtttgcctggtgtgtgtgtgtgtgtgtgtgagtgtggctgtgtctggtgctttgagtaagtatggcctccacagactcatgtgtgtgaatgcttggcccatggggagtggcactattaggaggtgtggatttgttggagtatgtgtggccttattagaggaagtgtgtcactgtgggggcaggctttgaagtctcttttactttaagctccgcccaatgtggaattcagtctcctcctggctttctttgcatcaagatgtagaactctcagctcctccagtgccatgtctgcctgaacactgccatgcttcctgccttgaggataatgaactaaacttctgaactgtaagccagcccccaattaaatgctagttttataagagttgctgtggtcacagtgtctcttcacagcaataaaannnnnnnnnnnnnnnnnnnnnnnnnnnnnnnnnnnnnnnnnnnnnnnnnnnnnnnnnnnnnnnnnnnnnnnnnnnnnnnnnnnnnnnnnnnnnnnnnnnnnnnnnnnnnnnnnnnnnnnnnnnnnnnnnnnnnnnnnnnnnnnnnnnnnnnnnnnnnnnnnnnnnnnnnnnnnnnnnnnnnnnnnnnnnnnnnnnnnnnnnnnnnnnnnnnnnnnnnnnnnnnnnnnnnnnnnnnnnnnnnnnnnnnnnnnnnnnnnnnnnnnnnnnnnnnnnnnnnnnnnnnnnnnnnnnnnnnnnnnnnnnnnnnnnnnnnnnnnnnnnnnnnnnnnnnnnnnnnnnnnnnnnnnnnnnnnnnnnnnnnnnnnnnnnnnnnnnnnnnnnnnnnnnnnnnnnnnnnnnnnnnnnacacacacacacacacacacacacacacatttgtaatgtgagtacagtttaacaaccaggatgcccatttgcctgcacagcagggaaacatcaatatattccaaggatggaaataacttgagagatccactgaccttatttgtaattcaaagggtacagaatcctggaagttactatcgcaagtcttctggcagtacagcttgcctgaatcgatataaagctatccgtagctttctttggccctagtcagttcagacgtctaattttgctgcagaatattattgtactggattgtgaggaccctgtcctagacacagtgtgtgtgtgtgtgtgtatgtgtgtgggggtgtccatatgggatgtgtgccttatcatctttctaaatccaaactatggaatcctgaaacattcctagcccaaagatcttgaatgaaagcttgttccagcgcagtggtttttacagccagaggatcctcctattctggctttccaagaacggccccactttttctttccttagacaaaatctcacctatgtgacacaggctgacctcatttttgattctcttgaggaaagtccctcttaatatctgtttccaggatagccactgacctgtaccatcagagcctgatccgtactcaaaactgtcccatcttggccaataaatcacacggtcaccatgctgaccatcacaaactgttggttataggcaccgctagagagaatgattaagttcttggtgaattcctatatatggaatttaaaacaggcaatatcctgatatcttgtaagtaatataacattatttataagaagtaattaaaaaatatattccctactgccttcttcagcagaattttctatagcacatataggtaatagagaaaagatattttattgcctatgaatttctctttgttcaccatggtgcttgatgttcaagacacacccactgggggtactttgcaattgtggatagtaatatatgtgtgtgtgtgtgtgtgtgtgtgtgtatgtatattatgtgtatatatatatatatatatatatatatatatatatataatatgtataatataaatgtaagtttttnnnnnnnnnnnnnnnnnnnnnnnnnnnnnnnnnnnnnnnnnnnnnnnnnnnnnnnnnnnnnnnnnnnnnnnnnnnnnnnnnnnnnnnnnnnnnnnnnnnnnnnnnnnnnnnnnnnnnnnnnnnnnnnnnnnnnnnnnnnnnnnnnnnnnnnnnnnnnnnnnnnnnnnnnnnnnnnnnnnnnnnnnnnnnnnacacacacacacacacacacacacacacacacacacacacacacacacacacaaataaacaataaaaaacccaacatcaataataaaatagaacaattctaacaatatagcataagttactttacatgtatgaattgtttgtctctggaacttccatttaatattttcagacagtgtgtgaccttcagtaattaaaaccacggaaacaatggataagggagaaaactgtaataagttacatgttatttatttaaaaaatattgattaacctttggcttttgccacaggctatgaccgttgaagcacatagatttgtgggggctttccttggggagactgagaaatcttgctgagggagtaattttgaagctaaatcagaaaactcagtaagccaatgtattagtcacttttttactagacactatgttgctctagctggcctggaactaattttgtagaccaggctgaccttgaactcacaaagatccacttgcctctgtctgaggggttagaggcatgccccaccacacctggtcttagttacttttttgtgttgttgttgtgaccaaatccctggcaagaatcaagggaagaaagatttgttttgacagacatttggatacaatgtcgtatggatacactgaatttagatacaatggattcttcattgaggccaaagggcatcgtggtggaaatgactgtggcaacaataggagtaagaggctgctcattcacatctggatgcatcagcaagcattgaggggtcaggcggcaaggctggcctagaaaccccaaggtctgcagatagctgacttcctcctgctaagtgctccctcctaagcattccaaagagcaatcttctaagcctcccaaaactgcccagggaactggtaactaagtgctcacatacaggagctagtagcggagggcggagggcgctttctcagacagtagcagcaagtggaagagcacatacatgaggctgagcgacaacagctattgaagccttggcgtagacactccctgcccccgcccaagcagtttggggtgcaaagacagcacaggggctggaagtcagttactgtgacatcagtgggttttcagcagacggacagaatcttaactggtgtttttagagagagtgttctggctgctctgcccgggcaggcttgtgggaggtggagggcagtcgggatggctgcttggtccagtctttgtagaaggaagcaattgttcttgagccactggcttcactttccatgggcacagagtcttagctgttcctccctggacaatggttatatgtactctgcttggttctctgaggtcagtgcagtgagtgcagtttccagcctggctggaacaagtaggactgaaggttcattcagacttccttctgcaaatgaggaaaagttgcaaatgagaaacagagcgcagcccttcctcagggtgggccatcgtggagccaagtacccgaaaggctgtgggagtgaggatttcaatcatgctctaaatgaacggatactgggaaggacaattttaggggctggtggaaaatagagagcttttgggcaattggctactggggctcagtgtgtgtgtgcttctaagatccacaacctgtgatgcctgcccagcaaaagatggccgagatgtttttctttgttaccagattaacctatatgaagccacccagtgcttctgtgaaatcaatggtgttttaaaatgttaaaagccgccctttttctttattttagtataggaagctggctggaggtacgtcttggatgtctacatttgagagacttctctaagcaagcaggccacctcttcagtcatctttttaatttcccttgcaccgtaacagttttaagtgactgatgaagggggactgcccatctttcccaggcaatgaagctcagaggctcatggaccagatcgttgttgggtcatcccttaagccaggcagaatagatggtaatggtgttcagtgcctggaatagaaagaaatagaaagttaactgaggcaccacagaaagagttttctagaatttgttgtatttgcagaaatttgttttcttccttccttgtaaattatttacatactttgcaattgtctttcccgccaggtcctccccttttgaactaatttcagacttagactggcgttataagaatactacaaagaatcccttttttctctccaactgctccccccatccccagaatcctcagcaagtcacttgtaactctgatgtctcatctctcctgcatacttgagtgtgtctttcctacatcaaagacacatcaccacagcatgaccaccagcaccaggaaacgcactggtgcactggtaccattaatgcacaggcccattcaagtctgccagatgtctcaataatggcctttgtgttgcgtctgattcagggccaggcactgcattcaggaacccttcctttttaatctgtcctcagcttgcatgaacttgacattttttttttttttgacaattagaggccattatcctatagaatatctgccaatctgggctccttgggcatttcctcgtgatgttattcaggtcaggtactttcaaatcacatcctcacaagtgtgatgccttcatccagcgttcttgtgggtcacatacgactctgatgtgaccctttcccgatgatgttcatttcctcgcctgattaaggagttgttagccttttgttgttgttgttaagttattcccccctttgttgtaaaaatattttgtgagagatacttttaggcctatgcagaggccccatttatcagtcttttcccttacagcttagtatttaccaatctttctccacctgctcctcctatgttttaaaatttattagggggtatgtctaggatgggtgtgtggaaggcagagggcaacttgctgtgatccgttctgtttttctaccgtgcattctgggaattgaactcaggccattgggcttggcagtaggcatctctacctactgagccatctcaccagccctagttattgttccttgagacaggatctggtgacatagcccaggccagcttcagactcaatatggagcccttgtaggccttaaacttgtgatgctgctcctgcaccagccttccaggagctgggtaaacaggctgtgcctgccagcatgccccacttttcatgggtgctccttacctgaagaattatcgctttgctaggtaccaaatgttaatgtccggttcccattgttctgtttgttgattgacattcttctttatggaaaagcttactctctgtttacttattcctggatccctacatttttattattacttatttggtgctcatattctgtctgatttggctaccatgggccttttaagctgaagtttgacactatgttgtgttctgttctgttctgttctcttctcttctcttctcttttcttttcttttcttttcttttctttttttttttttttggatatattttgttatcctttgaagaccttttccttttttcccccaaataagtaagcaaacactttggttaaggcttgtcttttgtgttccctggcctgaccttggagtcagccattgttctaagaatctctggttctggttagtggtgtattcagaaactaagctttgaacagggcattgttcttgatgtttctgtggcttgtcccaggctctctgagaggacaaggatagagaacacatatacacatggacatacatgtatatttacaatatgtatatatacatacatacttacacgcacatgctttttcacatctacatttacttctgtatttttaaaaaagatttatttatttactttatgtatatgagtacaccattgctctcttcagacacaccagaagaggccatcagatcccattacagatggttgtgagccaccatgcggttgctgggaattacaggacctctggaagagcagctgtgctcttaactgctgagccatctctccatccctatttctgtattttaacatgtgaaaaaccatgaatccaaaccaattccctctccactgctagcccagggccctccatgaagctagccttctgccggtataacttccttccctgtattctgactgtatttattctgtacttgcctagctgtgtgcatgtgctactgtcaagtcctgtggttgccatccttgtcccctggctcctgttattgcgcctgcatgaggctgctgtcttctgtagaggcagcctgtcatctgtctcccagcttgtttccttccttcatctgtcctccctgcacctcccccccacaatggccttcctcctttcatatacaaggatgccgctgccttctctccccactgaagctcactctatgccagtccccatgctcaccacgttgaccttctctcttcatccacggctattctacttcacactctgatcaccacagacggtgccgttgaaagccacagagatggatcctcttagttctggaagccagaagcctgaaagcaaggtgttggccaagttacttcttactggaggctgagggagaagactggtggaannnnnnnnnnnnnnnnnnnnattctatggcttatagatgggactgtttccctctctctctctctcttttctctctctctctctctctctctctctctctctctctctctctgagtgtgtcagtgtctagatatcatctacatagcaagacattgatcatatgggacttaaagaattatataattatataattataagagcctgaatagaccaccccagatagacttcttcggtattttttcaagctgattactctgggaaactcaggcacaggagtaggtctgggaagctctgtaaaagcaacctaagacatacgtgcagtaaagagagagacaatgtattagagagagtgttagcatcagagagggttgctatgaccactcttattacctaagaccgtatctggccaacagtgctttaggccacatatgcacttcacatgcatgcaaccataaccccacataagcctcaaatgcttctgtagctgaagatgttgcttatactccaatcacctgcctccgtttgggtcttgcattcagtgggatgcctgtgtgtatggtttagatagggtttcagataggactttcctcttgttaatctgccttatgccatcttaatttgtatccccgccaaagaatctagaagggtagaaggaaaccccattcatttccttccctacaggaggtaggcctactttaattcaggatagcctccttttaatgtgggtacatcttcagagataccattctcaacaaaggagctgcattcacagtttttggtagatgagaatgtcgtgaggctggggtgtttgggggaagagttttcaagctcgtatctgtttgctcttctctgctgaatgctctcttggcttaagtcatttagataagatgagaagaaaggaagaaggcagggagataggacctctttccagtgggttcaggagggaatcctctatagatagattagacccatcgtctcatctaaagtccaggccttctgctgacatcagaacagtctaggaaactctggattcagagtgagcacaggctagcacccattttgaaggtattgggcttgtgccttgaagatattgtagccttcactttgttcaggaaacatttccaccttctgtgctggctactttagtgttagggtgtgacccccatcccaagctgtccattttgaagccaaacaactatgccattgttcaagatgccagccaagtgtgtgtcccaaggatataagtaccatttagctggagcatttgggaggggtcagccatgactgtcactaatgcagaaggagaagatggctttgttgtcccataacaaagttcctttccacagtgcccaagagaaagcctgctgtgtaacctgtggcacagggcatccagtagtttgtgcgtgagtcttaattaccttgacagctgaaaaacctgcttcttcgccctgatttcttctcattccaatgtcttaaacattcccatgcaaatcatacttccaaattctgtcttagtccaagggttttactgctgtgagcagacgccatgaccaaggcaactcttataaagacaacatttaattggggctggcttacaggttcagaggttcagttcatcatcatcaagtcaggaacatggcagtgtgcaggcaggcgtggtgcaggcagagcttctacatcttcatctgaaggctgctagcagaatactagcttccaggcagctaggatgggagtcttaaagcccccacacacggtgacacacctactccaacaaggccacaccctctaaaagtgccactccctgggccaaacatattcaaaccagtatacattcccagtatctcattattcagctctgccacattttatttaaacatcttccaggagtctagatatttttttttcaatcaactgaaatgctttaaaagtataaacagtgttccttaagcatctttggtttttcttttacagagttgagggctggacccaaggccttgtactttctagacaagtgctctatgactaagctacatccccaatcttcccttaaatatctttaaccatacattttgtatctgcagaaattatcggttattaactaaaagctatttatttatatgctcggaatttaatcatctcaaactccgaggaagtttcatttttcttttcaggagagaaaaatggaattataagatcttggcttctgctaccttctgcatttggttctggaagtagtgccctgggaagtggatgcagttgacagtggccacctaacagcttttaagttgtggagagagtagtagcagagagttttataatggcaggctgatttctcatttataaaatcccaattcttatctcatataaggtgtggcaataaagagatgcccaggctacaggttcaccctgcacacttaaaagacacataggaaccaaggaggtttcccctggtgcccattttgcctttgggtacttagaatatcctggaggcatagttgctaagacaccaaaaaaccatcttacatcctgcttaaaggcctctatcttattccatgataaggaaagacaatgctgggccctatggagatcatgactctttaagacatcccatattggggcaagagaaatgggtcagtggttaagagtgcttgtagaacaattttgaggacaagaattcctatcccagcccctacataacaaacctgtgcacccttggaaccccagctccaagtgggaaggagacaagaggctcttgcgatcctgctggcttctagcctagcaggaaggtgtgagccccgggtcgaggagagactttattttaaaatgaataggcaaagttggaagacacccgactattttttcctggactctgtgtgttacacataagcacatgcacctgcatacttgcacacacatgggtaacttagataataatagtctttttaaaaatctcgttaaacattagggctgaggatgcgggtcagaagctggtcgtgtgctgcatctgcaaggctactgggcatggtggcacacttttataatcttactgttcaaggagtaaaggcaggaggatcaatttaaagtccgttttgactacataatatgaaacttttcttcaacatcagtgacaacacccaacaacattccatgttgctgagtgttgagtgatcccctggagactgaggcaggaggatcaggtgtttgggactaatctgagttgtatggtgacatattgagaccctatttctaagcaaaaacacaagttgtcaaattaatcagctatgaaccaggcaagatgactttccattagcatccagatatttcatagtgttatcaaattagtaaggcccatggtaacagttggaactccacaggccttaaatctccttcttggaaggtgtgatggcttatgtatgcttggcccagggagtggcaccattagaagatatggccctattagagtaggtgtgaccttgttggagtaggtatgtcactgtgggcatgggctttaagacgctcatccttgctgtctggaagccactattctgctagtagccttcagatgaagatgtagaactctcagctcttcctgtaccatgcctgtctggatgctgccaagttcccgccttgatgataatggactgaacctctgaacctgtaaggagccccaattaaatgttgtccttataagagttgccttggtcaactcacaaaatatgtactcactgataagtgaatattagcccaaaacttaggatacccaagatataagatacaatttgctaaacgcatgaaactcaagaagaacgaagaccaaagtgtggacactgtgccccttcttagaattgggaacaaaacacccatggaaggaattacagagacaaagtttggagctgtgacgaaaggatggaccatctagagactgctatatccagggatccaccccataatcagcttccaaacgctgacaccattgcatacactagcaagattttgctgaaaggacccagatatagctgtctcaagtgagactatgcctagcaaacacagaggtggatgctcacagtcagctattggatggatcacagggcccccaatggaggagctagagaaagtacctaaggagctaaaggggtctgcaacccaataggtggaacaacattatgaactaaccagtaccccggagctctggactctagctgcatatgtatcaaaagatggcctagtcggccatcactggaaagagaggcccattggacacacaaactttatatgccccagtacaggggaacgccagggccaaaaaaatgggaatgggtgggtagggaagtggggggggagggtatgggggactttttgggatcgcactggaaatgtaatcgaggaaaatacgtaataaaatattaaaaaaaggaaaattaaagatatataaataaaatgcaagattttcacctaaaaaaaaaaaaagagttgccttggtcatggtgtctgttcacagcagtaaaaccctaactaagacaggaggggaagttcaagtcttcctcagaaagccttaggaagtctcttggtattgagaaatacaggtcaaacaaagtgctgagatatttaagtggctgaagtagttctctggcttgggaatctggcactcttgtgaaggagtcggaagcaacatggcctcttagcttcttgtgcttctcccagcaactggcaggaggtagagatgggcagataggaagggcgtgttagtggcttccaataccttcagtaagtgttaatgtgaaattagcatcagggtggtgggacattagctttctgtaggacttaggctcctgagatagctctccaggttaatcagaaacagggccaggcagggcgcctgcttctcctcctttgctttcggttcctttgcaaacctggaagcatgcgcactggccaggcggccctgctttaggaaggaagttacgttgctgaagcaactggagagagtacccaagtgacgtaattggggaagtctcctctggttcttcctcttccagtttcttaaggaaaggggtggaaagagggaaggcgcctgcttcttagcacacagagagtggggaaatactgttttccttggaaaactacaaaagcgaagctgtggctggacagggtgtgtggttatttatgttaatccctactttccgggaaggcaccagacgggggctggatcaaggaaattgaaaaatggcttcctcttcagtaccctcagtccctggagctgacactgagtttgttgtactgtatcctcctgccctacctgtggcctctgcagcacaggctcccagtgtggagaagggtcagatggtgacatccaggccttgtggatactccatgtttggcctgcaagtatgtgtgtttcttacccagaggggaaatgatttggatttaagatggctgttcaagtctcagctgtaatggtcaggagtgatgtagccttggtcaccctatttaacatcaagggcctgcttcagctgtagagtaggaatcacagcagcactttcatactggtgaatgcacagagctaatgctctttatgcctataacttgcacaatgccattaagcacttgggcatggtagctgttgataatagttttcgctgagtgtggggagatgctggacttgacagcctgtgctgtttgcaggagcttgcaggtctagacctggatcctttagttattcacactcaaggtcctccacttagcagtaggttgtgttctaagaggtgactaagcttgcagaatatgagctaggctgttttcaaaccaagcttctcaatatagtatccgctcaatggctagtggctagcctcctctggcacctccacaggggtgtccagggaagatactttgtttgcaccaggcatctgtgggtgaccctgacttggaaactgtcttttactcttaggtgaggtgttaggtgtatgtaagtgactagcaagtagcttattggactctgtagataaaggcgattgttgcaaaagtctgccgggtagaactgatctatacttcttaggtgtaatgtgtaatactgtggtcatatgtatttacacatatagcaacctcaacgcaggcttccggctccagagaacctttgtcttgatggattaaagcatagaaaaatgaagcagacactggaaggcagtgtgattatatgttaaataattgttagaggttgtgttacgagttcacaaggggatttttgagtcctatgttgtagggtagacattgtagaagagatagcattggaaaatatgcagagggttggttgactatttcgtgactggacctttcttagtgctccagcctcatgcatctaattgaccctccaacattgtttggactgtcccaaggagatctcaaacaataggtcagaagtcaaccttggcatgtcctcagaccacattgggttgcagcagctgaacgccaatggctcccacctcatcggaaaacagaggaaaggaggtcacattagtgcacagatgtttgaagagtttgaaggagagttagaaagttagaaggaagagcccgtcggtgtctgtattctccacgaagccaccttcacgatcatctgctgccattaaagatggggtgagtccatgaagctcgaaggaggcaaaggccgaaagggcttttgggagaactgagaggaggcactggcaaggaaagcagcagagacccgaggatcggtggaggcggagtcacggacccggcctatcatgacgttttgcagcaagagcgaatgaggcaggttggtgagatccattcgtagtgaggaaatggagctactgtgttgggatgtacatggggccaaagcacattccagggagcggaagcaagagagccaggtcgagacacagaaaagcacctggggaagctgtactcagtgggcagagctgcccaggaaactaaaatgattctggagaattttggagacctaggaaggacctttctttgtaggtcatggcaggaggtctggactttttagaaagatatcagatggaaagctctgaacacgggcatggccactgcagacttgtttctgaaattgccaagtagaatctggaaacagaccgatgtcagaatcggccactgcaggactgatgaagaaggtagtaccgctaatcgggctgccctcatgaagatggagagggtgtggtcacagggcagcccggtggaagcagatggctaagcgtggcagtaggtgggagggtgagggaagtggcaatgagtgacgtcaagtacaacggggccaatcaaactttaagaggtctagcggttttctgattagtgtacttaatctggactccttagcacttgtctcggagctgctcctgaaacccaatggggcctctgagcacaacacaggggcaagagcattgcaagttgcatacattggcgaggcttaccctggagcagaagaaccattcttgtgaggctgtaatgagaaccgctttctgggatgactgtgtcacctgtcataccccaaactggcgatatgttagtgtcttttgagcatacatatggagaccctaaggcagttttgctgtgtgtttatggtggtcacacaacactacacattatgatcagaggctaagtcaaactgcgttaggtaccacggtagtctgtgcccagagacaatttcgtttttttgtaaaattgctatggtagtatataatatctcccaaaaggacccagaactcacctaatcagaaaattctgtgtagaaagcaggtacactaaactctaatttgtgtgattctcggcgtgggaagcctgctttgtgataaaggcattttggaattttaatttcatgtgcatttgtttcgcattagtcatgaacttcattcaccagtagcctcctcctgtcccatgactcattcggagatgtttgtcagccatcagggatgcggaaggccattagattaatgggcactaagtggcagtggttccccccacttagtggcatatcgaaattactctaagataatgaaagtgaatcctgttccctgccctggagagtcttattaggctggggttagggaattttccttcaaagttctccaggtgataacattgcacaatattgttttagagactgggagagattcaaaccagaaaaggtggctgtggcttgtgctgcctctgcctctgcctctctgcctctgcctctgcctctctgcctctgcctctctgcctctctgcctctctgcctctctgcctctgcctctgcctctgcctctctgcctctgcctctctgcctctgcctctctgcctctgcctctctgcctctgcctctgcctctgcctctctgtgagtgtgtgtatgagtgtactcgcatgcaaggtgtgggtaagtgtgcaccagtgtgtatgtgcatgtggagaccagagtttgcccctggctttcttccttatctgctttatctttgagatagaatctttcactgaacttagagctggttcacctagactggctggcccactaatcctaggaatcctcctgtctctgtctccccggtgtgggggctacagaggagttataatgtctggcttttcacacagatgctggggactgggtcctcatactgttttggtaagcactgtacttgatcaagcttgaaacatggtctttgtatttattttctgtgcatttgtgtgtgccggagggtatgtatgtacaccacgtgtgtgcagtgcctgcagaggccaaagggggacatagatctcctggaactagagttatagatggctgttacacactgctcgttgcggctcttcacttccaagccatttctccagcccccctggagtgtattctttgatggaactgacatatatctttaaaaagttttataaaacagcaaatcagaaaacgaagatgaagtttaacaaaactttgaaaggatcagcactctattggtttagatagcaatagccatttttttctatgtccatccaaatgtcaaaccatctttctgttttcatgactggcagtgttgacttacttcgtcaggcttccaccagaatatgtggagtgatgtgtacaaatgccacagagacacaggaaacagccaaatgtgaaatctaacacctcctcctcaacacatcacggcgtattgtcttagctctgaaggtgatatccctgtgcatgcaaatgtcagcaagctcttgtacatctatctcttagtagcttacaggttactaaggatgcatatatttatttatttttgtcttcttttatcccttatacttgccaatatcctctttccctacctgcctacacacgtacgtacgtacgtacacacacacacacacacacacacacacacacacacacacacactgttaaagggtcaggtcagcctaaatgcaattctctttaaaccttatcagccacagtattagtatcaacgatgctacagcaccatatatgatgaggtctgaaataggaggaagttccttgcaattatgtcgactctatttgtagcaccttcttatattttctattctatactccagtccattaaaattaaattaaacttgctgatcataaaccaagaatgccaatctttttttcttcttcttcttcttttggttttccaggacagggtttctctgtgtagccctgactgtcctggaactcactttgtagaccaggctggcctcgaactcagaaatttgcctgtctctgcctcccgagtgctgggattaaaggcgtgtgccaccactgcccggcgagaataccaatcttaattaaaaaaaaaaaaccaaacaaacaataacaaaacccccaaacacattgcacagtgccttagcaagcttttaccagcggtttgagaaacactgggttttgctgtggcccttggaggcagaaaggtttggattggatcttgagccttgccgctcctctgaggtcaggctaagtaagtggctccatttcttccagtacaagatggagatgagacgctctgcccgggtggcttgttgggaggctaaatgacgctatgcacgggaagctctgagctcctcgtaagctccggaatgaatgtggtattggaaaccatggtggctgtcgttctcagctccgcttctccccgtctctgtgcttctgcatggacgtccttacacacatcagtcagggtgaggagtctagaatattctataagaagtgaatgtggattagggggagaattattgagtgctaaccaagaattactactggaagtttctgttacagtccttgaactttataataatttccccctttctgttttcagggggagcatcgcccctctttcctagtcttcctttcccctcacccccatacctcctcccttttggctttttatttttaacttatttatctcatcttttgggatgggtttccttttttcctttttttttttttagctatttttactcatctctaaaatggaaataacaatatctgatggctaaggcggttgtgtgtgctactactgaagattggtgttaaatacctaggatttgtttctgaagtggtgggtgactccggagcatcatctgtgatgctgcctgaggcggttcctctgtcctcatcagcaccacagccctgctttgaccctcttttatctcaccctgcttgtctgttgaactctctttggccaggcatttcctctgctccaatctgctcttcctctgacataaatgctttccttggaaatccaattaatagtgatttatggattccttatgaactagttaacttagttggcaattaagtacagactgctctctggtctccactgcatcattttattatgataattacagaattattagttagcgttatatgatttatgtctcacatcctcagcgaacttatgagttccctgagggtagcaaccatagcttacatatctccaagtacacctacccccactacagcaattagcacaggcagatccctgtaatcctgtgtgttaagagctatctgttgagggtaactggggacccagacagcatgtgcctgaagacaagagtgtccagtgggctggggacatggctgtgtgacatggtaagtggcaagaacacgcagaagcactcgatgatgaaggtgcagaagagcccgggtgtggcatgaccactgtcagcttctaggacagagattcaaacccagctttgtcctgagtgatttagtttgcatctttctttcattgtgtctcacttgtgcacctgtctaatatgactcctactaaactgtgtatagaaaattctggaaggttaatagttgagggacttcaatttttatctctctctgtctctgtctctgtctctgcctctctcaactctcctgccttggcttcctgagtgctggggttatagggtaccccaccatgtttaggctatggtgggaatctgtaagtatttctccaagtaaaaaaatgacttgatttcatctttactcttgaatgaaatattgtctgaacataaaaatccacaaggtggtctttttcctttaatgctttttctttaaaattatttttgacatcgtgtgcgtgcatgcgtgtttgtgcacatatgcagccacagtgcagtgtgggggtcagagaacaacttctaggagttggttctttccttccatcgtagtgttgtggggactgaactcaagtcatctggtttgctggcttgggcctttgtctgctaaattatgctggcccaggacttctttcaaaggtcttctggcttccattgtttctgtggagtactgaatttgagcttaaaggtttgggatattttgctgttggctttgttttttcaaaggtaacatgtcttttgccctctgttttttttctttctctttctcttttttttttcttttcttttcttttttttttttttctgttttgggcttgggtatggtttttatctgtgtttggccatttgtggttttcagtgacttttgatgtgtgattagaaaatgtcccgttgtggtcttctcaagaatttgcctcacactttgtcttgtctttgtagactttcaaattagccacagtttaaaccctgcagtgttcccctatggaatctatgctcgtcttacactgtctcatctttgtgactttcagcctcactctggaatttcctttgacctgttttctggttcacatatgccccccacccccatccaggtatcaaagctatttttaggcacaccccataagttcttaattttaatgatatccattaattctataatttaaaatttttaatggtttatctgacaaaatttttccacctttgccttttgttttcctatagctggttttagaactacccaagggctagggggtggttctggctttcagtcagaatttgggaggcagagacaggtggatctctgtgaatttgagcccagtttgatctacatagtgagaccctgtctaaaataaatgcctgaagatgtttggtctgtgtgcatccatgtacataccattatatctgcttaaggcctgtgtctgtggcctgtgggtctgtttccactgatgtttgtcgccattgatctttatgttcctaattatagttactgaatgtagcgactgcatcagaagaactccagacagagtggttaacctttgagagtgtcaccgtcttcagtgtaagagtgacatggaagctctaggnnnnnnnnnnnnnnnnnnnnnnnnnnnnnnnnnnnnnnnnnnnnnnnnnnnnnnnnnnnnnnnnnnnnnnnnnnnnnnnnnnnnnnnnnnnnnnnnnnnnnnnnnnnnnnnnnnnnnnnnnnnnnnnnnnnnnnnnnnnnnnnnnnnnnnnnnnnnnnnnnnnnnnnnnnnnnnnnnnnnnnnnnnnnnnnnnnnnnnnnnnnnnnnnnnnnnnnnnnnnnnnnnnnnnnnnnnnnnnnnnnnnnnnnnnnnnnnnnnnnnnnnnnnnnnnnnnnnnnnnnnnnnnnnnnnnnnnnnnnnnnnnnnnnnnnnnnnnnnnnnnnnnnnnnnnnnnnnnnnnnnnnnnnnnnnnnnnnnnnnnnnnnnncgctccctcactccctcgctccttccctcccttcccctttccttccttccattattattttatttcagcttcagggatccaactgtgctcctcatgtttacaactcaagcactctactgaccaaaccaccttccgaacctatccatttatttttacttactctcatttattttattttatttttcagttatgtgtgtgtgcatgtgtgtgtctgtgtgtgtgagtacatgtgagcgcaggtgcccttggcagctacaggcattgtcttgccctctgagctggagttacaggtggttggctggacaggtgtacccccaacctgggtgcctacaaacaagccctggtcttctgaaaaagcagcaagggctctcaactgctcagctacatctccagccccacttaggttattacttacaatgcttgggaaagttccagggcctccttttcctggctcagttttgattgccagttgtctccttggtcacctgaatgtgccccaaattctggtcagcttctgagccctgcaacctcctcccagaggttggcacatgcacttgggatgtttagacatctctagaaggacataaagtcaaaatgtttgaaatggtattttaggaggatgcacgtgctggtggtgtgtaagaaagagaaacgggtgcaaaagggcccatagaacagcagagaggccatgctaactgagggcgatctggagtaacaagtagagcccctggcttcccccatcatatagactctgtagaatctcagtttcccaacctttctgcttttctctaagctatctctctataggggtgcgggtatgtcctaaccaagcccctgtctcctagggccgagatatttaaataacagaactcaacaaaacttcagtactaatagttgcttcatcagaaaatcaatatccctattgtaagaaatatggtaaaattgtattgctatcccaataaccaaatctcagttatttagccagagattaaacatggctgccaatggcaccagtcaggaccgtggcgttgttaacttcgttgggaaccacttgtagtatgttgatcacaacaagtaccttgcctggctttctgcagtggcctccgcaacactgattaccgaacagtagtttcaccatctcattggttttgcttcctgtggtttctcttgccctgggtcagctgtgttctgaaaacattaagtgtaaaattccctaaaattccataaataaacacgaagtactgagtgatgtggtgagtcctcacacatttggccctaactcacctgggcagtaagtcacccacttgtcctgtgtgtccatgtcctacaaggttgtcctcagcatcctagttatcagatcagctgtcacagtcttggatggtccgagctcaagtaacatttatcttagttaagcagtgcccacggggccagggtagtgaagcttgttaccagtgaggtggccaaaaagaaatcacaaggtttcttcatattcaaagataagagtcggtgccatggtctgcatgtggtggtcagaggacaactctatggttgtcctgagtctgatctttctacatttttgtactttcctccactgaaccaaccccggatggaggaatttcacatttttttggtagataattataaaggcaagagtaaggtcaacacatttttaaaggtagttattataggtagtagggaattagaaatagagactcctgttagagtgtagagctaactgaatcctcagcagaaaaatcaagaggggcaagttgctctccccttcaactacagcacatgagagccttagtgtgtatgttgtatgcagcgggaaaaatagtgaaaataaatttcagaaaatccctaattgtttttttttttttttttttttttacatttttattcacatgtcttggtttattttgtgttcctgaaatgaaacactggagattgtgtttttatgaaagaaaggtttttagtcttagaggttcaggaacatgaaacctcatatagcagacatgacagggacagagacttttggaattagattttaggggaggtgcaaggcttgctgatgaaaagtcccccattgtttgcaagagtgattttctctgtgtgtgtgtgtgtgtgtgtttgcctgtctgcatgccatgcctcgagaggccagaaggaggcatcagcttccttggagttggaattacagatggttgtgagttgccacgtgggtgctaggaaccaagctcgggtcttctgcaagagtaactgtgctcttaaccattgagatatttctccagaactctaacgaccattcattccggaacaaatccagccccctgggacctatccttggacctactcatgacatcagggctccatagcctagcagtagatctacttcttgaagttccaccaggtcaccttgtacctcactaggtaaaaggtacctcacaagtttccagcttatgaacctttgagggacaaaccaaacaatcagctacagtattgtggctatcgacgagataaacgttgagtctgggttgcgttgaattcctgttcgtgatgggctaacagacagatggagcagtagggcctggaaattagatgaatggaaaagatctgtcagctggaaagaccagacgttgtaggatgccatagaacacccaagcaataaatatgtaaaaattaaagggtatctggatcctggcttctcagagcatacaagcttagttttctctctggcaattgagcagttgcacaatggccttccaggacttgtagggtcaggctggtctttcgagtacttcctgttgttacctggtgtctggttgctggtcttttcttcttcaaggtcgttgtgttttctccttcctgtattagttcttgtaggtgccgtaacaaagtaccagactgtgtggcttatcaccatggttctctatttgccacagttctaccacaagtagaaaatcagggtgcctgcttcatctgaaaactataggagagactccatcttgtttgattccagatactggaagccttagatattctttggtttggggggaagattcacccaggctctgttgctgcctttgtgtagctggcttctctccatatctatatccctagttcctctttgtctgtattttcagttccctcttacaatgacatcagcttctggtgaaatgctgctcaggacattgccatcagtagataaatacatagccttcatgttttaagataacttgtttaacacaccctgttgactaacactgaatttatgctgagcaaaggaatatttacctttaatctcagcctccaggaggcagagctgtgcagatttctgggagttcaaggctggtttggtgtacatagcaagttccagggaagccagagctacatagaaagaacctggctcaaaaataaaccgctacaataaaatgatcttacagccaaacacatatgacactgatatgacacatgcctgagtctcttgagtaagcttgtctgattacatatattttctgcatgaggcgcatcacagcctctgtgtgtatgtgtgtgtgtgatcttgaattgttttgtgttgttgtaatagcacagactgaataatttgtaaaagacagaaatccattcttccgtaagtctcacctggaaagtccaagaccaaagctgaagcatctagtatatacttggtgtatctttcacatgacagaaggcagaagggcaaaggtgacaaaacctgaatttccacatgtcaggagtgcataagaacaagagaacccaccttgaaaccacttttactgaaatttaaatgtgcttatatgaaggtataactcccactaaataaatacatcctcaaagacctcaatacccaacactgatatattagggtctgggtcttactatgaaagtttgagggggcaaaagtaatcaaactatagtgggtgggtgagtgtgcatatgtgcatgtttgagtatgttggtgtgaataactgtaagcatggaagtatgaatgtgtttgatgcatgtgtgtacattagagtgtggtatgtgtgtgtttgaattgtatgactttaagtatataggtggatggatgaatctgtagatgtgttggagtgtgagcgtgtgggtgcattttagcttatctgagtgtataggtgaggggctggcagggaagcctccacttgcccatcagggataagccctatcaactgcttgatgtactcacagctcggtaccttatacttttttttttgcgggggggaggtttaaatgagaagaagatcaacaaaaaaacacagggatgtgaaaaatgtcatccctaagtagaccacagaaaggactttagtttaaagtgggagagaggtggtgagaatatagagaattgctctgtttgacctcagctgggtgtgtttgccccaggcatccagcatttcccccttttgtgcgagtaggtaatgactatggaaacaatgtaaggatgtgtttcgcagttacaaatacatctttagtaagctattgcctatgcacagaacttggaaagaatgcacaccagctgtatctctccttatgaactgttgcttaaaggagggaaagcttcgtgaaatatttcaagtgattatcatttttttttcttaaataggttatcagtggaaaaagcatgggggggggaatatatactgagatgatctcgcactggaagcgtggctcctcacctgccccctcacctgccccctcacctgccccctcacatacccctcatcctgccctgcccctgagtttaggcatgccagcagcacttctgttacgtcacctcagaagtagcgtccattgctttctcttcatgactcctgaaactgtccccactttcgctcttctggccccattccatgtggtgaggtcttcctctaagggaagattggaggacattgtggtcactactcggcaaggcagaggctttatggtggcagcggtgtgtctagcttctcgcagagttcccagcatgctttggcaactccttacacccgtacacaggactcttcatgtttctaattcccatctttaaagagtcctgtaagaatcaagatgttttatcctgtccaattctcagaacctccttttcagtccaagatctttgaatggatagatgatgaatgactaagagattgaatgaatgtgagaatggaacaaatttgagattcataaaaaacagctgtcttggtgactgttcatcaccttcccatgtcctttgtaacgcctccaaggcttttcctactgcctcaaaagattggccacctggagcctgcaggtgttgcatgagaccacccttccatggcggctttgccttgctagctcagaacttacctggtccttgtgttggccatttactgtgtagaaggaggaacttgggttttttttttttttttttacaagattacacattgtcctctgagaggatgaagttcatgctctcagagagctcacagtttgcatgggaaagtgaggctgcacacagctgaaaactttataggcataacaggagatgagatgaaagccgggactgaaatagctgccctaaagcaatgtctgcttcttgaggaagatatgtgagtggtgtaggagttgggagaggaagggttgcttcaggctggagtgctctggaatgacctttgtgagaagtggagaggctaggtcttggagcctggtggaagagtgacaacgcccaggaggaaggaagagctgggtgtgatgaagacacaaagtggacttgagctttgtgtgggggcagtgtacggagaaaaggggggatggctcccaagtacaaaggtgaggcccttgttgattcatgtcatggtgcttgttttcttggcaccagtgggggacagatcatagaaactagagtgtagagcatagaggattgcttggcaagatggaagagagaattatgtggcatgaatcatctcgatccacatctatagagttttttttttctttcagttaagcttggagcaaaagagttaaggttgtaaggtcacattgccatggatgcctgagtcaacatcaccttgaattccaggtgtcagactgaatgtaaatgtacaaacatgagtaggaagatgtcaggcagagagtgggtagcagctttattagttattccacaggggccgagtttgggtgggaagaaaagagccgactgtatagtctggtaggtaggagtgtgtgtgtgtgtgtgtgtgtgtgtgtgtgtgtgtgtaggcagtgtgtgccctggtggagtgacaatattccagccatgcaaatgattgtcaaaggaaaaatgagcaaaggtgaaaggcatgcaagtgaggccaaggctgggaggctggacaggaagggaaatgctggatgcagtgactaagagattgtactaggggagatgaggaagtaaagaggaggacagggaagtcactgctgagctctgaacatagagtacgtctagaaggaatgactagacagtaacaaaccttaaacctttagtggactaaattaattagcattttagtgccagtattgagaggtcaaagtattgatacatccgaggtcctcaagggatatatcagttaccatagctctttgtctcaggactgtttacccggcatttgatttccttttggatggtaaaatattggtccttgaatgttggatatgctgacagtttcttctataagcacagcacagagaggaaggataaaggtttattcgagacaaagtcactgagaggcatctgggcctacagctagttgggtgcatggcataccatgcccataaaaacttctttcagctgagagtcagcacggaaaatgtctggtctggtccattttgacattcactgggagaacaggattgtggaaagagcagatggcaggggaactgaatatactcaactcctgcctaggaagaggctgctgggaaaaggtccgtgccagggggtagaactttgtggtgcagataagaccgtcagtcgcagaaataccaaacgctgtccttctcttctgccacagggtaccatgccggtggaacggatgcgaatgcgcccgtggctggaggagcagataaattccaatacgataccagggctaaagtggctgaacaaggtaggtgcgcagtgcgtgtgtgtgcatgtgtgtgtgcgtgagtgaatgaatgtgtgtgtgcatgtatgtgaatgtatgtgaatgtgtgcatgtgtgtatatgtgtgcatatatgtgtatgtgtgaatgtgtgtgtatgtgtgtgtatgtgtatgtatgtgtgtgtatatgtgtatgtgtggatgtgtgttcggggacatgagagacagagagacagaagaagacagagagacagagagagacagggagggaggaggagagaagagaaaagagaagagaaggtaggtgtctcttgatgaaagtgggcccagtggatcaccaaataaagttgtgttcaaaatcttatgctcattcctataggaaacagccagtgattataaaatgcaaattcatcatatcaaaaagggtttggccacatttactgaacgacagtggggcacagggcaagggtggatgttaagtgatgaggaaggatgnnnnnnnnnnnnnnnnnnnntttcctacacatatatcctgtaggcactgcctgtgttttcttatagacgtttcagttttacaggtctcactttaagatctttgatctacttggagttagttttcatgaaaggcgctaggtatcggtcttgttttctttcttctgtatgtggtcagtttcccagcaccaagttgttgaaagaagatgtgttctccattctgtatcctgccacatggctgaatctatcatttctagaagttgttcggtaaagttttgaggatctctaatggatagtatcatgttatctgcaaatagaggtagtgtgacttctttctctatttgtatccctttagtttccatctcctaccctgttgctctagctggtgctttgagcacagtactgaaagtgaatagggatagtggacatctctgtctcctttcaagcgtttcttcatttcggatgatattgtcttgactttctgacatacagcctttactatgttccagcctttattttgttgattattatgattgtgagattttggtctttatgtccacttatgtagtttattatatttattgacttggatatattgaatttcagggataaagcaaacttggctgtggtgtataatctttttgatgtgtgtctgtgtttggtttgcaagtttccttttaactatgagcagtaagtgccctgtttaccattcgttctgtcattgactggttggagaatccagtcttgttctgaatttatctgtatggttgcttgtaatttttgccaggccatttgtttaggaatgcaggaggcctctactgcatggttcatcatttctcttgtagctctgtgtgatttccattctggttgttggtattcacagtaaggatttgtttagaccaaggcactgcagctgctccttggaccaatgacctttctctttttctcactttcaaacaggcttgtgtttttgtaaatatcagactatctctgcagagggtaaaaagtccaaacagaaggaacaaactagttagaacatcttatcagtgtgttggggggggggtggtcggtggctggagcagatagcagaattggtttccatggtcaccaaagtgtgtgtgtgtgtgtgtgtgtgtgtgtgtgtgtgtggtgtgcctttcaccatgctcaagacagtctcagtagttctccctcagttgggcaggtctgttcatatgcacacatgggaggaatcagatgcattctttccattgggagtgtgtacagccactatgtgtgcaggaccttgaaggattgggtcactggactctgaagatgtctcagggtctatgtagacatgttgcaacacggttcctatcccttggaacataagaatctttgacaagaatccttgttaaaaatctcagtttaaaaatgaatcttggatctggagagattggtttagcagttaagggaatatactgatcttgaaggagactctagttcagttcccaacacccatgtcagagtgcctcacaaccaactgtaaccccagcttcttggggacccagtgccccctgtacatgcacacagagacacacatacatacatnnnnnnnnnnnnnnnnnnnnatatgtatgtatgtactttctttatatgaaacccctacttgtgtatctacctgccctaacaaagtagttgttaatcatttacatttccccaaatgcacatgtgtgtgcatttctaatgttttgattttttaaatacagttcctcatgttgtcgtgacccccaaccataaaattatttcattgctacttcataactgtattttgctactgttatgaaccgtaatgtaaatatctgatatgcaggatatctgatatgtgatgctcagaaaggtcttgatatacaggttaggaactactggtttagaggaacagctaagtatgccttctctgaggagacccaagggagattttttttctttcaccaagaacaccaagaattctgagcaaatctctgtttcctcttctttactctactctctctcttcattttttaatctaaaggacacggtgaataatttaatggggcaggctttatttttgcaccaggtgcaagagcttaaaaccagaaagcagattgtggccagcttttagtgagggaaaaagatattgtcaagaaaacaaaacaaaaccaaccaaaacttctggtttcattttatcttctcaggttcctcttaaacttttttctttcccttacctatttattttgaatttaagaagactgtaattgaatatctctgcttgagtcctttcttccagaaaggatgggacaccgaaaaatagaaataaataaactacatacttgctttacatgtcctgtcatgtactggaaggttttgtggcaagcttggaagctgaggctcaggtatatgctcagtctctgctaaaaacacaagcaagagctcaggtcacccttgatcgctcagtgagcaacaatcaaataggggaataaggagagagggatggtagttcagagacagtgtagggagatatagggtaacaggtaaaagcaatggcagttggtatttgttaagtagtttttgctacttactcatctaagcaagggattaattacatacatcaagtcacttaatccccactctgggaaagggctgttattttccatgttgcagaccaggaaactgaggtacagagaggtaaggaaggctccagtgtgagattgattttcaagaaaagcaaatggtttgtttccactttttcttttttggacactagcttcctattctctcttttgctcctcctgaaccatatctgtatgtggcgaacacaaagtgtcattgttccttttgtgtcagctaggcactggcaacctgtagttgggtggtttttacaggaggttgaccagtagtctctagctctaaagacctatcccaatctttataatcttggaatgtggccctatatgggggtttcagatgcagttaaggacttcaagatgggagcatctggattaatctgtctggactgtaagtccaaggacaggtgtctttagaagagactgaagactgaagaagacacacacagagaagctttgccaaggaggtgtggtgcagccacagcctatgaactcctggagctatcagaggctgagagaatctcttctagaagcttttaaaacaccgaaaccctgccaacaccttgactttggatttttgactttcagaactgtgataggatgtatttcacctttaagccacttagggtatggtcatcttttataactgctttagggaataagtgtcccctctaggttcttctcattcatgggggctccttgtatgctatccactactcccagtgttggggataaaaaggtcttgtacatattgggcacatcctttgccactgagatacattcccagccttgtctgaatttttctactgtagggtcagaggcaacaatttctctttgtataactaaatccttagtgtgctcaggggggcattccctgctgggtttttctgctctggcttttggtgccacctttctcttccaaaagaagactggagaaagggacaacctggtcatctcttgaacacttctactaggctggacctgaggccgtctagttgaaaggagcatgtcgttggctctaacttcctccacttctcaggacaatgttgacacaggaatgcctaggctgctctgtgtctgagggtccctgttaggcaggtagcccacagggctaagctacagtaggtgtgtgtctgtgcacataaacagtaggggcctcagatgggtcagggtattttctatccatacctaaacttctacgggcatctttttataggtttcctctaactgaggctttttgacattcatctgttgacacaaatacttcaccaagggcatgttgccttttctttactattcacaagtactctaaagaacccctgtctattttgagtggctgggtgtctttccaaaacctcatttcttgttgaagactgttgggattctagtaaaacagaagacccatccctaagactttgtgattctcttacacgacagttggtttctcagttcaccttgtgttttcatggttgcagaatgtgttaatctgcttaccatgaatttatctgaggactcacagtgcaggtggcaggagcttctgtacagcatggagcccaagtcctggtgagggctgctttacaacatggctgacagcagaagacgcaagtctgtaagctaagagaaaatttctgggcagggtccgagttgctgctaaaaaaaaaatagcagcagattccttaaggaatgagagcactcctatcagactcaatccacttctctaaacagcacctacccattcataagggcagagtctgtgatctaattactctacactggactctcatcacttaacccatccgtgctgcagacaaaggaagccttgcaagacacactcaggctgcatccagaccctagcagtggatgctcaggatacacttttatccacgcctatgagctgtcagtacagtacagtatagctgtcctgatggttactctatgtacagtgccagacctagtatctgatcagataggaggcttttcatatagcgtgcttatgaatctgtgaataaaggcaaggaacccaaattcatggctatttttattgttgttgttttacactaagataaccaagcttggtggtatacatctgtaaccttcatactcagcatggctgaaaatttgagtctaaatgggctatctatggaaaccctgccagcagcagcagaagaagaagaggaggaggaggaaagaaagagaagaaaaaagaaaggaaggaagtcaggcaggtaggcaagtaggcaggcaggaaggaaggaaggaagaaaaaaaagaaaggaaggaagaagagaaatcaatgctgggataatggcttgaccactatcatgtctgtctccaaggaagagtccagtcagtaattatttaagccttaatttgttttcatgtcctacttctaataaaattgaaggagacctgtcatgtagcagggcccagccacagtggaagagtccagatgagcatctaagaagttgccagagcagcatccgtaccacttgtttgtgaaagacaccgtggaagggccatctactctttacgacagtatttgcatgtggcatagtacggctgagtcatacatttagaatgagtagaagacccaatctacccacatccaggtttctcactatctatagctttaccttttctgtgtggctagaagggggttttatcttaaagccattggatgatgttgcatatctgtaaggtttaacggtatctccttattatctcctatatctttgtcatttggacaaagtcaataatttttttttttttagtatcactgtcccacttacattcagatgttttgtatattcccaagataccttctaaaaataatttatttttgagattataaatattaacctcacttcctccttttctttccaccttctgcactcttccatgcatcccctgccccccacactcttgtaaattcatggcctctttttcttccattgatatttattcttaaaccataaatataacctgttcagcctgtataatattacttctatgtgtgttctcaggttgaccatttggtcacatggtagatttatttttagcttccccacaatgatttatagactggtcggactagtttgcaagcctgccagcagtgagtgagagttctgatcttaccacatcccctctccagccttggctgtctattgtttattaatctttgacattctgactgcggtgcaattaaatctcagagttgttttgagctgggttttcctaattgctagggattgtgaacaatttttttttctgatatttcttagactcccccccccccccccttgagaactctgtgttcagattcaggtttgtcttttaaatgggtcttttgtttctttgtttgactctggttttttagttctttatatattctggatgttaattctctatctgatacatagctggcaatgattctcacccattctctgagcttacgctaatccttgttgactgtttcttcagctgtgtggaagacacactttttagtttcatgaaatctcccttgtcagttgttgactttaatgtgcaaaccaatgaagtcctactcagggagtcttttcctacacatatatcctgtaggcactgcctgtgttttcttatagacgtgtcagttttacaggtctcactttaagatctttgatctacttggagttagttttcatgaaaggcactaggtatcggtcttgttttctttcttctgtatgtggtcagtttcccagcaccaagttgttgaaagaagatgtgttctccattctgtatcctgccacatggctgaatttatcatttctagaagttgttcggtaaagttttgaggatctctaatggacagtatcatgttatttgcaaatagaggtagtctgacttctttctctatttgtatccctttagtttccatctcctaccctgttgctctagctggtgctttgagcacatactgaaagtgagtagggatagtggacatctctgtctccttcctgatttctgtcgtatcgattcaagcgtttcttcatttcggataatattgtcttgactttctgacatacagcctttactatgttccagcnnnnnnnnnnnnnnnnnnnnnnnnnnnnnnnnnnnnnnnnnnnnnnnnnnnnnnnnnnnnnnnnnnnnnnnnnnnnnnnnnnnnnnnnnnnnnnnnnnnnnnnnnnnnnnnnnnnnnnnnnnnnnnnnnnnnnnnnnnnnnnnnnnnnnnnnnnnnnnnnnnnnnnnnnnnnnnnnnnnnnnnnnnnnnnnnnnnnnnnnnnnnnnnnnnnnnnnnnnnnnnnnnnnnnnnnnnnnnnnnnnnnnnnnnnnnnnnnnnnnnnnnnnnnnnnnnnnnnnnnnnnnnnnnnnnnnnnnnnnnnnnnnnnnnnnnnnnnnnnnnnnnnnnnnnnnnnnnnnnnnnnnnnnnnnnnnnnnnnnnnnnnnnnnnnnnnnnnnnnnnnnnnnnnnnnnnnnnnnnnnnnnnnnnnnnnnnnnnnnnnnnnnnnnnnnnnnnnnnnnnnnnnnnnnnnnnnnnnnnnnnnnnnnnnnnnnnnnnnnnnnnnnnnnnnnnnnnnnnnnnnnnnnnnnnnnnnnnnnnnnnnnnnnnnnnnnnnnnnnnnnnnnnnnnnnnnnnnnnnnnnnnnnnnnnnnnnnnnnnnnnnnnnnnnnnnnnnnnnnnnnnnnnnnnnnnnnnnnnnnnnnnnnnnnnnnnnnnnnnnnnnnnnnnnnnnnnnnnnnnnnnnnnnnnnnnnnnnnnnnnnnnnnnnnnnnnnnnnnnnnnnnnnnnnnnnnnnnnnnnnnnnnnnnnnnnnnnnnnnnnnnnnnnnnnnnnnnnnnnnnnnnnnnnnnnnnnnnnnnnnnnnnnnnnnnnncagtaattggtttccatggtcaccaaactgtgtgtgtgtgtgtgtgtgtgtgtgtgtgtgtgtgtgtgtgtgtgtgtgtggtgtgcctttcaccatgctcaagacagtctcagtagttctccctcagttgggcaggtctgttcatatgcacacatgggaggaatcagatgcattctttccattgggagtgtgtacagccactatgtgtgcaggaccttgaaggattgggtcactggactctgaagatgtctcagggtctatgtagacatgttgcaacacggttcctatcccttggaacataagaatctttgacaagaatccttgttaaaaatctcagtttaaaaatgaatcttggatctggagagattggcttagcagttaagggaatatactgatcttgaaggagactctagttcagttcccaacacccatgtcagagtgcctcacaaccaactgtaaccccagcttcttggggacccagtgccccctgtacatgcacacagagacacacatacatacatataagtacaaaataaagtgcaggcctacaatgaaacttatacttttccatgaaagtatttccaagctctggaatatatttattcagcagtgctttttatgcaatatgaaaaactggttaaaagctatgtgtggtttttaaaagcttaccactttaacttttttaaagtgtacatttcagacacattaggcacctgcagggcataccacagccacctaccaactccttccagaacttttctcaccccacccaaagaaaacacctcaccccttaagcaggcactgcctttttcttctttcctcagttcctggcaactgctgagccacctttagcctctaccaaagcttctacaggaagctttgggcttcctgggcattcggtataaacggggccattggatgtttgttccctttgtgttcctttggttgtgtctgggttatttttgttagaaccatctttaaaaagtccatccatatggttgtatgtgtcagtacctcgttcctgatctgtataaactaaatggaatgatatccaatgacatgcaagaagtttagtagagtgatagtcctctgtatgcacgcaccacacttggtttctgggtccatcagctggtgggcgtttggactgctttcatcatcgggctgtataagtatgtgtatatccacgttatcagtttttgctaagtacttataattctttgagtacacatccagacattaagcaaaactgtggcattgccagcgttgtgtgctcacctttctgaggagaggccagattgtttcccacagtggctttgctagtccacgtgtcccccnnnnnnnnnnnnnnnnnnnnnnnnnnnnnnnnnnnnnnnnnnnnnnnnnnnnnnnnnnnnnnnnnnnnnnnnnnnnnnnnnnnccgcagtgaaggtgttgttttagtttacaactccttagtgattggtaacaaccaacacattttcatgtatgtatacttttttaaattttattttatttttattttttcggttctttattcatgtatgcgcacaccccccgcaaacatgcaatgcttgaaaagatgttgcctggcgaattcaggttgtgttccgtcggaatttgtttcatctagaaaaccttctgtacttattctttgatggtttcatacatgtcaacagtatattttgatcacatccatccctcatatccctcccactcctcctggaccccacttcatgttcttcatgttcttcatgatcttcatgttcactctttttgtttaaaccattcacggagtttcattagtaccacccatgagtacacaggtatggggccgtcagctagagcatgagtgatatcttagcagccatacctccaaagaaagatggcactccttcctgagcagcagccaactgtcaaattgctcctcagcccgggtgagactttgtgagcctgtctcccctccgttctcaatgctgactggcttggttttgcatggcagacatagctggggctagttcacaggtctaacagtcatgacgtctctcgacacttctcttcactctcccagtgtcacagtctttctgcccctttgtccgtgccactgcctgagttttgaggcacttgatgtggataactcatttgggaccaagcactaaatagtcacttattcttagtggctctgaatagttacattggatgctgcccactgcacaaaggaacttctctagccaagactgggagcagcactattctgtggctataaacaaaaatatttagaaggcagtctggaaacacgtcaatttaggggaaaaaatgtcctgggtttccagccagggcttgcaacttttgcccaggtttacaatagcagacacaaatctgcacctgtggagcaggtctcaaatgcaagcagagagaagctggttacagacattgctgtcacactgcaccagtggacacgttccctggctggtctgcattatagcatacagagtccagtgctggaccactgacagtttaagacactgatgtgtttcctccctggcatctctgtagcaccttgcagcattctgaaatctaggcatcagggaaaccttcccatcaggtcatgtccttttcattcacattcattttcacatcaaaataagagacctcattaagtaattttgctctcggatttttcatgcacattaaaaatttaaaattccactcagcccccttcattggcccacctgtgggcaacacatgctgaacagtgaagaatatgaaaatagctgtaactttcagttcttctttattaactgcctgttataaatacagtcaatttcccctctctaataacagttatggaaactctccagcattttgaaatatcgtcagttcagtctctgtgagtggttttgtgtagagttctcaagtcccttggagacagctgggtccctttctagactcactgtgtgagatcaggtggtggaaattccctcctgaccttcgttttcttccccactggatgatgctggcatccctggtatttagaaattatctggagtccccaaaaacttgaaggaaggaaggaaggaaggaaggaaggaaggaaggaaggaaggaaggaaggaaaagaaaaaaaaaacacctctcccccaacctccatcacattcctgggctttaatcgccatagaatcccagtcaacaggacagagaatccaaatctaaaaagatgagagactgtgtgtggggtaatagggggtcacatgaccttggctttggttttagatacttcgacccccaagaattccttggtaaaataattgattcctttcttcagttcctcacttgtaagattgaaatcataagtttaactccttaggcaataacaagaaacaaaaatgagtctcatgtgcacgtgcacagtcagatgttcggtgtgcaggcatgttcggtctgcaggcatggtcagagggcaggcatggtcagagggcaggcatggtcagagggaaggcacggtcagagggaaggcatggtcagagggcaggcatggtcagagggcaggcatgatcagtgtgcaggcatggtcagaggccaggcctacccaccttcctttcacacatgggatttcacaatgagtaggacctttttcctggaacattagtttctgcatgtctttgctagattgatcgaagccattgtgagttgtggtcagaaaggtagagtctagtataaagtttatattgaaattattgccaagctggatatctttgcatttctttctactatgtccaagacagtacctagacctgagagggattagaacagtatatgcacgtgtgcacacacatacatgtgcacacacacacacacacacacacacacacacacacactgcaaaactgaagttacttgtttcctgaagcagtggtttccaatacactagacattcctttagcagcatgacaagaagaaatgataaaatgcttactagaagttccagccagaggctcgttgtcagtcgaaaggcaagggggacatagaagcatggaacaatacattgtagagaaaatcttcacctttggccttataatatacgtttttgttttgttttgttttctgtcaggccatgcaaaattctaaatttcctcctggtcagatcattagaattagggacccagtggggcagtgggattgttaaattttattttacttgcattttctttaagttgtgtgtgctgcatatgtacagcatgctcacggggttcctagtgtgcatgtataatggccgtcctcatcagtagctctgcaccttagattttgagacagtgtctctcactgaacctggagcctactgacggggcaagactgagcatgcgccaggagtcttctggtcttaactttagcaggactaggattacaggctgtgctggatagacttatgtcaacttgtgagaagctaaaaatcttctgagaagagggaacctcagataagaaaatgcctctggctctctggctatagacaaggctgtaggaatttttctcaattcgtgattgatatgggaggatccaacccattgtgggtggtgtcatgggtgggcttgtggtcttgggctcaataagaaattaggctgaacaaaccatgaggagtaagcctcactcctccatggcctctgtatcagctcttgcctacaggttctgccctgtttgagttcctgtcctgactctcttcaatgataaacattgatacggatgtgtaagccaaataaacttttttttcctactttggtcgtggtgttttatcacagcaatagtaacactaagacataggcacgcactgcacctagctttttatgtgggtgtttacacttgggtgttcatgtttgcatggtgagcacttagccaactgagccaacttcccagcccaggggcttgtctgacagtcgacttccctgcagacactcaacagactcagttttgcttagctgtgaagttgagcactagaactttagatgcagcccatgtgtcttcagtcaaagcccatgtcttgcttcagtgtggacctaactttttttttcccctttcatttcaggagaagaagattttccagatcccctggatgcatgcggctcggcacggatgggacgtggaaaaggatgctccgctcttcagaaactgggcgatccatacaggtgttaaaccttgccttgtttattcacacagttnnnnnnnnnnnnnnnnnnnnnnnnnnnnnnnnnnnnnnnnnnnnnnnnnnnnnnnnnnnnnnnnnnnnnnnnnnnnnnnnnnnnnnnnnnnnnnnnnnnnnnnnnnnnnnnnnnnnnnnnnnnnnnttattacaaaaattctgcaaggagatatctttagatgtggaccttttatttcatattggaagctcgtctctgcttgttggcattctagtcttgtgtatagttggcatctcaattctaccattttattttccccctcaaactatatggtagagccagagtgaccatcttgtcacggcgtggcttccattgtctaggcttttaaaaataaaatgccagcaccttagaaatgtctcagcaaaatgggattgttccagcaaagcacttagaacagaaaggctttttgcacctcccctccttcccagcaggactggtagacatcccctccttgtctaatgtccctcccccttttccttatctttggctattttgctaggaaagcatcaaccaggaatagataaaccagatccaaaaacatggaaagcaaattttcgatgtgccatgaattccctgcccgacattgaggaagtgaaggacagaagcataaagaaaggaaacaacgccttcagagtctaccggatgctgcccttatccgaacgaccttccaagaaaggtaaagatgtttaccgactaaataaacgaaccctcagtgtccgtaacagtaccattttggttttctcatttctgcctctgtcatcactttccagggtagaatacttgtccactctagatgagacaatcctctctttactggccttggaaaaatgactttcaaggcaccaaaggcagaaaagaggcctttggtattttgatctcatatcaatgaggcagcgggtttcagaaagaatgtcatgtaagaacgtccatgtttctctgtccttccgtgaattgatccagaactacctttctgttgccacaggaaagaaaccaaagacagaaaaagaagagagagttaagcacatcaaggtaatctttggttgactagaaagcccctgttgtgaccgtattgtcatggtacctgttctgtctcatcaggaccttggcggaggctttggcctttctcctgctattgcgttttacatgcttttaacatctcctctgcatggacccacctgcagacacaagtccacagatactttgcctagtccagcgtcccagagcaaaaggtgtagatgatgccactgatccgcagagcttggcagtcccatgtctcagctccagacaccagcttgtatctaaggctgtgaaatatgactttagaaacatgtttgaaaatcagagaaaaaaatttttatctctaatagagatgtattagctctatatctgtcacaagccattaggttgggaacacagtagttcgtatactccattagcaagagtttcagtggttcattctctgctttgtgagcgataagtcccaggagttttccatggagacaggtctgtgggcttaaggttttcagttgactaggttggtctaaccacacccctatatttcaatgatcttagtgcatagaaggtgtagtagcccttgttaaatacggaggaaggtgtcagataatcccatgcccgactggggaggtccatcagttgttaagcaaagagcacacagcacagctagagacccaaagaccacccaagagatgatataagtgcctggcttctgtgtacagagtaagggactgaagaatgagttgactggcctttctgtaagatcccatggctccttagcactgaaattgaagtggatgtaggacattctgatttatcttaaaaaaaaaaaaccacgaagggacataatttaggtatctcattagacttcagaagggacagcatcctgtgtgtgccatgagggtacttggctgctctccaggattctccgcccctgccaggtaccttcatggaaaatgtagtagtgtctgtgtagaacctatccacatcttccatctactttaaattaccccttggttactttttatacctaatatgatatgaaagttgttgtgttttatcatttagataacaataagaggaacaggtctatatatgttttgtacagaccagtgattggttgaatatgtgggaaatatgtaggtctagaattgtgaatacatatggctgtctgttgttagacttttttttttttaatgtgtctaggctgcctacatgtatgtctgtgcactatgtacttgcctggtacctgcagaggcctcagatcccttggagctggagttaaggacagttgtgagcctccaggtagatgctgagaattgaacccgggtcctctcagagagtagcgagtgctagtaactctaaagccatttctccagctcctgtagttagagtctgagggaaatcttagctagctgttcaaggttgagaggtgcttatctctgtgatggaaaataaatattttaggtagactagcagtgacactttgtttcatttttgatgttttaaagtttctgatttattttaaaaatagcaccggactggggactggagaggcagctcagtggttaagactgtgtctaggggacctgagtttggtccccagcacctatgtcaggtggctcccaactacctttaacttcagcttcaagagatccaaagccctcttctggcctctacagacatacacctctctctctctctctttctctctcaatctctctctctctttcccccccccatatccctctctctctcacacacacatgcttaaataaataattcaataaatagcataggactaatgattaattttgttgtaatttttattgtggaaaatttttatacatgtaggaaggagtaagatttactgtagatcaccctctaattttaatatcaatcaattcttgaccagatttgcttcatcagtgcttccatcctttccctcactttcaatatcatcatagatatttgacccattttgactacagaaacaatttgtgatagttgtcaaaatattttcaggcaaatctcaaatatgatgtttcttctgtaagcatttcactatatatttttaaaagtacatgccctttaaaaataccatgctgtcattattttagctgatgaatttgacaggaatccctctgtatcgttaaatatctagccaatgctcagttttcctattatcacagaaatggtactacagttttatatacatatatatctgtaatatagttatacatatatacgtgtaatatatattttatatatgtctatttgtatctgtaatatatatgtatatattaccttaactaatacccacaccatcagctgggtgtggtagagagcacatatctgtaatcccagcatccaagaggctaagttagggagatcttgagggtgattgtcctgcaccatataatttgaagaaaactttgtttcggaaaagaaagagaaatttacctgagaaccccataggaactttttgctgtatctcaagaatttttcttttttaaaaataataccttttaatggtttatttttacttcctgtgcgttggtgtttggcgtaggtgttgtccgtgtgaggcagtcagatctggaactggagttgctgacagttgtgagctgccgtgtggttgctgggaattgagcccaggtcctctggaacccagaattttctttcttccttccttccttcctttctttcttccttccttcctctctttctttctttgtttctttctttgtttctttctttctttctttctttctttctttctttctttctttctttctttgcttgcttggttggtttttctttgagacacagtgtcactgtgtagcctaggctagccccagacttgcagcagctctctgccctcagcctgtctagtactggatcatggaccagagccaccacagccaccacgagtgaccttgctttcagtctagggacattttctatgtctctttttataaaacaaaacaaaacacagcattattttctccctatgattataaaaaaactaattattagccatactgttttccatggtgatatttttagacctgcattttgagtgtcccaaatatatctctacatctcagtaagagatgtataacttttttttcccaccacaaatacctagtttgaagaattcactgtactcttaggtgtgattgtctcatatttagtatgttcacagcattcagtgactagcatagagcaaactatacatatctgataactgagtgggagcatgaacatttattaaaaacgcagatatatttattctgtatggtgggagtcaggggctttacagtacagatttaatttcataattgcagcgagtagaaaaacaacagcagaataacatttacttttcactatattttccccacacgtaaccactatattccattcagtatcaaataccaaaggttatatggctggccgttacgttatgtctctttaagacagacacactacttccggtgaagcagtcaaggctgagacatgcagcatcccggggctgtaggaatgtaaggaaatgtgcttcctagggtgggtggcatgtgggggtcctcgtaagaaaagggtagctttggttacatcagcctcgtggggccactaaaatgtggtaggcacagccctggtgagacttagccatgttcatccaggaagtgagcggccttaaatgaagccacgtgggtggagctcctgctcaggagcatctgttatgaaatccttgtgtaacaaagctatgattaacactgtgttcctcaagggacattgttccttcagcggaaggctgatgaatcatacttagtgcagcctaacctttggatgtagctatcttttgcatttgtcttgcatgcagtgttatagtagaacgtgtatcaggccggtgggtttttcccaattctggggtttatagttgctaaaggcattgatcgatctgcagaatgattccaaagttaattccacaatggctttgggatcattacagttaaaagattgtctttaataaaggattaatagtctacttttttgttaaaagtctaagtatgtaagctgtgccaggtttgatggcatatgccctgtaatcctagcaactgggaagtggaggtagagggtcaggaattttaaggtaaacctaggctacataggaagtttgaagtcagcctgtgctacaataaatcctggttcataaaataaaacaaccaccagccatactgggccatggacacattcactgtatgttccttgctgtttcagaaaatagtttctccaaggatccgtggagggaggacgttgtcagagttaaaatggagtcactgggcatggtagtgttttcctgtcagtctggccttgacaaggctggagcagggggatattaagtttaagggaagtctgggcttcatgataaacccttatctcaaaccaagatgaagttggttgtgccagctcttcccaaagtcaaggggtttgaagaaaatgctttttatgcatggatagctgacaataaatatgttctaactttccttcattccaacctgtgttcatctaaacacagacaaattccacctcaaacagaaactggggtgttgtaactggcttggcagaaatgaaggtatttttgaagagaagtgaacagacaattcaaacagtggaccccaaagaaatgggacgtttccccagaaatctcttgcagggagaaggaaaagcccccaaccaatggggaaacttgtctcccagtgagatttcacaccatcctaataatttgttagaccacgctttcatctcgaagcctgttctgcaagccatgtttggtcgcccatcctcaatagccacttaaaagagccaaattaatagtagaaaactgaaaattgagattttttttcaatatgacaacattgtggagaagaacagaaagatccggtaaaccctcaggtccatctttaagaacctgaaaggccaccatcttcagggtcccgaaaggcaataaaagtttaaatagaagacagagaacatgaacatctatctacacagtgctggtcaaggtgtggtcctgcccaccactgacccatcatgttctgggcttcagttacattttgtaaggccatctaattggaagagctacacctctaaaatatcttcatttttatcactgtctatctgagagtatattctgtgtgctcagtgggccacacatcactaaaataaactacctctgtggcgctacctgtctgacctaagaaaattagaataagagaaacgttagtaagcagtctcagactgaacagtgaatgtatgcgtttcagaaaataccatggaacagattgccctggtacaacagattgctctgttccatataggcaagaccaaggacgataaggctaacagtaggcagggtggtaggtgttgacaatttttagttcctctaaatgatactattcccttatttagctcttcctgggatggtcagagttttccccttttccctatctaggaagtacaggcataggggatgagtcattttcccaagatggcatggctttctggagtttgagaactcttctgggagctgcagaacttgagcctgaccctggggagggaaatgtggcccagatcagataatgctcactccttaggaagggatgcttcatgagtgaaggcctagaggtcagcgttatttggtttcctctgaatgaatatggaaactggcttaatttaatcaggggcattgtgtggagaacaatggaaaataaagatgcccaggtaagatggatatgaacgagtgcttcctgcatcagggggagtgggggggggttggttgcagatgaaaacacaagcatttccaaatcaacgcatcagtgttcccatggaaaccgaatagaaaggggcgtaatgtcatttggtggaagtcactggtctgtgttcgttccgagggcagccatgtggttagaaattacagaatagctggtgtccattctgcagacctttctcacaagactgtttcctgcaacagtacattcctgattagacaggacgattggggcagcagcagctccttccttgcttgggaaaactcttcaggtttaagactatgatgaccagggaacctgtatcggagggcgacttgaaaacacatcagagctgctttggataaagccagctaggaagatgaagcaggttaggagctatccatcactggccattcccacccccctcccctgctggtggactaagtcacttctctggacacagaaagggatagctttcatcttagaggaaagaaaacatagtttattctagagctaaatttgagtgaccatggctctggaacaccgatttaggtcactccagattccatgttccaccgtggaaacagctttgtgaggttttatagttatgcagaatcaagaaagtcctgtcatggcaaatttaaaccacatcggtgggtgcctcagagaggctttctcggtgatcaggggaacctttcccataggcctcatatctgatggcattcttactttgggagttgttagaagctagtgttgtgctgtgaggcaacatagttcaaaaagtgtttattgactagtcccaccatgttggttctgacacagtgtgggcaaggatagctattaaggaagctaaagctagctcaagatgagctaattagtcctacaccatttcagtctccttatcttactgaagttctactcagtgtatcagtctctttagatgcagctccttgccaggaagtcttgttaacacttctttaggaaatcaagttgagctacttggggcaaaggtttggagcccagtggatcaaggtaaaaggaagaaaatggcagactgcacagtaacaaatatagacaaagatggtgaccgttgggatggagcccaggggacattgcttccgagtatggagcgtgaagacaggagtagttaaaagaggaagatacagagaaggaatactaggtctggagcttgtttgtgagtgaaatgacatctggcaagcagatgtcatgctgagtgtctgaggcccaaaggtgtgaccctttactccagaatgacattggaagtcttgaaaacaggcccttttccaagacagaaattctccgagatgtagggaaagaaaagggagtgaggaattagccatgggaagctggtcagttagagatgagtaaagatggccttccttcagggaaggaaaggtggaggcaggctggaggctgcttggcagcatttgttctccatgatgctatggctgctgaggtgacctctgcaccctctagagttctgtctctgcctttcttcatgaagctcagcctggcccttttcacagagacctggaggcactcttagatctgaggtcctcagattgactttgagagagtagtttgagataggaggtcgataggaatgggaaatatacttagtgccctgggccctgggaggatggatctagacacaatgctttagcacagggatgaggcagaagagacttagagcagaggggtaaggtgttccactcactggttcctctgttgctttctctcacaagcccagctagatggcaagcccatctagcaagccaaggccagagaccaaccaaagtgaccctgtgtcgggtgttaaggatagccatcagtcacccttaaaactctctgcagtacccatttccttttacttaaaaaaaatcttttaagctacaccaggtctagattttgtaattacagaagatgcctttgagcctaaatatttggcagggttaatttagcagtgcagagggaatctacctgagagtgggttacttgtttgtgtttgtttgtttgtttctttgtttgtttttgttggagtgaggccagaggcttagaaaccaatgtagccccaggtaagctgatttagaagagaacctctagcatgatgctcaggtctcaatgggctaggccccagtgcaggggtaaagtgagggagtattgagccaggcagaggtgggtccccagagataaccaggacaggccatccatcttttacactgcctctgcatgttcatagagaaccatcaccttttcccacagtttggaacccttgggtttttaatgttatttagggtttttgtaaagatgattgtattgccttatttagtatctgtttgtatgtctgtgcatgtgcccaaacatgtacagtgtgtagcgccatacacagtggaggtcagagaaccccgtgcctcttttattcttatttttcaacctcttagcttttgatatccccatttctaactgtttcaaaagtcttggctgagttcttgaggaagcttccacaccctggaaggagacttgtcagggagctagcacggcacataatgttctatatgtcaccatcttgtccactggagcactgcttctcagccttcataatgctttgaccctttagttcctcgtggtctggagacccccaacagtaagattattttcatggctacttcatagcttcaaatttgctacttttgtgaatcataatgtaaacatctgatatgcaggatatctgatatccaatgatgcgaagggatcattaacttccccaagcaggtcatgacccacaggttgagaacggattctctggggtgacagaaccaatgagagtcttcccagagtggttgtaggaggagtaagacattagttgagtgttctacctcaggcaggacaccaggtaggcagagagaagcagcagcccactccatccatcctgttctccatctggatgggtgcagaagatgaggctcctgcatcacaccaggctaaaagtatcatgatcttggaaaatgaacttagtgagtcctaattttgagaagtgacaaaagtgtcgtttgtcaccaatagctacactatagatcatgtgaaacacttagaggtctctgttgcaaagtcggaatagttctattttcagataaacgcaaacctggctgttctgttactttgataagaattctagaaatagaatcacgggtaagaaaggaaacaaaaggagaacgcacaaaagcagttcttccagccctttgtctagagtcctgtacttagttttcttggggaggaattgaggaaagggcgtgccataatggaacgtggaccatgattgcggagggaaaaatggagcagggaccattgggagccccaaagaaaagatggcgcccacggtgaggtgcgcatgtgcagggtctgcaggtgattcaggctgtcaagagggaggcaaagtcctcgctgtcctgtggatggagcttaggggaaggggcttgagaaaggacccttggatatgggaagaacagtttaactggtgaccttcgatggtagcgagtgttctttaagaataaatgtcttgtctatattcgtctcctttaagcttctcctcacccggtggcatggtacccattaccattctcagccgccatgtggctaaaatgactcaagaggaattaaagggttaaattcagcctgtgagaagcagaggagccaggcttggtcacctggtctgattccagagtcatcttctgggggcttcattctgcagctggaggcaggacaggactataggcctccccaagggtgtgcttgaggaggtggagggagccgaggcaggcatttgtctagatgtttgacaatcaaggaagggaaactggtaagatccctccccctcttcctgaaagaacaagccttctcttggaacttactaacaagggggaaatgcaagacgctgagagaaaggggtgaaatttctgttcagtggctctgcccttgggtgttctgggtatttgacctatggtatagtgggtaaaccctccagttagggctttttgtttgtttgtttgttttgttttgttttccttaagctgagctgagcatcgaggtgatgcccttcagataaaatcatcaagggagtttgccagaggatcgtgaggactatacagagtttgatctcaattccccagtgtgaccaattgataagaatgccctggatgccttagaatgcccagcactcctgactttactgctttacccacaacgctcctctgcttacagcccctatctccactttcttcctccagctatttcttccattttggattcctcgggagttgtccgactatgtggcttttgtctggcttattgctgtctctgaaacaaatgtagtcttaccggaaggaaataccctcatcaaagttctgagtctcaatcatactttagaactggttttctttggttggttggtcggtactctcaggagatggagggttcaagtacacttgaatgaagaacagatacagagttcaaacagggaaagaatgtattctcctttgtcctcgtcagtgtcattatgtagtagcctcttgggctgggcgggagttttaggcacaggaaggatgttgatgtgacggtgtggaggtgggattacctgtctggtgataggccagtgagaggagacttcagctaaggttgtggctcatgttaccatccagccaccagtgcagtgttgctcaagtggccgtagcacatgatgaagtgtgctcaagttctcacttccattttccttggagctccggtcactggctcatcacctaggcagagttcattttaaagaagtgattgcaaaagttagaagcatgccttctctgcaggaatccaggagtgggttctcctgagtactgcctcagagggggaggaggctcaggacccaggcaagggacgcacagaacagtgctacggctccgtccaaccacagaacagtcttctgtgtatctgcagctgcaggtatttcccgagggcaagccagatgtgctgagaacatttccttggaggaaaaatgaaagaaaccgaatagctagcttctttaatgtcaggctgatttaaagagacaggggatgcatttgggacatgacacgaatgactaaccccaggattcaaccaattagacagggggagaattgaagctaagaaaggggagaggaaggaggtgttctcaattcttttttcttttcttcttcctagcaagaaccagttgagtcatctttggggcttagtaatggagtaagtggcttttctcctgagtatgcggtcctgacttcagctataaaaaatgaagtggatagtacggtgaacatcataggtaaactgttttgacatcttctttttatactcacgagcagcctttgaggtttaaactctgtacaaaaaaaaaaaaaaaaaaaaaaaaaaaaaaaaaaaaaacccagtaatctcaaaataacacagtcagtaagaggaggtcttggaacgtgtccaaatcccagtgctagcccctaggtttcagagcttccacaatgagatatgaaggtttgtagaggagtgagaaccaagaaaagaaggccaggcatacaagcttcctctctggtggctagcggttagcagcacttcatcaatcatggccagccatgtggacaaaatgtcatttgtttaacttgggagccaaggagaggaaagaccatctctgtgggtccccttagcattgaccttatgcacatctgcccagaggtggcacacatttcataggccaagaaactgaggcacagaaaccctctgtcaaaggactgactggctcagtagatttgcagagacttttccaccctcgagatgcagttctgggaatgaagtaaacagggagcgatctgggctctattcctacttttgtggggagcgagtaaacaggcaaagccacaggtaagcaaaggatcctcatttgtagtctgtgatgcaaaggaagaaaagggaggtgactaggaattacctagaaactggatttgcatgggttgggagggtgtcctcagaagagtgaccttccgccatagtgcctgtgtgaggaggagcaggtgacatgcggaggcaggcaggatgctgacagaaaccctacaaaaaagcatctgaaggaacagaaagcagccagtgtcacatagtttcagaagtatggtgactgctcatgacatcccctcagagacagcggttctttgatggctgttgtcagcttgaccacatctggaattaactaaaacccaagcagctgggtccacctgtgagggatttttttccttaattaaatcctttaaaacaagaggacccacttttaatcccgattgtttgaggtgggacagtccacctttaatctgggccacaccttctgctggcagcctataaaaaggacatggaagaaggaggatctttagttttttgcctccttgccctcaccctcattggcaattccattccttcactggcattagagccactttttcgggattctggtacacactgaagaacagctgagatatccatgcttatggactgaacaaatgctagattcttggacttttcattggtagacagaccttatcgaactagctggaccacagtctataagccactctaaaatcctttatatgtgtgtatatacaaatatatgtctgcatatatatatacatacacacacatatatatacatgtatatgtgtgtatatatatataatttttttctgttggttctgttattctagagaactctgactaatacagattttagaatcagaaatcgctctagaacaacagaagtataatatgcatttttaaaatatctggaataggcttttcaatatggcaatacctacagttattgaggcctctcctgggaattcaaagaatattaaaaagatgtgaactgttttataaactgaaagagatgagtgcatttgggtatcctaattcaccagttgtgagaggcaacagatgtggtggcccaggatagaaaacgtttgacagtttatggaaaaataaggaacatgatgattgttgagtacccctagtctctctagatcatttaacagtggaaaataatgagctccgaaataaatctaaccaccggttagtgtctctgaatagtgtgcagaacaacagtgtaaagctgaccagctccaaatgcacagaaacagcctaaaggtttctaagtgtgccccggtagagaatcgtctctctggcagccacagagcacaagttgcagaaaaccaaaccaaaggcctcattgtaaggatgactgagtaacagtgaaaattcaagtcccagtcttggaggatgttggagtaaggacattaattggtcaagaaccggatcctgtaacttgggatggaaatatgtggggagactcaattgaagttgagaactttgagccctcaggttcttgagggtttatttttacctgaggtcttagtctctctaccctcagcagatagactcacactaccccctctgaaattttgccctttttacctttgaccaaggaaatgaatccctcattgtctgctaaaccagcagtaactttctctgaaagagatgccagccatgacaatactgttgtccctcagggcccaccaatacttacctctagacctataatcagacttaaggctaagcaggctcctagaagggagccggaatgtgtggatcacaaggaagtgcaccccatacactactaaagagtttaacaagtttgctgatcgtttatgcagaactctaggaaatatgtgtggggttttttgggtgtgggataacgcaggaggaacataagactgagtttattgatacggtccctctgaagggaggtcctaggtttaatacggaagtttgctcagttaaaaggactgtgaaaattttgtttgaatggttggtgaagcacttgtcaaaagatggcctatcaaggaggaattggagacggctgatcttccttggcttagtgttaatgaagggcttttacgactcagggaaattgcagtgctagagtggacatgccgtccttcacataggaaggcccggaagatgcgttcttcactagtcttatgtaagacaattaaattggtgagagggccctggcatagctgaagagctttgtttccctttttctcgtgtcagatcttagggttggaaacactactgctcagttggatgaattaaatgcagtaggtttaattggggcacaaaggggcaccgaatagccagaggtgaggtgattgtagttatcaccagcatagaccaagcaatattcatagtgtcctgagctataatgggcgatgcagataaagtaaattttataattagatgactcatgtggactttaggtgctggctaatcaatatggtgttcccaggcatgaagtagataaaaagcccactgcatttgtagttactatgtgtcagtggaaaaattctcaaacaaatgaaggaaaggttacaatggatagtggcaaaaggcaattccagcctataaaccagttttcaggcttcagcccgtttgcagacccagaacccttggaatgaagcgatggcccctaaggaaggatcttgataaaaggagttagtctttctccactccttccccccagaaggatatatggccttttaccagggtgactgtaacgatcagaaaggaaacagtcagaatttccagggtctattggatactggttctgaattgacactgagtctgggagatttcaagaaacatggtagccctcatgttaaagaaggggcttatggaagtcaggtgattaacagagttttggatgaagtacaactaacagacccaaggggtccctgaactcatcctgtagttcatttcccagatccagaatgtgtaattgggatagacatctaaatagacgttggtatgatcctacactggttccctgtggagtgagggatattatggttgaaaaggctaaatggaagccattggagttgtctcccccagggggaaataatgaatcaaaggcaatttcccattccagaaggaattgaagaaatgagtgccaccctccaggacttgaaatacacagggaccgggtggttcccaccgcatctccctttaactctcctatatggctagtgcaaaagacactgtatcatggagcatgactattgaaaacttaatcaagtagtgactcccaatttgtagcatctgtactagatgcggtgtccttccttgagcagattaatgcagcttcttgtacatggtatgcagctgttgatctagcaaatgcctttttcttggtacctgtccgtgaggaccatcagaagcagtttgccttcagttggcaaggccagcagtatacctttacggttttactcaaggacataagaactctacagccctgtgtcacaactttgttcaaagagatctggatcatatttctcttccaaaaaaatatcacattggtgcactatattgatgatgatatgctgactggactcaatgagcaagaggcaacaaccactttggatttttctgtaacacattctcatcaaaggatgagaaataaatccaaccaaaacttcaaggagtccaatggtgtgtgtcatgtaaaggtattctttcgtaggtgaggaataagttattgcactcggtccctgttaccaacaagaaagaagggctgaatgttatgacagttagtgggtctgtttggattcttaagacagcctattcctcatgtgggtatgttattccagcctgtattccaagtgatttggaaagctgctagctttgaatgaggtctgaaacaggagggggctcttcaacaggtccaggctgctttacccccttggaccatatgatccagcaggcttagtggtacttgaggtgtcaatactgtttggagcctttggcaggcccctagaggtgaatcacagaagagacctttgggattttggagcaaggctctaccatcatcggcagacaactcttctttctctgagagacagttctttgcctgctgttgggccttggtggaaactgaatgcttgacagttggccccaaagttaccatgcagtctgaacttcccgtcatgagctgagtgttctctgatgcaccaagttataaaacagggtgtgtacagcagaaatctgtcgtcaaatggaagtggtatatatgtgactagacctaggaagtcctaaaggcacaaataatttacaataaggaattgctcaaacacctatggtttctactcctgttacagtgtcatctcttcccaagcatccacatagagcctcatggggtgtgccctatgatcatccgagtgaaggaaagaagactagggcctgattctacacgctatgcagacgttgcccagaaatggacagctgtagcattacaactccctttctgagacaaccctgaatgacatcagtgaaggtacatcttcacagtaggcagagattagggtagtccccatggtcatacagtttgcttggaaggagaaatgaccagatgtgaattgtcactgattcatgggctgtagccaatggattggctggatggtcagggacttggaaaaggcaaggttggaaaattggtgagaaagacatttggggaagatgtggctagatctctccaaacggggaggctatgtgaagatacttgtgccccatgtaaatgatcttgaaaggtgactttggcagaggaagcttttagtaatcgagtacataggatgacccattctgtggacagtcagcctctttccctagctatccctatcattgcccagagaacccatgaataaagtggccctggtggcagagatggaggttatacacgggcttgacaaggacttctactctctaagtttcacctgactacagctgctactgagtttcatatctatcatcagaaaccaacacagagtcccagatactacaccatcccctggagtgaccagctaatgacctggtggcaggttgactacattgggccccttcctctgtggaaaagacaatgctctgcccttactagagtagctacttattatggtaatggatttgcctttccttcatgtaatgcttctgtcaaaactaccatccatggatttacagaatacatcacttttctaccaccacagtatttcacatagtattgctactgatcaaggaatttaactttacagccagagaaatgtgatagtggtaccacaattgtggtccactggtcttaccgtgtctcccaccattctgaagcagctagcctgatagttaaaatggcctttttaaaaacacagttgtagcattaattaggtggcagaagtctgaaggtctgggcaggattccccaaaggtgctatatgctttgaattaatgtctaagatatggtacaattttcccatagccaggattcagaaatcagagggtagacaaggtagttccactcactgtcaaccctagtgacccataaggaaaatctttactttctgttcccatggccttaaagtctgctggcttagaaatttgtgttgcagatgggagagagctcctgccaggagccacaacaaacatttcactgagctggactctcagactcccttctgcctacttagggcttctgatgcccttaaaccaaggctaagaaaggaataacattgttaggaggggtgattgatccagattaccatggggaaattggattgctcctccacaatggaggcaagaaggattatgtctggagtgtgggagatcctttagggcatctcttggtgcaaccacatcctgttattaaagtcaataggaagctacaacaacttaatccaggcaggatgacaaagggcacagacccttcagaaatgaaagtatggatcactcctccaggaaaaaagccaagacttggtgcaggtcttgccaagggtggaggaaatacagaatgggtagtagaggaaggtagttataaataccagccaaggtcatgtgcccagttgcagacatgaggatgataactgacaagagtatttctgtcatattttggtaagaaggcatttgtgcatatatctgagttttctgtccttgatttctttatcatgtaatttaacaccaattaagagcatatcagtggtcatagtatttaagttctgagatcccaaaagaatgttcgttaagacacattgccacctactgcaaaatactttaataaattttagtatgtaaatactcacttttctaacaatacttaacattttatttctaaaacaaagtattatttaccttttgttttagataagatataaatttttccttagtcggaattattttactatattttattattaaaataagttttaaatttaaatatattttatcatatttatctctttcccaagtctttttacatcccaagtttgtggttatataagggataattatatcataattatgacctggttaaatatataatacatttgtcattatatgtatgatagtcatatcatgttatgtataattatgagctggttattgttttcatttggaaattaagcacgacataagatacgatttcatgtcaagttaactaggggtgaacttttggtggttattcatggctttcaacttgactatatctgtaatgaaccaaaacccaagtgtctgggtacactgtgagggtttttttcttaatcaaataatttgaagtgggaagatccatttttaatctgaatctctgatatggaatgatgcacctaatctagctcttttgaggtgggtatgttcacctttaatctgggccacaccttctgctaccagcctatatcaaggattggaaaaagga

SEQ ID NO: 14 - DNA, 2435 bp, Mus musculus
tctcaggcaagccggggactaacttttagttttgctcctgcgattattcaactgacgggctttcatttccattttacacaccctaacaacactcacaccttgcgggattgtattggtagcgtggaaaaaaaaaaagcacattgagagggtaccatgccggtggaacggatgcgaatgcgcccgtggctggaggagcagataaattccaatacgataccagggctaaagtggctgaacaaggagaagaagattttccagatcccctggatgcatgcggctcggcacggatgggacgtggaaaaggatgctccgctcttcagaaactgggcgatccatacaggaaagcatcaaccaggaatagataaaccagatccaaaaacatggaaagcaaattttcgatgtgccatgaattccctgcccgacattgaggaagtgaaggacagaagcataaagaaaggaaacaacgccttcagagtctaccggatgctgcccttatccgaacgaccttccaagaaaggaaagaaaccaaagacagaaaaagaagagagagttaagcacatcaagcaagaaccagttgagtcatctttggggcttagtaatggagtaagtggcttttctcctgagtatgcggtcctgacttcagctataaaaaatgaagtggatagtacggtgaacatcatagttgtaggacagtcccatctggacagcaacattgaagatcaagagatcgtcactaacccgccagacatctgccaggttgtagaagtgaccactgagagtgatgaccagccagtcagcatgagtgagctctaccctctacagatttctcctgtgtcttcctacgcagaaagcgaaactaccgacagtgtggccagtgatgaagagaacgcagaggggagaccacactggaggaagaggagcatcgaaggcaagcagtacctcagcaacatggggacacggaacacctatctgctgcccagcatggcgacctttgtcacctccaacaagccagatctgcaggtcaccatcaaagaggatagctgtccgatgccttacaacagctcctggcccccatttacagaccttccccttcctgccccagtgacccccacgcccagcagcagtcggccagaccgggagacccgggccagtgtcatcaagaagacatctgatatcacccaggcccgtgtcaagagctgttaagcctttgactctccctggtggttgttgggatttcttagctttgtgttgttctttgtttgtattatattattttttttctctatgatacctatcttagacacatctaagggagaaagccttgacgatagattattgattgctgtgtccaactccagagctggagcttcttcttaactcaggactccagccccccccccccctcggtagatgcgtatctctagaacctgctggatctgccagggctactccctcaagttcaaggaccaacagccacacgggcagtggaggtgctgcgttgcctacggtcaaggccagcatggtggagtggatgcctcagaacggaggagaaaatgtgaactagctggaatttttttattcttgtgaatatgtacataggcagtacgagcaatgtcgcgggctgcttctgcaccttatcttgaagcacttacaataggccttcttgtaatcttgctctccttcacagcacactcggcgaccccttctgtgtccactaccccactacccacccctccctcctcaacccctccatcccggtcctctatgcgccccttccccccaaccaatcccatcacaacctcttacctatcctttccctcccaaccccttctatcccagcccaccacctaccccactcctccccaactcctccattctagcccattacccacgcctctctcctcagcccagcctaccccatcccaccctgttcctttcctccagtttcctctcctcaaaggcaaggctctacatcttggaggaggaggaggagaagaaaatgagtttcttcaccgctgtcccattttaagactgcttgaataataaaaaaaaatctttctaatctgctatgcttgaatggcacgcggtacaaaggaaaactgtcatggaaatattatgcaaattcccagatctgaagacggaaaatactctaattctaaccagagcaagcttttttatttttttatacaaggggaatattttattcaaggtaaaaaaattctaaataaaatataattgttttttatcttttctacagcaaatttataattttaagattccttttcctgttcatcagcagttgttattacatcccttgtggcacattttttttttaattttgtaaaggtgaaaaaaaaacttttatgagctcatgtagcaatcaaattatcctgtggattgataataaatgaatatggtatatagttaaagatttt

SEQ ID NO: 15 - DNA, 1050 bp, Mus musculus
atgccggtggaacggatgcgaatgcgcccgtggctggaggagcagataaattccaatacgataccagggctaaagtggctgaacaaggagaagaagattttccagatcccctggatgcatgcggctcggcacggatgggacgtggaaaaggatgctccgctcttcagaaactgggcgatccatacaggaaagcatcaaccaggaatagataaaccagatccaaaaacatggaaagcaaattttcgatgtgccatgaattccctgcccgacattgaggaagtgaaggacagaagcataaagaaaggaaacaacgccttcagagtctaccggatgctgcccttatccgaacgaccttccaagaaaggaaagaaaccaaagacagaaaaagaagagagagttaagcacatcaagcaagaaccagttgagtcatctttggggcttagtaatggagtaagtggcttttctcctgagtatgcggtcctgacttcagctataaaaaatgaagtggatagtacggtgaacatcatagttgtaggacagtcccatctggacagcaacattgaagatcaagagatcgtcactaacccgccagacatctgccaggttgtagaagtgaccactgagagtgatgaccagccagtcagcatgagtgagctctaccctctacagatttctcctgtgtcttcctacgcagaaagcgaaactaccgacagtgtggccagtgatgaagagaacgcagaggggagaccacactggaggaagaggagcatcgaaggcaagcagtacctcagcaacatggggacacggaacacctatctgctgcccagcatggcgacctttgtcacctccaacaagccagatctgcaggtcaccatcaaagaggatagctgtccgatgccttacaacagctcctggcccccatttacagaccttccccttcctgccccagtgacccccacgcccagcagcagtcggccagaccgggagacccgggccagtgtcatcaagaagacatctgatatcacccaggcccgtgtcaagagctgttaa

SEQ ID NO: 16 - DNA, 96593 bp, Homo sapiens
agttgaatatacttcttcttcttttttttgagacaaggtcttgctctgttgcccaggctagagtactgtgacaccactgaaaccgacccaatagttccatagacagtttttttcttggaaaaccgtatcaattgatccttctggtcttaaagcttgaaatttacatttgttttatctgagcttcttcctcaggaaaggacctccaggtctggcaaaaagtacctaagaactgaaacttaccagctaatcatatccagacaatgagatgccaggccctcattcatcatgattgcttccttgcccctccctagttcctgctttcttacacattattacacatcttccctgctacataaacccctaattttagtggccagggagatggatttaagactgatctcccatctccttggctgcaacacccgatgaaagccttcttccttggcaataattgttgcttagtgattggtgattggctttctgtgaggtgagcagcgggacctagactgaacccctggcattttggggacatggtcacggctcactgcagctttgaactcctgggctcaataaatcctcccatctaagcctcccatgtagctgagaccacaggctcgagccaccacgcccagctgatttttgtaatttttttgtagagacggggtctatctgtgttgctcaggctggtctcgaactcctggtctcaagcaatcctcttgccttggcctcccaagtgctgggattatacacgcgaaccatcacacacacctggcctggcctagcttgttttttttttttctttttaaagttgttgtgtatttgtgtgggcgtgtttggtaaaagaacattaattaattttatttatttgtggaaatggaaattggagagaaagttaaaggggaataaatattttgacttaggaattcaaaaatagaattaaaaagactgaattgttttagagtgttacaaatgtgtcatgcaatagactgagagggcaataaagaacagttgaaaattcctctaagaaatcaacgacttggcaggtgcagtggctcacacctgtaatcccaacatcttgggaggctgaggtaggaggatcatttaaggccagaagtctgaaaccagcctggacaacatagtgagactctgtccctacaaaaaataagaaaattatccaggcatggtggtgcacacctctggttccatctactcaggtggttgaggcaggaggattgcttgaacccaggagttaaaggctgcagtgagctgtgattgtgccattgcactccagcctgggtgacagggaaagaccctgactctaaaaaacttttaaaaaaatcaacaactgaagaaattcttgcatttcattgatgttgcagagacaactgggaaatgtatagtgtcagtttttaaaaccacaagtcgatcttatttagaaccctttaaagtcttcctattgctcttaaaataaaatgcaaaccccttattctggtgtctcccacctgttcaccacatccctgtcctctttctgtcacacaactctgaaatcagtcatttcctgtctgttcccagaatattgccagaccctcttgcttcccagacctctggccccactctttcctctgcttcggtgaagttggtacctgtggagggtcgaattgtgttctcctcctgcaaattcatatgctgaagtcccaactcccagtacctcagaacatggtcttatttggacataggttagttggagatataattagttaaaatgaggtcctatgggaatagggtgggctccttatccaatacgatcaatataagtgtccttatcaaaaaaggaaatgtgggccgggcgcggtggctcacgcctataattctggcactctgggaggccgaggtggagggatcatgaggtcaggggatcgagaccatccttgctaacacggtgaaaccccgtctctactaaaaatagaaaaaattagctggacgtggtggcgggctcctgtagtcccagctacttgggaggctgaggcaggagaatggcgtgaacctgggaggcagagcttgcagtgagccaagatcgggccactgcattccagcctgggcgacagagcaagattcagtctcaaaaaaaaaaaaaaaaaaaaaaaaaaaggaaatgtggacacagacacatgtgcagggagaacaccacataaccatcaagacagagattggggtgatgcatttacaagccaaagaatgcccaagcatgctggcaaaccaccagaagccaggaggtgtggaagtctcccccacagccttgagaaggaaccaactctgtagatgccttgttctcagacttccagcctccataactataagacaataaattttggttatttaggccactcagttgtgggactttcttatggcagccttgacaaactaatacaggactacatcattcttcacgtcttggcttaaatctcatttcctcagagcaagcttcttgaccacctagttgacacagcattttctaccaaagcgcctgttgatttccttcagagcactgagacaaacctgtgactattgtgttggtttgcttgtttatttgtctgttgccttcaccttcactagagcatcaggggcatgggcgcaggggtcttgtctggctcttgctttcttcacagcagctctcagagtgcctggagcatcccagtgctcaataaacatggagggtaaatgacgccaagatgcatcaaaggttaaggagaatgcgccaagagctgtgtacgtgaattgccatgcacatttggtatttagcagagataaagttttttaaggaagtgagaacatttctaaatgttctcaatcctttgttttatgacactctgctgtctttctgactggcgaatttccaaacattttcaaatagaataaaggtgtattattcagaatgctatgaagtttgggaaggaagagaacacactgaacatcatcatgcttcatacgctgagaccaaaggcttacagagaaatggtgaaagttgcagcaaatgagcaaagaacctgaatagacattttccatacaagacatacaaatggccaacaggtgtatgcaaaagtgctcgacatcatgaatcatcagagaaatgcaaatcaaaatcacaatgagatatatctccctcctgttagaagggctataaaagggaacctttgcacacttggtgggaatatagactgttgcagccattatggaaaacagtatggaggtgcctccaaaaattaaaatggaattaccattagaatgagactaccaaatggaaccaccatgcgatccagcaatcccacttctgggtacatatcaaaaggaaataaaatcaatatcctgaggagatgtctgctcccttatattcactgcggcgttatttccaatagccaagacgtggaaacagcccaagtgtccaccaatagatgaacagataaagaaactgtggttcatatatacaatggaatattattcaaccataaaaagagaaagaaatcctatctcattggcaacatggatgaacttgggagacattatgctaagtaaaataagccagacacagaaagacaaatattgtgtggtttcacttacatgtggaatctataaatgttaaactcagagaagcagaaagtaaaatggtggttgccagtgactggaagtggaatggagagatgttagtcaaaagatacaaaacgtttagttatgtataatatcaatatgttgtgggagctgatcatagcagggcgagtggcggatgttttaattcatttgtggtaattgttacacaatatatgtgtatcaaataatcatgttgtttactttgaatatgttcaatctttatttgacaattacatattttatttttacttactttaaataaatttctttatttatttatttacagatagggcctccttctgtcacccagtctggagttcagtggcatgattatagctcactgcagacttgaacacctggtctcaagggaacctcctgcctcagcctttcaagtagctaggactataggtgcacgctaccacaccctcttaatttttttttttttttttgtgtgtgtgtgtgtagacagtctcgctatatttcccaggctggttttgaaatcctgtcctcaagtgatcctcctgccttgaccttccaaagctctgagattacaggaatgagccaccatgcctggctgacaattaaatattttaaaataagaaaacaaatataacaatattaaaaatttcttcaaatatacagatgaccagtgaaccaagtagtctcctaaatttaggttacaaatttgaaatttattctttaaaatatcttcaatacctgaaactattatagtaattgctctgcagaacgtcaaggcaaagctatagacaccatgtccctctgtctttaaaggtaaaaggactactttatagtttgtcaccatagagaaataaggaatatttcacatattccacagccatttgggaaattatgccaaaaaacacttcatgaagttttcaaagttgaaagccttcctttgggaaaggaaaaacacacgcacgcacgcacacacacacgcacacacacagacacacaaacacacagagatgcacacacacacagacatagacacacacacacacacacacacacacagacacacacagaaatccaggcaattttagagaatgtgttttcccttcagaacagggcagaatgagtatcacccaaaactgagcaatgtattactcaatgtaaactcatgattttcagaaaatagttgcaacaaaatgacccccacttcctagtttcttgtaaaatggaaggaaccattacataaagtaacagtcaaacatgctcaagaatttttcaacttgaggccaatgacctttgaactttgactgatggttttttcaatcccattgctgttctattgccgcaaaaaatttaacttggctgtgtgtttattcaacttggacttcacaataatgttctttgcaactcaggactgttaatctgtggcttttgtattggcaactgttctggcaagggtggaaccctcgttttccatgactttctaacctcctgaattgcagcaccttggaggggagctccagtggccaagacagaagtggtcccagtgattctggggagaaaactgagcatctgcttgcagacctggggctcctgattaaatcatagctataaatacttaggttttcatttatatgccttcatgttacacattcctaagttgcatgtacagttctgaaggctgtgattacaggtggagatgatgtcggtgccattactgggatgccacagtggaaatcaacatgtcaacctacaagactgtaagaaaacgtcttagaaggctggcactttcattcatttggttcactgctgtatccctagtgctgggaaatgttcctgagcactcaacagattttatttgaatgatcattttatgaaactttgtttcaattttaggaaactaagttaaaaacccatttgaaaggggtcaactttgaatgtgtctttacatttcttccttagttaagatccactcaaggagagatccggcactattgtgctcaagtaatattgtctgcacccgactcccctgaaaagaaatgagtcctgaggcagccaggcagatcttttaggatattccatcccacaggtgaaatacaaacatgcttcatccaggagatgactctagtttcactataaaagacccttcaacttttttcacgttagactgaagtgtttggtcagatttcctcagtatgacaaaggttactctttttttttttttttttttttgagatggagtctcgctctggctctgtcgcccaggctggagtgcagtggtgtgatctcggctcactgcaagctccacctcccgggttcatgtcgttctcctgcctcagcttcccgagtagctgggactacaggcgcccaccaccacgcccggctaatttttgtatttttagtagagacgggttttcaccgtgttagccaggatgttctcgatctcctgacctcatgatccacccgcttcggcctcccaaagtgctgggattacaggcgtgagccactgagcctactttcttacccaggcttccaaaaaggctggagtttccacagagatttattactatatgcatctcatcaaagggctaagatacttcttgactgtgtatatcagtaccatgtggctgttttggttcatttgtacatttttggtttgcagtgacatgtcatcaagggcctaagaacagaaattcattctgtctatgttttatgagtttaggggcctggaaaattgcaagcaacacccatgcttcagggaggccccaggactcaggaaagggggcagtctgtgagtcctcccagtttcccagctaatcaatgaagtgaacagtgcaaggctgtggaaaagatgttctctctgacttgggacatgtataatttgttgcacctgagacatgtgtaggagttaatgtggtcagagctcagaagttacagattttggagtcatcagcaaatagtgatatctgaagccctgggcgtggaggagaacacccaaagataaagcatgtagaatgagaaaataagagggttgaggatagaatgcctggaaacaccataatttagggggctggcagcagacgaggaaccggccaagaactagaataggacagcaggctgtcacatgggcatcgtggagagcagcctgcacagtcagcattcttaaatcctacacacagacagaggagatgcggattggaaacggtcccttagaaagatcactagaaggaaatacataaaaatatccacaggtctattcctgactagtgagatgtcaggtggcttatgttcttctctcaccattcttgcatcttccaaattctgtacaagaaacattaattacatttatattaaaaagctattaaaatataaaacaaggctctgatcaagtctaaaatattttatgagagcctgatgaaaagagcaagtaattattaattcacaagtatttcagtgcctgtgtgctgggcaccatgctaaagataaaacaatgaacaagaggacagctctgttgtttgacaaaaaggagcggaggctggtttggcaagggagggatgtagggcttgtgggacacaatggcaggagatgaggctggaaaggtcgtttggtgccagattacaatggactttatgtgtcttgtcaaataatatggtctttattctgaaggctacagagaggcttttgaggggggcagtgttaggtttggaattgtgctttacctgaagttaattttcgactggattttggcagtagtgtggctgctggcctgggggagtccaagcaggagaccaggagcacaggcagcaggcaagtgcagtaactgaatgaaggcagtgccctgagcacgggccaggcccagagatatttaggggtagcgtcaataggatatgactgattggatgtatgttgcacgaagtagggcattaagaaaaaaaaggaacaacaaacttcttcctgcttatcaaagaccataatgagggcaatggcctttcctgaaacacgttccttgggaagtcaagcatgagcatcacaatagtttggaagctatctgcacccagcaagtgagtttccagttagcctcacgcatggcaataggtgcttaggatgcaggatgcaggttcgtggccccggccctgtctggctcccctgaaatcacaccacagaggcagctgcctttcgtaaacacaaggcaggcagtgttagctggtccaactagacctcattctttctttcacctggggcctgtgcacggaggctgctgacatgagtggactcccacgtgtgtggtgaacgagaagttcaaagtgacactttgcattcttcccttcttctccactctcctcttcccgctccaggaaaaataaaggaagatgattgttttggtacaggaaaaaaaaaatgaatactaggtttttaacttgtgtcccgggttgggtaaagaatgacaactattctatagtttgtatagactttcccttagtggtcattgctatatgacataagaaagtcagtgcctgggccaggcactgtcacaggcctgtagtcccagctacttgggaggttgaagcaggaggatcgcttaaggccaggagttcaaggttacagtaagctatgatagcacaacctgagtgacagagcaagaccctctctttttttttttttttttttttgagacagagtttcgctcttgttgcccaggctggagtgcaatggcacaatctcggctcaccacaacctgcgcctcctgggttcaagcaattctcctgcctcagcctcccaagtagctgggattagaggcatgcgccaccaaacctggctaattttgtatttttagtagagatggagtttctccatgttggtcaggctggtcacaaactcccgacctcaggtgatcctcctgccttggcctcccaaaatgctgggattacaggcatgagccactgcacccggcctaccctgtctcttaaaaaaaaaaaaagtgagtattataatagaggggataaggaataatgtgtatgtgaggtctatttctgagaccagagccacaaaacagaatcctgcaccttagccattttcttaccacacgcgttttcttggatacttccatttttccagtctatataattcaatacttctgtgacagagaggtgttggagttttttgttttgtttttgttttttcgcaactctttacatacaaacagctatggtctcccaggaaggaacttcctctgttgagtacagaagtctgggaaaagactggtgaaattgcatgcgaggaagaaacaggtctaactaaatgtgaatctatacttttaaagcaagggaccacaaagggtaggtcccaaggaagttgcattgcttgctgcacttgtcacacgggctgtactttcttctctcatttatttccatttacagcgttgaaaactgaggccttaggctttggttgaaaaccgaggccaagggtgaccagccagtgagttaaggaggccccagccgaactttgctggaagtgctccagcataaagcctctctccagaaccagccgccactgagacgtcttgaagtcaaagtaactcacacccttgtccacctcgccctgcggtgaagaaacttcggtcgcacaggctccagaactcatcttggcgtgggctgtgacttactgggggatgggcctccttttcgttctagctcctaaatggagcggagcgccaggtggtgtcagagggggcggcggcccctccaatggtggcaccctcagccacggataaggttccaattaggtaaggacgcaagtaatgctgtcgtttcggctgactgctcctttcattccttggaggtggtcggtgtcacaaaacgaattttcatttactctcaacagtcacaccagccctgctaactggatggtcgcagccccgtgccttcgccggacgccctcctggaaccttcaggccaccctgaggatggagactcgggtgcccgctctcctcccctaccgccgcgggcctgcgccccccgccccggaccccgactcggacgttctagccgcacgtgcgggcgcccctgggtgcgagccgcggactcacgagccgctgcttgttgctcccgccgccgcgacctggggaagcgaaaatgaaattgacttttccgagaaatgatgaaagcggcgctgcccgccaatgagctgctgcggcgaacttccgcacctcccggccgggccgctcgcgccctccctccgcctccacctcccggttgcacaagcttgaaacaaacactggggaggaagggcggagggaggagggcggagaggggaggcgagggagggagcgcggccggaggagggcggggggtggggggatttccagccgcggctcttcgcagtttcctctccttgttttgctttcgatctggactgttctcaggcaagccggggagtaacttttagttttgctcctgcgattattcaactgacgggctttcatttccatttcacacaccctagcaacacttataccttgcggaattgtattggtagcgtgaaaaaagcacactgagaggtaacatttttcaaataatagttgtgactgtgtgtgtttctctcgagggcatgtttctggggactgtggggggccgtgtgtgtatgcgtgtcctgatgccttgacacgatgttttgcagacggaaaatgccggggttcataaatattaatactgatttttggaggaacagtcggcgcaattatggatcatctgattttaggggaagcaggttctgctgctgttgctgctgctactggggctgctgaggctgcgaggaggaggaggaggaggaggtagagagggaggaggaggaggaggttggtggaggtttaatttcacttttggatttgcagatgcggagaggtggctccatggacacagacctgctgtgtgtgcttctgcgccccaggtgttgtgtgtgggggtgcaggtcagctggagtcgggcctcatttaaaacaaaattgtgtgtatgtgcgtgtttgtgtgtgcgcgcgtgtgtgtgtgtgcagccaccgccgccaccggatccgaaggaggggagcgggtccttctcggtgcccgcggcggcgcctctccaggctgcctccagcgtaaataagcaggcaccgctccccggccgggaggagcgcctccagccacggccagaggaaacttgctggggcgccccgcggcggtccaggggctcgcctgcctgccgggctcggggtcgggtcgcgggcgtcgggtgccagcggccggggcgggagggcgggctcggagccgggccgggcgccgggcctggccgacgcgccctgcttcctgggggctgggccgccgccgccgccgctcagaagggacgccgcgtcctccttcccgccggccagcgcccggtcgggccctggggctttgtcattgcacttgtcccagcgcgccaggggctcgggcggcgcgtcccaggaaggcaccgtgccgaggggtcagccgcccgggccgcggcctagcgccgtgcgcccccgggtccccgcaggcgcccccggccggcctcgcgcgctgggcctgacccgcctcggctacggagcgggcgaggtgggggcggggagcctccggggaccgagcggcgcagtgggggccggcgtcccctcggggtcccggggcgcgggccgcggcggggtggggacgcgagtgcccgccccgtgccctccgacccggctccgggcgccgggtgacattcgcccgctggccgaacatggttggtgcaaagccgcggcggccgccacttcctttccgcctcgccggtagggctcgcccaccgagtgaagccggccgcggccaatcgcggcgcccgcctgctcccagtggcacggcctgggggccggcgtccgccggggctggggaagccgttccaagttccaagggtcgcgggtgtaactcatgcccctcccagcacgcgccggcgtctccccttggcccccggtctgggtgcgtttgccaccctctcctccttgttccctaagaagcgggggaggggaaggaggcgggcagcctgggcagggcgccagagccgtggtcgggcaccaggtgaaacgcccgggtcagtctgtgtaggccggacccttggcgctcggctgcggatgtgatcccggggactggcggccgaggtagctcagaagagcgaggtggctttcgctcgtttctgacccgctactgtctgaaacttggggacatattgcccgccccctccctcttcaacctcctccctccggtggctccttgtccttggttatggaaggaaaaaactcagttgttctaaatgaggaaaagtggtgctggcattcgtcttcagccaccggcctccttatggctgtgactcggtctgcttttgatgaatggccaggaggtatggaggatagttagatttcctgttgtggattttcaggcatcaccgagactgctgtcaagcctgcagtcatttactagttttcatatcgactgcaggttctctttgagcagttcagtttttggtgcttaagggcaggtgcacaacggggtctggggttagaccaggcggtggatagtcttgatgctaggcagatgcagttatccctaccaggcccagagggtgactctgtttaacttcaccacgcacgcagattcaggattctctgatttccccaactttcctttattcttcttttagtgggagaaggggcaaaagtagaaacctaaaaaatcctgggaaaaggagccttttctgaggaaacttcagcagatgaaatatttaagacttgaactgggatctctagggggaacgttggaacatctattgattgatgtgtcaaagtccggaatttcactgtaattagtgaacgattataacttgtaactttgtctgttatgtaagaaattacattttggtctcttagatccaagagttcttgtctgttacgatttgtaactgcttgttaaaattaaacatttacatatttcattctcagtgagttgtcatttttttgttagagaaagttccagttatttcagatttacttacctgtaaaaatgtcagcataatcaaaagtaaggatctgtagtcaaactggaagcaaattatggcaaacacatgcgtgccatgaagttctgacagccttatgaacaatggtcccacttttatcccactttctgaaacactttattaggcaaatagtgcaccagagcaaaagatgtttaaacttactggaaaaatagacactttggatgctccacatttgatgtgcatcaattttctcatgttaccaacgatgttatatttttattcttaacatcatctcgtacaaaactgttgtttttagagcattttcacataatatccttttgatagtgaaaaaccactgtactctatctaaatggagtatctgggttatagttcccttatctgccttataccaaaaagggcttaacgcagacaagagaatttatgtacacactcaataaatatccttagaacatctattataagccagacacagtgctagcctctgtatactcaactgacagcgagaaagacagcatctttacactaggttgtgttctggtgagtgagctgaccattaacaacaaaaaatatagttattaccttttggggttagctgtaaggaggataataataatttttaactatatctcgtaagtgttgctttcatgaacaattgagatactgtatatgaaagaacattgcataaattatggcagtctacaaatgtgtaaggcattaactttcaaaattatatcagattattcttagtgtaaaaaggccagataatcatgactggattagacactatctttctcatagaatttccagcaaggagggattttacttctgagcatatataaataatgataaaagattaaacatggaataacttttatataaagtatcaaaaaaatttcacagtggaatccgatattgtcagtgaattttttcctgtcagaaggaaagttaggtggtatccatggagaccaaatgatatggaaataacagtgattggaccaatgtattttccctctttatgtcagataagaaaatcttcccaagcctctctgtgctttagtctgaatcttcttcactctcgtgtcaacttcttcattatctgtcattgcaggtgtgcactgggctgattgtagtattttgcttttaccaccttttttttcttttctttttttttttttgaggcagagtcttgctctgttgcccagactggtgtacagtggcacactttcagctcaccgcaacctctgcttccaggttcaagcaattcctgtgcttcagcttcccgagtagttgggactacaggtgtgcgcaggcgtgcgctaccatgcctggctaatttttgtatttttagtagagacggggtttcagcatgctggccaggcttgtctcgaactcctgacctcaggtgatctgcccacctcagccttctgaagttctgggattacaggcatgagccactgcgccggcctgctttaccatcttggctcatgtgcatttattgaatgcttactgtgtgcccaacactgtatatgtgacaacatacatgaaagtaaatattaactgatagcatatatttataacatatattacaatacgtaatatatgcaaataaatgaaactgcggtgaaatgtcagttattattagtaaaaattagttcttcttttcatctgtatgagacatgatgttccttcctgcacaggggtaggaggtcaggaccttcggtctctgcctgccccgtcggccccctgtgtttggcctgagtgtaatcagtggtcggtgcacgatgccagcttcatgcacagtgtgctgaattgaggagtggctctggtggcgggagtgactgatggaaaagtgggtgaggaagttccatcaaactttaatttatcaacaaagaacaaagaatgatgaataacatatagggtccagatttgaacatgaagacagtattttttatagagtaccaaggaaaacacacaagcaggaaacacagctcacaggtcccctttgtccctgggactccgtctgaggctcgttggattcagagcaagcagcaggcctgaagtcttggcattgaccttcaaagatcccctaaaaataattttccccctcagaagctccatcttatgacaaactgtctctgaaacaaattgtgtttatttaagtagacttcatgtatcctttttcttttattagagtcaaagtctcactctgtccaccaggctggagtgcggtggctcgatcatagctcactacaggctcaaactcctgggcacaagtgatcctcctgcctcagtctcctgagtagctgggacaacaggcatgtgccaccccaaagcccgacatacatttttgtgtagagacggggtctcgctatgttgcccagactggtctcaaacccttggcctcaaatgatcctccctcctcagcatcccaaagtgctgggattataggcgtgagccactgcacccggccctagtgcccatttttattcctcagaaacacatatgacttccagtcagaactcctgattgccttgagaaaactggtatcatcaaatctcactgatctcattatagccaaaggtagagacccgtggtgtgttggacaggctggccggctccgtgtgagagaaactcaccatcccgttaggctttctgaggcactgaaactagccgggaccctccatcaataacttggtctgcttggggatccagggaccccatgcaattattttaaatgaataattgattttgttaaatgtagtaacacatgcaatggttttcttaaatgcacacattgtgttattatttcatttgtttattaaatatttcttgacagccagctgtgtacaaggctctgcggtggaaggtgcatgaactcagatgcctagagtggccttttagttctccaatcacttcctcctttggaagttttcactgtaaaatgtggctggataattctgtcatcctcaggagacagaacctgtgtgtgttgtgaaaatcacctggggaggggacttttagaaattacacgggaccttttagatttgagactatctgtagccccctttcccttccttccccttcctgccttgatagcgagcctcttattcaccattggatccctgctccccagcctccctcaggtgtgtggccagagtagaaatggaaagccactgaatcgaggatctcttcccagggccaaatagttgatcttttccttggctcagatgaaacctctttccacattttaaaaagcacttcggacaggggcctgtggtcactctgttggctctgcccacttgcccttgcttgccatacagaaatgggactcatgttaagtttgtgatacattgaattttccttttttttttcttttttgagaaagagtctcgatcttgtctcctgggctggagggcagtggtgtgatctcggctcactgcaacctccgcctcctgggttaaagtgattcttctgcctcagcctcccgagtagctgggattacaggcatatgccaccacgccgggctaatttttgtatttttagtagagatgaggtttcgccatgttggccggctggtctcgaactcctgacctcaggtgatctgcccgcctcagcctcccaaagtattcggattacaggtgtgagccaccgcgcccagcccagttttccattttgaagaggcaagaaggactttattttattttatgtatttgtctctttgtccaggaaggccatggagaattaggcgtttggttttgttttgtttctattttggtttataactcctttatcagtttagtattcccttctgataagcaagaaagagcggagttgacaaagaatggctgcagatgagaagcaggtgtgtgaggttccttctgatgatggattctaagtatttttatcccaaaggcaagactaatttagttcagcaaaataccttaatttaggattttgtgtgataaaagcctgtcctgttttcattaaatgacgatttttgagaattaactacttgctgtgtgattttcataaataatttcatttgggcatacttaacactgttgctatctgctgaaggcatttgatactcgcacacctaatgccatcaaaggagagatgagtatacactttaatttgttcttattgagtgtacattttaattgttcttatgaatgtcagattttgggaagatccaaagaagtactctgtagacagaatacgctgtcctggccccctaagcttagaatcctaccaattttcccatttcatgagattgacctttcagatgaggagggactgcatacaaattgctttatttcaagtaatatctaccatgttatttttgaaagaattcttttgtcctttttaccctagatctattggaaaagatgagaaaaattacagtggtgataagagtgtcttaacacctagatatgatgggtgtgtcgggtgaaaggatagcaatgggaggctggtggaaagtgagagttgggggatggggtgatgagaaggaaaataggtgactagtgactcctggattcttgaatgggagagagtgaagagacaatcaggcagggagattttctgtctttgcataaatgtcactgaaagagttttagagatcggaggggtgaggtgaagttggttaggcaattagtgataactcaaggaccagttgaaagactggaggaccctccactgctgactgtgggatcagatccttttatcctggggatgagaaaggctgatgggaaaactgctaggcagctgctgacattataccaccaggaaacatgaagttgtgagtagttgtcacttggacatggctgaagtcaccttagggtacagtgatgttgctgcatcacaacgtttaggtcatcaatgggccatacacatgactgtggccccataagatgataatatcatacttttaccttttgctatgtttagatacacagatacttgccattgtgctacagtggcctacggtcctcagtacagtaacctgcagtacatgtttgcagcctggaagccataggccataccataaacctgggtgtgtaggaggttataccatgtaggtttgtgtaagtacactctgtgatgttcacacaatgacaaaattgcttaatggtgcatttctcagaatgtataagtgtgctgatgttgatgcattgtttggggatggggaaactgatactcactatgtgaggccccaaactcaatctaaaattgcctttggaggcaaccacggaaatacggtaatagctctcttaggccttctccccccgtactgatcttccttggtactgttttattttatttttaaactcttgaaataatacataatagatgtatgtattttcagggcacatgtaataatttaatgcattcatatttgtaatttgtaatgataaatcaatgtaattgtgctattgagattgtgggaggtaaatatggaatcagggaaatagaatgggctgataatgtgttttcctaaagaacagatgggattggccgtgcgcggtggctcacgcctgtaatcccagcactttgggaggccgaggcgggcggatttcctgaggtcaggagttcaagatcagcctggccaacatggtgaaaccccgtctctactaaaaatacaaaaattagctgggcatggtggcgggcacctgtagtcccagctactcgggaggctgaggcaggagaatcgcttgaacccaggcggcggaggttgcagtgagccgagatcgcaccagcttgggtgacaagcgtgagacttcatctcaaaaaaaaacaaaaaacaaaaaacaaccagatgggacaagttaaaactgaactatgaattccataagtgggtagtgtgggtcactgagtggggcactgagtactccacagtgactgtagtcaggattctacattgaaataaactttctggaatttaccttggtgctatatacttaaagtcttaaaaatgttaagctctctgttccagaaattctgcttcttggaacctacttacgtgaagtaaccagagatgggaacaaagatgtatgtacacggatgtttattgaattagcttttgttatgtaaaaacttggaaacaagctaaatatccaacaatagagacacatttgaacgaattacggcacatccagacagactataggtagcttataaagctcgtgttttcgagcagcgtttagtgatgggaaaatatttatgatctatgctgattgggtggggaaaaaaggatatgaaattgtgcttctagttttatttttaaaacatatgtgtatattggggtatttttaaaaacctggaagaaaacatatctttttgatggtgaaattgtgggtgtttggcttttttttttccttcttgaaacatttttgtattttccaaatttaaaacagcaagcacaattaccaattacccttttaaccagaaaaatattctcaagagagtgctaatatgtcatctctgccctcacctctggtccacgtaaggttaggaaaaacacactgggtgctgccgaggaggaggctgtgcatggacggggccattctcgagcctttctgcctccatgtgtggagcaggctctagagccagggctttcctggccaggctcttggaagcctttgtcctcagacagctgtggctacttggagacacttagattggtggctttttggtgaggttgggacataatgttttgtcagtaactgtgaagggcttgagatatgatttcacttcacagttaacattctttatacatatgaatactgcagaaacacaaaacccctgggtaggagaaaagagttccttgttgatatttacaactggggcaacagcctgagtgacactattgtgtcaggcccctaaaccttgacccttaggtgacactgaaaactaatggaatgtacatgtgggctacactttgttgacagggacagagcagctgtccctctcccgtcccaaaaggagagagagagaaaaaaaaaagaagaagaaaaaggaaaaccaaacagacaaacaccttagctcccctgacatgggatgaaaaggttccaggggtcttatcctaacctttcagaatgtgagacacttgtaacctggggatgtctccaaggtctgtttttcatgctttttgaaatacacatgcctagggagatacgtcttcccagcaccttgggaaccaaggtgaaattatttggtcctcttgaggagattagaggttttattatccttttggaaaagagcatttaatgtacacaaatggctacagatctaattctcatggtaagtgaagtataaaatgtttgtaggggaagtgagagtgaacattccctgtcttcatgtcctgtatagtccctatcttcatgtcctgtacattccctatcttcatatgctatacagtcgctattttcatatcctatatggctcctatattcatatcccatacattccctatcctatacattccctaccttcatgtcatatatggtcctatcttcagaccttttatggtccccatcttcataccctatacattccttatcttcatgtcctgaacagtctccatcttcatatcctatacattccctatcttcatttcttaacagtccccatcttcatatcctatatagtccccatcttcatgtcctgtacattccctatcttcatatcttcctatcctatacattccctatcatcatgtcctaaatggtcgctgtcttcatatgctgtacattgtctatcttcatgtccaatacattccctatcttcatgtcctatacggtccctatcttcatgtcataaacggtccctatcttcgcatcatatgcattccctatcttcgtgtcctatacattttttccctttatattctattcatttctgtgtgttaggaggtgaaggcattttataggagtctggaaagaagcctgagaagttgtattttcccctcacacctgcctttaccagacccctgttggagaatgacagtagagcttaatcagagtgtgacctctgacttttcaaactgaagacctcaaatctccaatttttatctgaaaaaatattagaatagtttcactctctttatgaacatggagacgtttttggattgctacggaagtaggattgggcatgaccattatgagttcagaggctgaatgccgtaccacagcccatcaaaaaaaatatatatatatatgcacgatattgtccaatacaaatataatgtgagccacatgtatagttttaattttctagtagccacttagaaaagtaaaaagaagtaggtaaaattaattgtaataatatatctcatttaactaattttatctaaaatatttcagtatgtcgttaatgtaaaaatactaatgagatattttgtatccatttttcatactgagtatttaaaatccaatgtgtcctttgcacctatagcacgtcttaattcagcccagccacattccaagggcatggtagacccatgtggctggtggctaccatcttggttggtgcagcataaggaaatcaatcaaggtgtgaagacaatacaggggaaagttgtagtacagtcctgaaaggactgaaggaaagtagagttggagtggttattttggtcataactgtatgaatctccctgtggctctccccacaaaccatacctgatctcttcagcctaaaacaatgaaatgctctgaatttctatagaagcagcatactctacatcccattcctagggtagttagctatctgcatcttgatgagatgaatgtttcattctagactcttgaactgttatgaaaatcttagattatttgaatttttccatttgtatcacctatgtggtaagttatttgagagccaggatccagtccgatttatttgcattcctcaccggtgtttgacacctttaagacctagataaatattagtttatttgattttcagctgtaaagcaaaggttagcttgaaaggctgaattccagctcaggaagggtggcacagatctagtttgtactagaaacctaatggtatatgaattgaacacataaacattaggatttgtcactttgcattaggatttgttactttgtattaggggttccacacccagaaggtgaaaaattgttcggtttttctcctttgtatccagacctttaaaaaatattatcagtttcttcttttgatgtttaagttccaatgatgatcctaatactttcttgtagggataaataagctatatttggtgatgacctggagataaacatttggaagctgctactttttccatgggttctttgttaacaataactttgttattaacaaacacagcccacaacatctaggcgatgaaattcttttgaaatcaagtatagtattttacagttgccttcatttgttctctttgactgtaattgttgggttgaagcaacagacttatccagagagccaaggcaatttatttttactgaagactacctaagaactgcttaggtagcttttctctgcaagattaaatgcgaccttcatggaatcatgttagcagggccagcagctagaaaaataaagactaaaccaaaccttcagcagcgaaattcccagctgctcagtggctcagagctttcctgattgctttcttccaatgaaaacactgtagattagttttaagtgaattctagtaggtttggggatttgcaactgacagaagaacagcaaagtgtaatctcactttaaaataatagtcctgaaggtaaatctctattggctctttcttaggatgctgggatttttgttcatatgggaaaacttaactcatacacactgtttagctgacctttgaaggtaaggccctagaaggcagacggaggctggacacctggggatgtggggcaggactgctgctcctctttcttctctccattgtaggcgggtggaaacttgggaagcctgcgaggaaggtccctgtagggaatgtagctgacccgttttttccacttttgggtgtggtcatcctgactattggtgaagtcagggtgaattgaaaatgttacaggagaggatttacttaacttacaggtgcttttaatgcattgcgatttttgtttttcttgaaagtcctcgcagtttgggagatgggggttgggggttggggggcggtgggggggcgggtagaggagagtgctcagctgaaaccgttgactattttgatcattcatccattcagtcatttatttagcaggtgtttattcagtgctaacgatatgtagagggaggtataaaacgaaagaaaattatcttcgatttgaggtagccaggtaggtagatggtctgcattccttacagttaggagcctaattcttccagatagagaaaacacaattaggcaagtaagatgacagttccagaaacgattttacttatctgtgaatcccttttatagttcttccatgggccctgtggggttgtttcagattgtaggggaagccgcagtgctaatgtgacagatttttttgccaagtgtatacattttattttttttaaaacagactcttaatagattgtaaaataggcatagaacaacatattgttttgttgttctttctgtttttccacaattctcccacatttagtttggaacatggaactatggtctggtgtcattaaggaaaactgatggggttaaatcctgataattatctcccctctctacttccccttcccttgtggggagacactgtaaccagcagagctgcagaatcagtactcctgccccccgcggtaaagtgaaggaagctgatgaaagatatccaggaactcttggcactatttttgaaatttttatgtggattggaaataatttcaaaataaaaaggtttttttaaggcttcccattagtgctctagagttactgttgcttatttaaaataacagcctaatagagtatatttgtaagttcctttgtttgcttccccacgtcgatctaaaagggattttatgtagctctttttctacgtaggtcctactttagatatcatttagtaccctctcctcacagggcttgagaagacattgccttgaaggggaaactggtccttacttcattttgaaaatgcttccttttctctcttcgcgtgtgtgtgtgtgcgtgtgcatgtgtgtgtgtgcgtgcatgtgtgtgtgtgtgcgcgtgcatgtgtgtgtgtgtgtgcgtgcatgcgtgtgtgtgtgtttggctatagtgaatactttaagttgcctgaaattaaggaataattatcatccataaaagcactgaaggaaacagtggcagcaagtagggaattcataaatgcatgttgaagcattctttttaaaactgtggtaaaatttacaaaacaaaatttaccattacaatcatcttaaagtgtataatttggtgacattaattacattcacaaggttgcctaagcatcaccaccatccatctccagaactttttcagtatctggatcagaatctctatacccattaaacaataactgcttcccgcagcccctggcagccagcattctactttctgtctgtgaatctgaccactcgagatgtctcatgtaagtggaatcatacagtctttgtctttttgtgtctggcttattttgcttagcagaatgttttccaggtccacccatgttgtagcatgcatcagagcttcattcctctgtaagactgagtaatattcctagattgtgttcgtccattcatctgttggtagatactgggattcttattaatttggctattgtgaataaggctgctgtgatcattggtataaaagtatctgtttgagtccctgctttcagttatttcaattctgtagaatggctgggtcatacggtaatcctatgtttaacatttgaagaaccaccaaattgttttccatagctgtaccattttgcatccccatcagcaatgcacaccggttccagcttctccacaccttttaccaacatttgttattattatctttttgttttgatagggccaccctaataggtatgaagtggtagctcacgatggttttgatttgcatttccctggtaattaatgatgctgagcatcacttcatgtgctcctagccatttgtatatcttcttaggaggaatgtctattcaagggctttcttcatttttgattttgttgttgttgagctgtaggtttgagtcattcattttgtggttttgaaaatgacacactagtaagtctgaaaaactaagcttctccccattacagtatatgtagcatgtggcaaaaagttctgttttagaattttgagatgctgtgaagctgatgaagcacactttgaggaattaacttaggctggagtgaagtaaatcagagcgcatgggtaagtgagaatcagatagaatctcgcaccatgctggaattgggagtttctgtagcaacgattgcctgccccttcccttcattttttcagctggagaaatcaagtaacctgctcagtgtattgtagccaggttaagtacttagtatgttttgttgaactgtgcagtaaataattattttttttctgttgtattttgaatccagaaatgtcttgtgagaggagaaatagcagtgcttgaatatggtagtggatttatcctcgcggctgcccttgtggtagcctctctgcttgggactcggatatggtagtgaatttatcattgcggctgctctgtctgcttgggactcatgaaaaaagccttagagttcttcacttctgtggtatttcaggataaagattagtaaaaacagcctcagagtaacatttggggacttaagaatttaaatataatccattcaatcatggttcaatagtattactgagtggatgaaaaaaaaatattgccgtaataacagatctgttaagtaaaatggataaaagcatttgtgtatttattgtgaattgttgacagcaggagaagccattcatttgttcttacaagagccatagtagataaagaaattcagtgaaatatcacaactgtatggaagcaaattcattgttggtttagttttatgtcctgcggaaatttttcgttttgctcaatccttttgaagagttgaactttattgaaaactatagcctggcaaggtcatgtgtggattataactgagttgtaaataattggaagaagatgcataatatatgtgagaaacagagaaataatatatgtgttgtgaagcagagtggtaagaggagttgcaaaaatttttattctcttcaggcttggggcaacgattttaaaaatccttaaaattagttttaagtactgtgaaaacaaacatgataatgatgaaattaaattgaagactctcttctacaaacaaatatcttaaataaaaccctcagaggaagtcattccttcagcagacaattttgaacagctgtgtgtgaagccctatgctgcgaagatgtaaggttgaaaatttcagatccatgctctcaaagagcttatcatttggttagagagacaagcaggtaaataaccattcctggtcatgaaaagaacgaaagatgggcttcatggaagcacagcaagccaaaggctaagggagagaagaggaagaagcagtatcttctttttattctttttaatttactggagctacccatcatgaactaagaattacgtctttgaccagagaaactggggcgtgcctcaccactgacttctgactggccggaaggagggaggcaatgtcatctggtggccagtgggtgagcagggcatttttggttgaaagaacagcaagagcaaagacatgaagggttgacagtttcttccgttcctggtgcatggaccactctccagggtggctggaacaaacagatgaaggagggagtgtcagagccagttcctggtggccacaaatatctcactcagtgcatgtgttcctgtttcccagtaaggaagggttttgttccgaggatacagccagcttttttcttttttttttggaaggtttttgaggatttggaacattttcccctgtgcatttcagaaaatgatagctaatgactgttagcagcagggcgtgtcgcagctgtgcacctgcagcgttggagaggagctctgaggcgtgtgcatttgtagtctgcggtccattgcgggaaggactgggttgtgcctttgataatagccaggcctgtctttgaggtgcttttatataagtttctaagaggaaatgatgaataggtacaaaaatattttttgtactctcttttgtttgttttgaattggtttgtaaagagagtgattatagtaagtttataatcctcaagtgaggaggaattaaagacagttggctcaaattcaggtaagaaacccaagttagagaatcaaggataatggcaagacccccagaaacaatgccttcatagggcagaagttaggacagggcttcctatccgcccagagtgtccccaggtcttccgagtgacgtcacgccgggccacagaagggctgggcgaacacctcaggtgcaaaccttagccagtgggactcaggaactggagggagccccagagctgcccgtgccatattgaggcttcttccctgcattgggaccacatggatgatccaggaaaattcccctctgtcaaggtcaacagacaacctttaaatcacctgcctccttaattcccatttgtcacataacacagtctattcacaggtcgcagaggctagcgtgtgggatacttgggaggcattattccacctgtatcatgtgttaacccaaccacctcacactcttcatccgacgcagctacagagtgtttggggagatgtggccatcaggggccgaggccctcacagctggggtgaccggctgccttgatggcattgactggatgtttgccggactcttcacttccctggggcgataaattggaagatgttattcaaaggcctagatattcctgtggtttatttcagtatttcaccgtctccactgtattatcactaactgccgtgtttgaaccggttgtatgttgtggagggccgagccacaggactcgcgtagactcggtaccctcagtacgtgttggctgaattcagttgcagtgactgacttggtcctccaattgttatttgctgtccagacacagaggcgcctgcaggacattggtgcccctgggctcaggcacccggtttcccggtagggagggcggaccgggccgcaggaaagcgcgtcagccgggtgtgtgccctggctggaccgaggggtttcctccgctcagtcggcagggaccctcgctgaggtgcgaggacacatggctgactctgaactcgcagcttcagggaaaccttccagcagtttctccaccgcggctctcacgttccccgtggcgcagcttcttcgtatcaccaatggctcggacacgcgggcgccacccctctcttgcccttgtcgttgttcttccttttgttgggaatgttctttcttcccttccacctgaggatccctcggcttccaggcccagttcagatgccccctcttctaggaagccttccagagtcctctcttctgggtttttacataaaatattaaaacttccccataggcctttgaaaaaaattcatctatttgaagtgcagagtcacatttttgtgaggcgaatgaactaatgggggtgagtctgatgcagagagggaactcgaacccagtgtgtcagacgcccgtgatcagtgtgatcagtgatggtgggtgtgcggccgcagggcaggcacccactcgggtgtgctcttcctggcaggcttcgagtctcacctccgggacaccacgtcttgcttgaaagcttgctttaacactgacgtgcccaccttcgtctttgcagggtaagtcctttgaggccagagatcatgtcttcatcatctttgtatactccacagagctttagataatgcttggcacacagcgattttcatgcggttggctcggggtaaggtttttggaatgaaaagttgaaccaacgtaattcaaaagtgtattaacatccttagccggattcacccggaaaatggcatgtaaatagtaaaatttttttttaggttgcatgctttttgtagtcattttatttcctttgcttatcatttgttcataagtttatccatcacaacgtatagttaatatcatccgccttatcctcctcagcccttgccctcagtgagttttccaggagggattcatccactttcttatcaatgagtgattactacatgtcattatgtgcaagctactgtgctcggtattttgggatgagtgagatgggactcctcctcacaggactttatacagagataagcccgttgccaagtacctgaagctgtaagctttggttgcatcagaaggtggaaggaggctgagtgcggtggctcatgcctgtaatcccagcgctttgggaggctgagatgggaggatcacttgaggccaggaggttgagaccagcctgggcaacatggggagacgcctttctctacaaaaaaaaaaaaaaaaaaaaaaagaagaagaaggaagggagggggaggggagggagagggagggaagggggaggggaggggaggaagaagaaaggaatcagtgggataagaggttagaagaagaaggtggagggaatcagtgggaacaagaggttagaaaggtgggatggggatgaattatggtggccaggagtccagattttattcaatgggcgttgtggaaccatggaaggattttctgcaaggtcaggagccatttggggagattaatctggccaagaatgtgcagggtggagaatatgcttctattacagaaggtggaccctggacatcgtcttgctccttgtggaacactgacttagtcactgcagttaggtggagcacgggccctactgtttggaatttctttggggaagtcttaggggagaccaaggaaatctcacctcatacttttcctcctaacataaactagcctttatctgtttcttctcacggtagctctgctaagttgctattaagatctctgtttagtgatgaggaaactatggcttggcgaagttgaaggttgtgagtggtgaggttccagttcaggtgtgcttgatgccaaatctgagctcccactaccatattatgctttaacaaggagagggaaagaaaagaaatcattgtggtcctgggaggggttggcagagaggggaaatagtgaccatccaatggatgccagatccgaccctcccacctctggctaccattcggaaactggtgagaggcagtaggtatcttccaaaaatatttgaagacagttctgcagcttgcagaggagacatggattcttgcttcggaggtattcctgtacttagagtggtagcaattttggctctttttccagttggaattcattggtaattgggatggtttatcccaggaatagaatcaaactagcggaaactgtagtgcgtaagtttatagtttgtgtgctggagcttgaccagatttgaacataaagagttaaattggatgtctccataataattaataataataacaccaagaatagctggtaacctttatggagagctccctggcagaggggacagcttaaaggaaatcctcaaaggaaaagtggcagcaagaagcagatcctgagggccagcctgtggatgtggagtgtgggaggaaatcatttactctcatccaggggaaaagatagtgcccttcaaatcaacctttcagaacaggttattttcaggcaactggtttttgggaaggcgttggttttcaaggtagtctgctagtgatgtgattgaagtcagaaagcagcaattttgttgctctatgcaaataggttttcttaggttccagttccagtatgctggctctttgagtttctgttatttgacttttcacaaatactgaccacattgacatctcctctctcttgtccccttgtcttttctgtgttcctgaaggggcaaaacacaccttttgaggtctgtggagctcaaaaatgaagtcaaaggtgactgggtgacacaaacagctcaggtaattcaggtcctgccgtttctgccacgctcctcctcctcaagccagcatggctcagttatccactctgatgtctacccttttcccacgtgcctcctcttattgaacttgttctctatactgttacgtctccagtgtctgcatcagaggactgagaggtcttttccggcttgcatactgcaggctgacacagtcttaaaggaacttcctactgcactctgaggaggaggagctgtgccttctcgaggtcatgttacttctcctgtactgcaaaggcagtgctcagaggacgtgctgattaagggaaatataggatcacttcttttcccattttccatatggaaagaagctttgaaaatgcagtatgtgctcgagtccatatgctttgaaatctgtgcatgattcttgctttgctgaattgcagaggctgatgccatctagatgctgcgacccagggccaaacacacctaagggtcccagcatgagtttcaatttataaaatacttttaaaagtcagtctacccttttaggtcttaatggccttgcataaatttttctagaaaatgctctttaaaaaaatgatggagtaaaaaatactcttagattttcataatttaaatgtatctggaaggtaatttatctgcaattcacagttttctcatgttgtctgttttttacagaaaagaatattacatgtgtatctgcatcagatttcaagatcattgtagttttttctttttttaattttaagacagcatgtttcacacatgattagattacttgggaagcattcctagaagtgacatggctgggtccaagggtgtagttttaaaatttttaataccttggccaagctgctgtttggaaattttgtacctattttatactcccatagtgcatgtaagatgcaaaacactattctagatattttacatgtttatttgcttttttcttctctctctatttcttctttctttctttccctttttttttttttttttttttgagacagggtcctgctctgttgctcatgctggagtgtagtggcatgatcatagctcactgcagcctctacctcctgggctcaaatgaacctcctgcttcggcctcccaaagtgctgggattacaggtgtgagccaccgcattgccttattttacatgcttcttcatttaatcctcacaaagcctgatgagaacagagaaggtcagtaacctgcccaaagtcacagctaaatgatagagctgggggcgaaagcaggcagtgccgcagagctccacggtccatgttgttgctgcgcccggtctgcacttccatggcagccggcatgagaacatgagcaaagagaggctgtgatgagactccttccttctgggagcctctggatatggctatggcctcgtctttcactctgcttcttgattcatcaggtaggacaggtgcagaatgcttttcctgggccgaagcctatggtcttcgcattctttgtgcagcggtataatttggaaagaagcaatggtcactttggagagccagcccctttgctcagctctcctgtgcccctgtgctgctgtcgttgcccctgtcacctctgccagcatcatttcccatgactgcagtgctggggggacttgggcctggcctgggtccctacatcacctgaggagggtctccaaatagaggtgtgaaggttttacagagattgtgtagggatttcaggctttaaacccttgcttgtctttgctgctgcatttggtgtgagagattgcaaaaaatgtgtatgtttttatcggtgcaaccctagggtcatacagggtcaaaaggcttcctcttttaggaagagtcccagacagctgctaacttatcttcttgttccatccctgtttatgggggatttgtatttttaattgcctttcactctgaacaaagactgagcaagcagaaagtgttgggaagggccccagggaacattctggcttgtgttttctttctgatctgtgggcctgggggacttcaatgttcactttcctgacaggaggagacaaccataggaactagtgtggtgtccagtgccagctggggaaggaaaccagtttcctagcatttatgtttcaggatcaatggcacatgtagaaaaatactatatcccaggggttctatattaccaagaatacccctgaagatgaagcccatttttggatcctcagttctcatgataatggagtttgatgacctagagtcagctttggcatgggctaagccagagcacccttttaaaatgaggatagtaatgagaacgaccccatggggttactgtgagggttaaatgagataatgtatagagtttaatgctgagtgcatcatgggtgcccagtgaatagtcattgctctcacaatccccaccaccactattatctccctagacatcaggagaacaattttgtgaagcaactttggacttttgcatgtatatatttataaacaattcagtgcctgcaaatgtagaagctgatttaagtaccttggcccttatggtaggaaggtctctggggccccttcaccttgaccctctttacctttagagtttcttctttcttcacactttcatgaggaagtatgtgcctctttgaactgaatttctacccaagtaccatggaatctaaacagttcagtgcttttcaacttctcacgttgcataatatttgccatttgattcaaaattacgtgataaaagaaatggaggaggtaaacttgccagacaattcctgtgtctgtttttgcatttgtgcctctgggtatttagtcttttcggtttgcaccagggcttccgtggaggaggagggcatgtgaaatggagcagttgcttacgtactggtctcagtggacggtgtggatgtcattcatagggcatgcacagcaacaaacaaacaaacaaacaaatgccatttaacgtgatccttggaaaggtatttttataataactttagtttttaaatcaaatatttagaatgtcatggagaaagaacaatgatattacaaatgccatcataaaggaaccttagggagactattttaaagaaattttgaatctaaatatttaaagcttttcttattttataagtattttatgtatttgattggtaaggtaaagcacatacgtattgttaggtaaactcgacttaaaggaaataatacttttaaatggctacttaagatttcaaattttataaaaatatttaggaaaagtatttttccactttctaataagcagaaatagtttgcattacattttttcatttcagaactaaacagtgctattattcactacattaagcctagtgtgtgccagattaatgtgtaatataaatacagtttaaggaaaatgatgctgatttttcgtgtagcgtgataacaataatatattccaaagattgaaataacttgaaatctactgcaagccccaaatcccttatttgcaatccaaaatgctctgaaactgaaagttattatcatgactcatttggcaggatagtctgccctgaattgacatgaagctattcatagcttttatttatcccaatcagtgtgaatgttcgtgtttcactgcagaaatattaactgtgttggattaaggggttctgccctaattactttccggggtgttttgttccttgtggtatatggtatgtgtaccgcattatcttgctaacatccacacacttttgaattctgaagactttatctggccccaagattttgaatagaagacggtgagcctgcgtcagtatacctagcccctacaaccagaggcttctcacatcctggtgtttccaggaacagtcgctctttatatctgtttcaggtgtcagtattaatgagaccccattcacattcagaagtgctccattttggcttggtcaccatactaaccacataccatagttcttggtaacggccagcgcagtgttggtgaacatcagtacatttctagtgaattcccatgtataaaataaacaagatctacataaacaacattccagattgtatcttgaaaacctaaagtcatttaaagcattattggtaaggtatccccgactgcctgtctagatggcatttcccacgcattggtgcacgcttcttttgatggcagttcatccttctcctcactgtgattgcctgtgtccctgtcttctctttctaggctgcaagctccttccgtcattgcgtatcactgtgctgggcgtatatagcaagttcattatttagtcaactaatatttattgagcgttggcctctgccgtactctgggccctgggaatagcatggtgaacaaaacagaattgactttggtcctcatggagattcttgtctacagatttgggggcctggcctggtgaaatggagaaggtttgctgtcaagtgactttgaagccaaatctgaaaaatgagtaagagttagcttgtgagaggggatgctcttgaggctgaggggtgacagacgcagagacttgggacggacccctcgctggaggcttgtggggtaaggacaggctttaggcagtggaatgatgagagtctgtttgtgcttttggaagggtgttctggctgtagggcagagctgggttggggttgggggccgaggagagcagtctgaatggctgcctggtccaggctttgtggaaggaaggatcggttcttcacccctggtttcggtttctgttctcagtgtgggagctgttcttggacagtgctgtgtgctcttctccggagtccgaggccaggggagtaactgcagtgttcagccaagtacgagcaagtggaactgacagttgttcaggcttccgtcttgcacacgtcgaggaaacgttgtaaacaagaaacaaaaagcaaagcccttactcctagtgggtcttccctgagccaagtgcttgaaaagctgtgggagtgggaactgttgtcatgatcgaaaatgaaactattctgggaatgccagatttggggcgctgggaaccctgaagtgtcctgcagagaactggtggtggaggggcctctggaggacaaacatctacaatttgcaaatctatcagtgacccagcgatggcacttctggcggtttttcttccaccttaactttgaggtgaggcagagtgacttggaaaccaattctgtgctttaaaatataaaacataaataacttctattgaattagcacagaagtttggctggaggtaaatctttggcgcctaaatctgagcgcttttctctcaaatacgcacgagagctctttggccgtcttatttctcctcttctacacaactgaacaatttaaatgaattatggaccatcactcctcatctcccccaggaaatgaagcttagagcctccttgttcagctaattgttgcttgattaagctgccccttatggatggatagataaagtgattgatgcatgtgcttattaataccatcctggtgcatggaggacgaataaaccgccagcagcttcatttaagcaccacaaagggggtttcctagagtttgttgtatttgcagaaaggctgtcgtcgtctttccctctgtactggaaattacttacctacttggtattgtctttctggccaagtcgttttcttttgagctaatttcagacttccaccacagtttaacaatagtacaaagaattatttttctacatctttggagagtaacttgccaatactgatatcccatcactcctgagtacttgaatgtgtctttgctgtaacgaagatagtctccattgagaccctggcacggccatcagaatcaggaaactagcaccgctgtgtgagtcgcctcccaccggcagaccctgttcctgttggaatgtctcagtcatgtcccttgcagcaggagaatctgatgcagggctaggtgttgaatttcggtgccctgcctccttcattattccttgacttccatgaacttgacacttttgacaatgacaaggcaattttcttagagaatgtgtatccgtttgggcttgttgacgtttctggttatgcatttcttacaagaatatcacggcggtgagactttcttcttcttgcatccttacaggtgatacatgcttttgacttgccccttaattcgtaacgttcatttgatcttttaattaaggagccatcagtcagccttctccatgataaagttagtctttttccctttgtcataaaaaatattttgtgggaggtatttttgaggctatgtaagtatcccatttttcaccagccttttactcactggttagcatccattggtatttcttggctgagtactactttgatagctaccaaatgtcgatcttctaagtccatcattcttcctacatttatttgtttgcattctacattatgggaaagctttttcattcccctatttatttattcgtagattccaattttgttcaatgacagaaatacatttcagtcatgtatttgggtgctcagattgtcttagatgtggccagtgggagctccatcaggttgggttctgtgacttttttttgacatgttgctattatcttttgagcccttccttatttcctttcccaggcttatcttttgctttccctgccccagctctggagtcagccatttctccaaggagccctgattccttttggtggaggatggtgtttggaaaccaagatttgggcactgcctgtgctcattgctgttggggtcttgctgttcccaggcccttttagtgtcaaggttagagaatatgtgtattagttgcatatatacttacacatatgcatgctttttttgttttttttgagacggagtcttgctctgtcacccaggctggagtgcaatggcgcgatcttggctcactgcaagctccacttcctgggttcaagcaattctccctgcctcagcctcccgagtagctgggactacaggtgcccgtcaccacgcctggctaattttttttttatttttagtagagacggggtttcaccgtgttagccggggtggtctcgatctcctgacctcgtgatccgtccgcctcctatgcatgcttttttacctctgtatttatttctgtgtttatcgagatatatgaaaaagcacaaattcaaatcaagtcctcctattctagtgccacagcctgggttattgtagttttctttctttctgtatctgtaacttccttctccagtagtcaaaagcctcacttccattaccctggtatataatataatttactcagttgcctgtgtgtatgtggtcttatgtccccacggttgccccaccacaatgacgatgccctcctcacctccctgttctggctcccagcccctgcacagggctgtggtctccctcctgtgtctatcctcactgcccacatgggcttttgtattctgtgtgccaggtggctgctgccccagccaccctaacaggtgctctctttctgccaatacctaccctggctgcacctgcccctctacccctagtgtctactctattagtttcctgtggctgccataacaaattaccgcaaactgggaagcatgaaacaacagaaatttattccctcacagttttgaaggccaaaagttggcaattaaggtatgggcagggttggttcctattggggaccctgagcgggaatctgcaccatgcctctctcctaccttctggtggctgctagcaatccttggctttctttggcttatggaggagtcactctaatgcctgcctctgtcttcatacaacattctcctttcttctatgtgtgtctgtgtccaagtttccctcttcttaaaaggacaccagtcatattggatttagggcccattctaatctggtatgacctcgtttaacttgattatatctgcacagactccatatgcagaaaaggtcacattcacaggctccaggtggacacgaatgttggggggccactgttcaacccagtacatcttctttgctgcgttgcatcaaatgggcttttggagtaaatcattcataaaggaagggtggaggaaggaagggaagaaggaaactcagttgttttgagaagaatgttctctattactgtattgttcttcttcttcttcttttttttttttttgtgatggagtctcactctgtcgcccaggttggagtgcagtggcatgatctcaattcactgtaacctctgcctccagggttcaagcgattctcctgactcagcctcttgagtagctgagattacaggcacacaccaccatgcccagctaatttatataaattttagtagagatgggctttcaccatgttgaccaggctggtgttgatctcttgagctcacgtaatccgcctgccttggcctcccaaagtgctgggattacaggtgtgagccactgtgcctggcctattgttcttattttctcatctaaaattagggcaccctgctgacatcaggacagtcttggaaaactcaggacttaagagtgagcacaggatggcacttagtgtgatgacactgggctgttcaggaaacacgttcaccttctgttctgtgccaacccggggttggggcacacccccgccccccagaggcccagttccaggtcaaacaactgtctcttggtgcatgttgtcagcccggcgcatgctctgagttctgtaagggtgagtgaacggggaactctgactgtcattggtgctgtgggggaagagagcagcgtgtcagcacgtggactcagctggggactcatggggaagccaccatggtacggcagggcctggaagtttgcgcgtggtccttgattgccctgatggttaaaaccacctgctccccgacttttttcacattatgctctgtgcattcctgcacaaattaaatattctagacagtagttctcccttatctgtggttttgcttttagtggttacagttacccatggtcaactgaggtctgaaaatattaaatgggaaattccagaaataaacaattcataagttttaaattgtgcactgttgcaagtagcatgatggaatgtaacatcccacctcttcctgcccaggacataaatcatccctttgttgagatgagggaatctgctgtagtcccaatactctattatttgactctattacattttctttaaacatcttcccactgtctggtatttgggttagttttgctatataaataatgctctttgaacaatgttgaccataaatttgtgtctgcagaaactattatttgttaaatatcaactattgatggatcaggtactaggctaggcatgttacacatcttatttaatccttaccgcaaaccatgcggaagttatcccattttacagaggagaaaactgaggcatagggtcttgggttctgttaccttctgcgtttggttcctgaagcagtgccctgggaagtggctatagttgccggatggagacctgaatggcttctacagttgtggagatggtgaccagcaccaggggatttctgaatttttggggcaatggcttgttgatttctcatttaaggtctcatttttatcactatactgtatatgagataaggttcctctcctcatctcatatacagtatagtgataaaaaagcgtcactagccaaggctggctcctgcccacttgtcatggatatgggagccgccgaggtcttccctggtctctgccctgcccttagggggctgtgctgtcctggagtcatgtggctgtcagacctcgggtgtcatcctgagtcctgcattgcagctgccatcctactccatgatgaataagggtaggcctatgaagggcctaatcacttattaggaatttgcatgttgccaaattaataagctaagggtcagacatgattgatcaccattaatacccaaaccatttcctagggctgtcatctcagcaggagttgtggtcatagatgagcttacactggctagggaaagctttctgggatgggtggatttaaaactgtctcctggatttctcaaagaactaaaaatagaactgccattcaacccagcaattccattactgggtatatactgaaaggaaaagaaatcattctagcaaaagatacctgtacttttatgtttattgcaacactattcacaatagcaaagatatggacttaacctaggtcctcatcagcagtggaccggataaagaaaatatggtatatatacactatggaatactatgcagccataaaaacaatgaaatcattcacaataagaagcatggagctggaggtcattatcttaaatgaattaacacagaatcagaaaaccaaatactaccacatgttctcacttataagacggagctaaacactgagtacacatggacatgaggatgggaacaagaaacagtgaggattccagaaggggagagagaggaagtagggcaagggttgaaaaactacctattgggtactatgttcactacttggacagcaggatcattaggagcccaaaccccagtatcattgcaatatacccatgtaacaaacctgcacaggtacccctgaatttaaaactgaaagcaaaaacaaaaacaacctgtaatcccagcactttgagaagctgaggtgggtggatcagctgaggtcaggagtttgagaccagcctggccaacatggtgaaaccccatctctactaaaaatgcaaaaattcaccgggcaaggtggcacgtgcctgtaatcccagctacacaggaggctgaggcaggagaatcgcttgaacctgggaggcggagggtgcagtgagcagagatcgtgccattgcactccagcctgggtgacaagagtgagactctgtctcaaacaaaacaaaacaacccctcccaccccgctgcccccaccacccccacccccacccccacaaagttatcttctgaagaccaagagagaagtacttggtatcaagtggtaaaaaacaaacagggctgagagatttaagtaggttggagaaaggagttttggggcacggggtttttgtacttcttggaggtcctgatactaaaaatgaggtcatttttagagtgggaagcaaaacggccccataacgaagtgtttgctcttcatatgcactgaaacggcaggaggtggaaactgacaaatattgaggatgcttactacttcactggttttcagcaccttaaataaatgttaatgtgaaattaacattaagatagtggcgcgtttgccttctatgggacttacttgtgcttctgaaatagttcttcaggttaatcggttatgggctgggcagggcacactttcctccccttctgccttcaaaagaccctggaagcacccaggtggccctgctttatggcagaagcagcaactaaaatgaaacaactgattcatctgcatccaggtgatgcaaagccaggaaaaagcccctctggttctctcttgtttccttaaagagagcatggaggtgaaggggtggagagagggcgagtatctttattttggagtatgggagtgttttcctagtccggactacaaaaggaaagctcgggttggccaggaaacgcagcatgttttgttgatgcccactcgctgggaaagtattaaatggggcaggaagtgtgactttggaaggggctgcataaaggaggctgggaaactgcttcctgtgcacccgggccagctcaggagctggaacgatgtttggcaggctgtggggatcttgctgccctggctgtgtccccttccacacaggctcccagtgcagatgccaggtcagacggaggtgtggggccctctctacctcttgatgtgaaccccagtttggcctgcctgtgcgagcctcatatccaaatgctaagtcagggcctaagactccagttcaaatatgagttctaccactcagtagctctgtgaccttgggaagttacttaaccttacgtgcctcagtttcttcatctataaaatggggaccacagtagtacccacgttcttgggatgctgtgaatcaggtgagcttatcctcttaacgtgcttagaacttgcctaacactgctaagcgcttaatactccttagctattgttaataccctcatggtggaggatattgacaacatcctggtaagtgggacactccctgctggccagctggtatcattttcaagggtttgcaggtctagatctggatgaggcagttactcacagaaaagctcccttgcttaccaacaggttgtgttccaaaggtgattaagtttgcagagtgtgcatcaggctttttaaaactaagcttttcccaaaacaaagctgtttcagtagcaggaacattacaggggtgtcacgagcaggtattttctttccaccagacacctgaccactcactgtgatttggaaagattagaaccggccgggaaacgatgtttccatctttgatgacaaagctttcctcattcatggtagccacatttcaggtattcaggagccaccttgttgactgccctgataaataacaagttaatagttgcaaaatgtctactggatagtgctggtctacattcattgggtgtttgctgggtgcagagtacaaggcctatttaggcctaaggagcgttggtctcagtggattaaagcacatcacaatgaaccagtgactttaggacagtgtaagatgcgtgctaactcactgttagaggcagtgagttttatgacttcaagggaagggggcatgtatgtgtcttgtgttggccaggccaagtattgtggaaaagagacatttgaacaatctttcaaggtatggcgagacgtttccaggctaggcctttctcctgagctccagcctcgcacagctagtagcccagccatcacctctttttgggtatcccagagatctccaaccctgtaggccccaaaccactctcagtatctctcctcaaacatcccacatcttctgttgcagagtggcactcccacccatctagtctaagaaagggaaaaaggtcacacccaagtgagtatgaagagggaggcgaggtagacattcagaaagaagagcctcgcagatctcttttctctgtgaagctggaggcagggagggatctgaaattgcacctgtggaaaatgggaacaggacctggggagaagaaagcaaaaaagatctgcagaggcagagactctgagagctcagatgaggcgatcagccgcccatctgctgcgaggttctccagcctctcacaaatgtttgcagtgtgagcaaacaagacggaggcatgaaggcccgtttgtagtgggaaagtggccaggccactgtgtgggaaggagaatggggccggggaggcccctggagctggaatcccatgttaacgttgctgcccacgttaatatataagcctacgtagtcttgtactctcacccagcagacacgcagtaagtataggcctccgctgtgtggaatgtggaagtggattgaagggagggtggccgggacagggacgctgcagcagctcggggcagagcggagagcccctgaacaggctgccgcgggagcatggaaggaggccgtgggtaatggggatggtctgacagatggagactgcaccccttggtggctgacatggcaatgggtgggagggccagggaagtggctactgagccagggaaagtcaagaaaatgtcagcagagaggtctagctgctttcccattcgtgttcttgcactgtgtttcttacatctgcctagggaactgccctttgagagtttgtggggacctttctcagaaaagtacacatctgggtgaacgttaacacactgcatgtatttttaaggcttgatctctggacgaagagctgctgttcttgttaggctgcattgagaactgttttctagagtgaccactgggtcatctgcagaaccaagaaccagtgatagacaggtgacttttgtgcacacacacataggggccccaagtcagtttgctcgattatggttcggatgcagcacacatttcaggtaccagaggagtctgtggtcagagacaaggtaaattttataaagcagctatgggaatagcttccgaaaggatatagaaaacgtgcctaataggaaaattgtgcatagaatggcaaatatgtaaaactgtaatctggatgattttcagcctggaaaactagttttgtggtatttaaaagcattttagacttttgatttcatatacgtttctattccattaatgatgaaatctattcaccactggcctcctgttttcccatgactcaactggagatgtttattaaacatctggaatctggaagtccattgggttaatggatactaaataacagtgattttcatacttaattgcttatcaaaattattctaggataataaaaaaaattcccggttcttattagagtggggccagggaccttttttttttttttaagtacccccgctccgccccgcttttttttttttttttttaaagttttaaggtaatagcattgcaaggcagttttgggatagtggcatgaacagaacagaaaagaataaaggtgggttatgatgtatttggagtagcagtcctgcctcatcattcatcctgaaaaatctacgtagtaggagaattggtggttgaattgcttgaaaccttatgaggaagactggctggagactcccattcttaaatgaacctatgactttctaaagttcaacaaaacataaaaatcagttttgcattggtgcagataatatgtacactgagaggcatggttttttccgtatctagccctccatccaaacgttaaacgtctttctgatttcaggactggcaatggctgacttcagccgtcagggtcccatgagagtctggagagtgatttgaatgtcgcaggcagagcaggaggaagcgtggccgcataggaaggtctcaggccatgcttcctctctcatatagggggtcctgttatctttgctccgaacatactattttcatgccatgaagttcttgtacattttatttctacctcttagcagtcagtacagctcttagggtatgcttctccttgtttccctgtttctacaaaaatgttaaaaatattaggccaggcgcggggctcacgcctgtaatcccaggactttgggaggccaaggcaggcgaatcacatatcctcttctgcattctacttcccacagtgccccctccctctctctgccgtccacatgctcgcacacacctgcacacacactgtcgggaggcagtccagcctagtgcaatgtttttataccccttcaaccccaggaccagtataatataatgtgacattaaatggaagcaaacgtttcataaaacaatgcttacctcactttgttcggggtgctccctcattttccattctatcatattgtaaattaaaattaagttaaaagtgctgatcttaatgcaacaaatgatcccacgaccctctggtgggttgttagcagagacttgcaaaacacaggtctagaggtttctggcatattctttggagtcagacggatgtagatttgaatgtttgctttaccacttaatggctgtaagtggagctttgtaagtagcttcatttcctcatctgtagaatggagagtagctactctgcctcatgtggcttgttggaagattaagtgaaataacgcatgaaaggcatttgggctgagggtcaggctctagttagggctggaatggtattaatgatggggatgatgatgatgatgttcaacttctaactccagctttcaatttacataactttcatggaaattcttacttttgctgaaaaagcacacagaagtcgttgtgaggaacttgcaggaggaacttgcatttgggaaaagactattgtgtgcccaggaaaaattactactaaacactgctgttagattcctatacgcgtgtcatcgtgtgtgtgggtttttttttttttttttgtacgttccaatagccactgtcctgacccagagcagtagttctagctcacctccttccctccatttggctctgtatagagtgctgcatgactcgtgaaactgaagcatggcttttcccaagtcgtgcactcagaagtcattatagcagcctgcgtaaacaagctcagactctagctgggcatctgagaccctcctgaggttcaagtcctgcctcctcatctagaggcgtgggtgacttagacattttcttttctttcttatttcttcttcttattttttgtgggggctgcctttttggctatgcttttcctaatctctaaaatgatgataataggctgggcacggtgacttatgcctctaaccttagcagtttgggaggttgaagtaggaggatcacttgaggccaggagttcaaaccaacccgggcaacataggtagtgaaacccctgtttctacaaaaatattttaaaaaattaggccaggcgcggtggctcatgcctgtaatcccaggactttgggaggccaaagcaggtggatcatcaggtcaagagttcaagaccagcctgaccaacatggtgaaaccccgtctcgactaaaaatacaaaaaaattagctgggcgtggtggcgcatgcctgtaatctcagctactcaggagactgaggcaggagaattgcttgaacccgggaggcagaggttgcagtgagccaagattgcacgactatactctagcctgggtgacagagcgagactccatctcaaaaaacccgaaaaacaaaaaattagctgggtgtagtggatgcacctgtagtcctgggtacttgagaggctgaggtgagaggctctcttgaacccaggaagtcaggactgtagtgagctaggattgcaccactgcactctagtctgggtgacagagtgagacctgtctcaaaaataaaatgaaaaaataaaatggggatactagtatttaactggttagagctgttatgagagttaaagatgattgatgtgaaatacccagtgcttgcttctcacacaccagtgactcttatgaagacacccctgttggtgcataagacagttgctctgctcacatcagcaaacacatcttcagtcctgctttggccgccgataccaaccttttacctcccctggcttgcctgccaccttctccctgcctagacagcacctccccatccattaaggtcttcctttaccataaagctttcctttgccataaagctttctcttatatgcccatttaacaatgatttatgtattccttatgaactacctaacttagttggcaattaataatacactaccttctgatctttattgcatagtcttttattattataattataggattattagttagctttatgtgatttatctctcacatcctcagttaacttatttgttccttgagggtagtgatcatgtcttaccgtctttgaatcccccacagcactcagcacagttccttgtaacaatgtgtgtttaatgaatttttgctgatccattgggtgactgggtaataagaaaaggcgttccatggccgggcgcagtggctcacgcctgtaatcccagcactttgggaggccaaagtgggcggatcacgaggtcaagagattgagatcatcctggccaacatgatgaaaccctgtctctactgagaatacaaaaattagctgggcatggtggcgggcacctgtagtcccagctactccggaggctgaggcaggagaattgcttgaacctgggaggcagaggttgcagtgagtcgagttcgagccactgcactccagcccaacgacagagcgagactctgtctcaaaaaaaaaaaagaaaaaagaaaaagaaaaagaaaaaagaaaagctccagagataatatgaatcctagggtaatgttatgttcctcaagatctgatttctatttacttttggtagttccaggtcattttcattagatcagggattgagatgattcaaagctgggcttcagcctttgatattagtttatttctacttagttgtattacttacaaagcttgtgagggtgtttccaggaaccccttttcctagctgcgtcctgatgttcaatttttgtctcctcagtcacctgagtgtgtcaaaagctctgctttcaaagccccacagcctcctcttcagaaaggagcagctgtccctgcgctaggacgacagcagccctaaatgtcaggttcaccttcctgggtttctttttctcctagatcttgcccccctaatttttaactaccttgttagctctctgatgcatttaaatggattttaaaaatatattttgtccatgtttcttagttattcagcctgggagtcaggtctgaattacctactgtaccattaccagaagcaccacccccctctcagctaaggaatttattaccttaaatccagcaggcacatttagaagtctctggaacagagaattaacatgattaaatggtattttaggaagatgactgtcagtggtttgcaagacggagaggagtttggaaagtctcagtaagtagaacaattaagaggtcttcataactcagtgctttctaaagtacgatgaaggcagaggttagagtggataagcctgggtgtttcacgttagataggcctgaatttaaatgagagtcttggctctccacttactagcaggtaataaaggataataaagtccctatgtcctagggttgtaagggttaaatggcaaaacttgtagaaaaccctaggttttttattttctatttttagagaggggctgtctttctgccacccaggctagaatgcagtggtgtgatcatggctcactgcagcctcgaactcctggcttcaagtgattgtcccacctcagcctcccaaggagctgaaaagacaggtgtgtcccaccacacctagcaagaaaaccctagttttaatgcccagcacatagtaggtgctctgtaaatggtaaccgttgctcttactattccaagaaccaaaattcagttatttgggtgaaaattcaacctcactgttaatagcactaatcatggatagtactgtcaacttcatgggggatcattcgtgacttacgaatcacaatgaatagcttgcatgccttatatagcaggcttggcaccagtgatattctcagtacccaccatgggctgaattgacttatggccagatgccacagttttgaagccagtcccagcctcaaatctcaaaggtgtaaaggtagatgattttacaacgtgcctttcgtcaggctccagggtagatgcttcaactcttttacttactttgaagtacaggttgctcatatattaggtttgcagaaccataaaattttagcattttacttctaaaaacaacctgatgtgcaagaagagaagcttacagaaaaaaaaacatcagattatgattcatcgtatcatggataaccccaggaatcatctgtttaaaacgtcccatttttctagatgatcaaagtgtgggccgggaagatggagggattagcccaaggacacacaccagcaatggcagagtcaaggtcgcgacacaatgtcctgatttctgtgcattttggttcttagacaaacatagccgctctgtgtcatctccactgagctacctgccttctctaactctgttcgaggttcacgtggcctgactgttagcgcctgtgggaggcttgccttacagaaagaccagcgtgtcaccttgactttcgataatggaagctagacgatacataccgagtaagcatctttctttccagtcctcagtcctctgaccctctgtgcctgtcatctcagtcttttaatctccggaaacataattaatctgtttttagtgtccaactaaatgatccgtttctggtgctaggcttgaggtagattctgcctttgctgtttttcacagaagtaaagatgtacgctcaccctcggctagtcgtgagaaacctgtgtcaaatggcaaactttgtaccgtgtcgcgaggcaagcgcactggtaatgcactacctgcccagggcgtgggagatgggtcaggggagaaaaatcaagtcacaaaggagaagggccttcatgtgactgggttagcttttcattgagtctcattggagatgtcctagctacaaacaaaccaaccaaccaaccaacccaagcaaacaaaacctgaaataagtgtagccctttttaagtttattttttactctgatgaaatacttgttcgattttttgctttttctaaaagttacctataattagtaacagtcctgattgaagattgtgaacttttctaataagtttgcggtttggctgagctgcatccttactagacaggcatgttgcgtaagtgaggaatgcacccagccggtggatgacaagcccggcacgccgaccagtggaggagtctatcagaatggccaaaatgaccacacggcaggagcatgggagagccaggccattgagcatgaacaataaggggactctagagctttgcttctcagagtgtgacccaaggacctaggggcttgtcagagatgcagaccacagcggtcgcctggaatccactgacttgggattcctgtgcacgttcaagttggcgaagcgctggatttcaggatttcacactcagctcttccctttacgttggccaaactgaccctatcattcttttgctaaaatccttcggtttcctcttcagtcttagatcgtggtcatgaccaaaatcctaggcatggtcttctgggtgagccgggtctctgggccctccctgtcactgactgctgtccacaggggccaccttgcctcagggcctttgcagctctcccttctctgttagttgctcagggctgccgtaacagatggctctcacacaacagaaatgtattccatcacaattctggaggtcagaagtctcagatcaaggcatcagtagggccctgctctgcctcaagggtcttggggagaatccttccttgcctcttccagcttctggtggctccaggcatggttagctgcagcagcctcactgcagtctctgcctttggcttcacgtgcccatcctccctctgtgtctgtgtcttcacgcggcattcttctctgtgtctgtgtccacacttccctcttcttataaggacatcgggttcctgcgagctactggtcacaatattttgtcagctgatcattgtataaccttgtcttatgtgtttctgtttgaagacaccctctgtaatatttattgttgattgatgagcattgaactcacagcactataatgcatgcctgagcaaagcttatctaatatacgtattttccctgtaaggcgcatcatagccttctggttcttaggaacccgggaaggcacttcagcacaatgcctgggggccattttaaacagcaaagtcaccaaaaaaagcacaacgatgtgacaaatgtcgcactctgtagcctgtgaaaagaacacttgtctgccataggagagcaagagcgggaaggcagagtgtggccttgtccagcctcagctgggaacacgtgcatcagatgacttgaattcagcacacgtccccgagtgaccaccaacgcatctgagtattgatttgggggttgtggatatgtttcagtgagtaggcaaattcacagatacagaatctgcgaacagtgtggatcgaatgtgtcttcacacacaggctttagttttaaagacagaaagttgggttttttgtcttggtgctttgctttacctgacaattgactttttcaactactgtttccgtttaaaactgatcttcgctgtctttcagagagatgcctgtctgtgagaactttaaaagccatcactaatataagaacgggaaccactgtgggctggagggggtcacctgaataggaaccataccatatggctttttgaactatttcagatgtgaccattgtttttttttttttttcccccaactggttatttgtgagaaacataatggaggaaatattatattctgagtactagctggaggcagggccacttccacacgcctctcgtgtttccatattgccaggctcaggctcagctgcagcgccagggaccacgcacagcacttctgcacgtcaggctgtcaggagaactggcgtctgttgctctctactcgtgaccactatacctacccctatcctgtaactactcttccctcgctcttccctctattttcttgaccgctctggatttagtggtctccaatctgtgtcttgaggtcttttccagagggaagatcaggctgggctggtggtcaccaccctggcgggcagagctcttgcagggtgagcctttgaggggtcaccagtgcactcctctgtgcacagcttttcccagcactccctagtcttttctgaaactctttatcatcttcatggggcatggtacctcccttctttccagtgtcctgttaggttgggagttcctagatggcagggaatgtcatctttccctgttcctggagcatcattctcaatacatgacctttgaatgggtggatgaacaaatgaatgaatggaacaaatgaatgaatgagaccaagagcagcagtatctgcaactccttgtggccattccgtgttcttgtgaaatatctctaaggttcccgtttgtgtctcaaagaatggtggctggagcctccatatgagtggaggaggccaacctctgacggcaccccacctaggccctcagagccgtcttcagagctggcctgggcctggcagtgagtgtttcctatgtggaaggcaacatttgcgctttgtaggactagcaaaagacctagaagagggcggagcatgggagctcatgtctgtaatctcagcactttgggaggtcaaggtgggaggactgcttgagcccaggaatttgagaccagcctgggtagcatagggagaccccagctctacaaaaaataaaaaaaaatagctgggcgtggtggctcacacctgtggtcccagctactgggaggctgaggtgggaaaatcgcttgagcccaggaggttgaggctgcagtgagctgtgatcatgtcactgcactcccgtctgggtgacagagtgagaccctgcctccagaaaaaaaaggtgatgctcttcctgcggtagaacttaaatttggttaggaaaagagagtggactatacacagctgagaggtgtataggtaaggcaagggataagatgaaagactttacttaaaacaactgccctaaagcaatgtttggtttttcaaaggagcagtgtaagatcagtgagtaacataggagctggaggcagagggactactttaggcgggagtggtctgggaagcccttgtggaggaggaggctaggtcttagagggcggataaggacctgcaaggccagggaatgaagagcagagggcacgggatgagcacggagcaggaggtgtctgcagcagtcagtgggccagactgcaggaggcatacaaggaaaaggctgggccagactgcaggaggcatacaaggaaaaggctgggccagacagcaggaggcatacaggcccagggtgaggcccaggggctgggggtcacggaaggatgcttgtaactctggcatgttctgggcgcagggaatagaggagagaggaagtccatggcaagctgggaaggagagttattgagacatcagcccaaatgccaaggaatagaattttcagagctcaattttggaggaaatgaacaaaagaaggaagggaccaatcaggattgagaagaggattacagtgtcacactgtctgtgaggtcctatagaatggaggcttgcacctgacccatctttgcttttggagcccagattagatgtgaatgcaggcatagatagggtgaagatgagtgggggacagtgtggaaggtactttgttagtgattcccctctggatctattccgatggaccaggagaagtctatcttagaaaggaatctggaagcagcagggaggcattgtgtggactggcggaggaagggtggtcagactatgaaaatgatttccaaagggaaagtaagttaaaggaaaagggggtgatgtcaggtcagcggggaggctggcattgaagaaagacacttgggtgagagactgcattcgggtaaaagcaaaagcaaaggagatacctgtgcagggttccaggggctctggaagtaaagtcaggagggacgggtagttggtggaaaactttgggaaagccaaattaactgattcctttcgagctttaaatgttaatattgggggttgaaagcgtttgtataacccagattctcaaaaggaatggcttggctatcataattttttcccacaactgctttgctctgcccaccccttggctcttggaaggatcatccccaaaggcgttggggcctctgagcaacggaagcctcaaaacacggccagtgcagtggggataaagcctccctctaggcaaattcctggggaggagtgtgggtcctggtctccaatgtccataggaccctcccagcggagggcaggcctggaccatcctgtgtccccagatagccccctggccggtgcgagggctgggcttgcacaggtggcacagcccctgagtacaccgaccccccagccccctggtccccagccccaggaaaggagagaaggaaagagtcaggcggggtgtagaactctgcagtgcagacaccacactgagtggcaccaacgcctgacgctgtgtttctctccctcaagggcaccatgccggtggaaaggatgcgcatgcgcccgtggctggaggagcagataaactccaacacgatcccggggctcaagtggcttaacaaggtgagtgggtcagggtgggtgtatgtgtgagagaggtcctggctgaaacacgcccatgcggactgctgaaagtaaaatcgtgtgtattcaaaatcttaggcttattcatgacaaaaaccagccaacccaaaatgatcataaaacatcaagttatcatctcaaaggctttttttcttttagagacagggtctcactatatggcccacgctggagtgcagtggtgcagtcataactcactgcagcctcgacctcttgggttcaagtgatcctcccacctcagcctccagagtagctggaactacaggtaaacgtcaccacacctggccaatttttgtatttttttgtagagctgggatctcgccatgttgcccaggctggtcttgaactcctgggctgaagtgatcctcccacctcagcctcccaaagtgtggggattacaggcatgagccactgaacccggtcacaaaaggatttgtatcctgtacgactgtagcctcagcctggagtctccaatgtctgctcacctttggtgttttggctgactgcctctcgaaagctccttgctttttttggaaagctccttgcttctttgaggattcttaccctcttccttctccaaattccttttttttgcttctcctggccttttaggactagaggacatggaaactccagggttttatattaggaatggagcatttccttttccatgttctctgtttaaagaaagcttgtttttgtctttaaaaaaagccttctttttacctctgtaatgaagccctatctgtgtgtccacctttcctaagaaagcagccagtcatttacaacctgccccttccaggcacaaacactcccttactttgttaacctaaaaactcttaatttaattgatcctagctgttaggggtgaatcagaaagagataatgtcggcaaaaatgaaaaacttctagaactatataatctagaaaagcaactaaatatatatcatgccttctttaaggaggcccaggagagaagttcctctcctaccagaacagttctgagtcaatgcctttttcctcttctccactccctccccttttcttttttaatcttaaggacacaatgaataatttagctggccaggctttatctttgtatcaggtacaagagcttagagccagattgcagattgtagcctgcttccaacaagggaacaggatattgcagtataattttttttaactaatatcattcctggccttattgggtcttttcagatatctttcaaatcttatttctttttactattttccttttatccacttattttgattttttttttgttttctttagacaaggtctccctctgtcacccaggctggagtgcagtggcacgatctcagctcactgtaacctctgcctctgtgctgaagcgatcctcccacctttgtctcccaagtagctgggaccacaggtgcgctcctggataatttttatattttttgtagagatggggtttcactatgttgcccagactggtctggaacttcaggactcaagtgctgcccgccttggccttccaaagtgctgggattacaggcatgagccgcagtgcccagcctgattttgaatttaatgttactgtgttgaatatgtctgtctgagcctttctgaaacaaggtgaggcactaagtaaatagaaatgaagaaaccatctgcttatttcctgtgacctgtcccatatctcaaggtcttaccacaatgtatttttctagggttgctctatctatagtgttttagatttacatatgtaatcagcttcttccaaagaaacaaacaagaaatggagttgctccttggtcagctcagttagcaggggtgccgtggaggtataaggaaggggggaccagagtaaaggggagctggagagccagggtagcaaatgacactgaatgaaagctgacttgtactcagcacttactgtgtgccaggcacccttctaagcaaggtacatgcattagctcacgttccgccaccatggggtaggtacagttaatattttccattttacagacaaggaaaccaaggcacagagaggttaagtaagattctgttttgaggaacaaggtagcattactgtttgatgtggagtgggagaggaaagcaaatgctcctgtgttctaaagagaagcaagtggtctgcttctgcttttcctttttcaaaaatacctccactagttttggttggcaggatgcagtggagaagagacagtgtctcacacctctcctgttgagcaggtgcctgatatgttgaccgctgtggttggtttagactaaccattagtcccttcttggtgctgtagtagatggaactgtggctcccggagaagatatgtccacatcctaacctccagaacctgtggatgtcacctcatttggaaaaagggtttttgcagatatagtgaaggaccttgagatgaaatcatcctggattttctgggtgggccctgatgccaatgaggagtgtctttataagagacagaagaggagaaggcacacacagaggagaggggcatgtgaggactgaggcagagactggaaataggcagccgcagccgagggactccaagaagaggcgaggaaggatccttcccagagccttggaaaggagtgagccctggctgggcgcagtggctcacgcctgtaatccccgcactttgggaggctgagttgggcagatcacctgaggtcaggagtttgagaccagcctggccaacatggtgaaactccatctccactaaaaacacaaaaattagctgggtgtggtggcaggtgcctgtaatcccagctacttgggaggctgaggcaagagaatcacttgaacctgggaggttgaggttgcagtggtggaggttgcgtgagctgagattgcaccactgcactccagcctgggtgacagagcaagactccatctcaaaaacaaacaaacaaacaaacaaacaaacaaaaaaaaaccggagtgagccctgcagagaccttgattttggacttctggccttcaggactgtgatggaatacatttctgttgctgtgagccacccagtttgtgtaatttttcatgacagtcttaggagattgatgcaccctctaagggtcacttcctttctgggactctcagttgagatgccttttcttccatctattttgtccatgtttttctgatacaggaccagaaggcaaatggatttccctttgtgcaaatgaacacttggcccctttcaggcagtccttacctgctgagcgtcactcatctggctcttggctcgagagttctcttcccgaggcatggaaggaaaggagacctctgtgtcatctcacagggctcctccgctacagctggacctgagccaggctgatgaaggagagcgtgcccgtggctgccggcccgtgccgcctctcagcaccgccctggaacagaggccgaggcctgcactgtggccccgaggccctgtcaagctgcatcctgctgaggcctagccagagtgggcacgtggcattgctcgtgcacatgggcactgccatcactgtcactgcaggcctcggctggggtcaggatctcttctctccatacctacactcccacagggcatttttttataggtttccgttaacttaggcttgttggcattcatctgtccatataaatacttaactgagagcctaatgttcttccctcccattcacaagcattctgcctgggaatccttgtttatattttgagtggtttgaggtcattccaagatctcttttgccactgaagattgttgtaactcttagaatacactgtccatggggctgtgggactcacttctgcttcagtcggcattcaggatgtgttcatgtttattgtgaagtgctccaggctgggagccccatgcaccggtgccttggctatcttcttcatgtctgcatgctcagggccaggcctagtgcctggtaagtgggaggccctctgtcaaaattgttctgggaatacacagatgaatgtcatggacttgaaggggagcaacattggtggtgtttttgttctgttaagataatcagatttatggacactggcttggcagttgtcacatggctctcagaaagtccattcaacctactccattcttagtaagagagaaagagttggttaattaatgccttaaatttgtttccatcctctattgtcttagtctgttccctgttgcttctaacagaatacctgactctggataatttgtaaagaagaggaatttatttcttatagttatggaggctgagaagtccaaggttgaggggctgcatctggtgagggccttcttgctggtggggaccctctgcaaagtcctgaggcagtgcaggatatcacccggtgcggggaaagagcatgctcacgtgctagcacaggtctctcttcctcttaaaaagccacaatcctacccctcatgacaactcattaatccattaatccctgaatggattaatccattcatgagggcagggccctcatgactcaatcacctcttaaaggcctcacctctcagtactgccacattggggattaaatgtcaatataagtgtcatagggggcaaatattcaaaccatagcacctacttttaataagtttgaaggagggtgggaatggaatgggtcccttggattcctctgaaggaacagcgaggaagtttggaaaagtgcattataaccagctcatgaatgagaccttggctggggcaatttacctttggttatgggtatttgcaaatgtgcatagcatgtttgagtagcccaatgacaaaaagaaataggatagcaaattttcatatgcctgtatctagatgtatgaatattttgccttatctttgtgtgtgtgtgtgtgtgtatctgtgtgtatctggtatattaaagcagctccctgacagcatacattgtaagacataagggcattttcttatatatccacaatataccattgttaattggacaaaattagtactgtttaatatcatcactgctccattcatattaagaatgccttgagtattcccaaataatctttttacagttgatttgttcaaatcagaattcaaagactgtccacaggttgtgtttggtgtttatgactctaagtctctgctgactgtgggcctctgtttttttccttctcgccattgacttgttgagaccaggttagttttgggtttgtccacatgcttgcttgtggttccctgggccatttcttgaggaaggaaggaggcagtcacatccggggtcctggtttctctcgtggctccatgtgacccccaactctggtggggttattgatgttcttagttcttcctggatccatgcactaaggcaggggaatcatcagatctttccctttttttcactttgagagtagacttgtgtttgtgtaaacatcaggctatctctgaccacggtaaggagtccagacaaaaatagcacactaattggaacgtcttgcaaatgttggggggaagaagaggcagaggagataacagaactagtttccatgtggggccaaggaacattgttctacattgctcaaaataatgtcagatgcttttctgaagtcaagcagcgctcatctctcctgccttccttcagatgggcagagttgtgcacacacgtacaaatggtgggccctggcatggcgcgtctgtctatacacagcatgtaccaccaccacgtgtgcaggactggtcactcggggatgagacacctggcacatactgacgtcacggggtctacacacacatagcaacaccgtcatgtcccatggaacacacaacttgtgaccagaatgtttactggtcagaatctctttcagttttaaaatgaatcttgctttctcttaccttttcatatggtcttcttcaaaaaaagaatctgtgatacaattttaaagatatttctgataagtttattagtcttttcttttttttcctgaagtatgaaaaactaggtaaaggtgacatgtagtttaaaaaatatttaccattttaaagtgacattcacgatgtcatgcagccatcaccactgtccagttccagaactttttatccctccaaaaggaaatgctgtacccattaatcagtcacttcccatttccctcccccctagcttgtggcaaccagtaatctgctctctgtctctatggatctctgctctctgtctgctctctgctctctgtcttttctggaatatttcatgtaaatggaatcattcaatttttggccttttgtgtctggcttctttcatccagcataatgttttcaaggttcgtccacatggtagcatgtgtcaatactctattcctttttgtggctgaataatattccattgtatggatataccacattttgtttacccattcatcagctgatggacactcgggttgtttccatcttttggcttttgaaagtagtgctgctatgaacatttatgttttggtttgaatgttggcttagaattctttgggtatatatccaggtgtaaaattcctggatcatcaggtaattctgtgtttcactttcttgaggaatggccaaactttttctccagagtggctgtaccattttgcatttccacagcgatgtgtgaggattccagtttctccacatcctcaccaacgtttgttatttgtgtatctttttttggagacatgtctgtgggttagtctgtttcatgttgctacaaaggactacctggggctgggtaatttataaaaaaacgaggcttctttgggtcagggttctaggctgtacaagaagcatgaccttggcatctgcctctgttaaggcctcaggatgggaggcaaagggcattacatggcaagagagggaggaagagagaatggtgcaggcgacaggctgttttgaataatcagctctcaccggagctaatggagtgagagcttactcattaccacgagaacgacaccaagccattcttgagggatcctgccccatgacccaaacaccgtccaccagaccccacctgcaacactagcgatcaaattttaacacgagattttgaggggacaaacacctgaactattccagtctactcaggcctgttgcacatttcaagagggtccatagtgtatgttgctgggtttggtcagcgcttttgtagttgcatggcttttgcggtttctgtgggactaggtttggttgtgtgtgtgtgtatgtgtatgcatgcatgcgtgcagatgcttaaaaagatctactttatctgtatcaattttgtgtcttgcaagttagatttcagattgtgtcaccctagaactcctttgatctagaaaaaagtgcaacagcaaattcttaagaatctcggtgtttaagcataaagctttagattctgggcatgcacttcaggaaaagctctttcacgaaatgaattttcacttgtattcattttcatgtgaacatcaataaatggcattaagtgattttgctgtcgattttcatctacattaaagcataaaatgtcactcagcccctttctgatcactgtccttttgaaattggctaacccgaagccctctctgtggatgatacagaatgaacaccgaggaatttatgaaaaagtctctcactttcagttctcctttaataactgactttttagaagatggtagaattttccttttaacaggttttgggaaactctccaatgttctgaaatagtctttgttctggctttgtgattggttctgtggagaggcgctgaatctctttggggacagctgggaccctttctgtgtttcactatgtgagactgaagtggtggaaactccctgctgacatttcctctccttcctcagcatctagtgcagggatccgcatacctagcaattaccagaactgccttgagagctttgaaagagtacaacctcctgggctttaatctccacagaatccaggtctcaactggtctgtcataggacagggactcttccaaatctaaaagctgggagacaatgagtgggtgattaagtaatagcatatggagtcgcatgacctgggttttgaacttagacacttattatcctgcaagttccttgactaaatagttaaaatctgcttcttggtttcctcagctataaaatggaaatcgtaacatatacctcactcagtaggctgtgggaggaagacaaaactgaggtccctgtggatgtgggtagtcagatgcacagtgccaatgggaccttagtacctgccggtaccgccacaagagctgcttgggccaggttcctcatctgtagctttactaagagtacggctttgttactaaaccatgggtttccaatcatgtgtttttcagggttgcttgaggcggttttgagttacagacctcaacactgagagagatgtagagatagtctgatataaggattgtattgagggatgtttctccagaaaaatgtgtcatttcataacctctacctctttgtttgcacttcttgctatttcttgcaggcagtagacccacagggattcgaacattactttctatttctgttggatgcacaagcaaatggagatatttggtttctgtgacagtggcctcagatgtacccgacttttctttagtagcatcaagggttttggaaacttgtctaatttttaatttacctaagatagctggagttactatttaccaaacgacgagaataaattataagagtaagcattagaagtttcggtaggtggccatttttctgtggttttataaaaaaaagaggcacagggccgggtgtggtggctcacacctgtaatctcagcagtttggaagcctgaggtgggcagatcacttgaggtcaggagttcgagaccagcctggccagcatggcaaaaccccatctctaccaaaaatacaaaacttggccaggcgtggtggcacatgccagtaatcctagctactcaggaggctgaggtgggagaatctcttgaacccaggaggtggaggttgtagtgagccgatatcgcgccactacactgcagcctgggcaacagagcgagactctgtctccaaaaaaatatattgaaaactagaaaagaggcacaaataatggaacacacaaggtcaaatcatcacctttgaccttggaaaacattcctgctctgcaagacttcacgagactgactgtcactcggggtagtctatcaagatttgggatccagcgggggaagtgggtttggtttacagtagattttcttgtcagcagtcaacacattcagcgatgcttgctggggaatcttgctggctagaccttcacaaccttttgcaatggtgggccaaaacccatgactccagttctttaccttttttttttttttttttttcaggaaaagaagatttttcagatcccctggatgcatgcggctagacatgggtgggatgtggaaaaagatgcaccactctttagaaactgggcaatccatacaggtactaaaactccctgcggcgtttatagaggaaggcactcttgcttagttttgtttttattacacataaaatagcctggcttatgacctcatgaagatggctctgaaaaacctgtgacttgtccctaggcacatccaggacacatggggtacaaactgcagccctcagaagtaatgctcccctcatcccatacactcttagtccttcaatttcctataaatgtggtattctaagaagttccctaggtgttaccggggaatagaaactcagttgttctgatgctataaactttggtcaaatttatctcccccccaaaaaggtagtcagaaatacctgtatttattacaacctttacgtagggagctgtttacaggaatggactttgttggagcgtcagatgaaaaagaggcactcagcttccctctgcctgttgactttgcagcctctcagtcttctgtatttttcttacgctgatgctccattcttccagcatttatagtttcctcaagctgttcagtagaaccagggtgaccaacttgtcccagtttgactggaactgttcaggttttaaaaacaaaattcccacatcccaagaactttctcacccccaggtacaccaggacgattggtcactggaggtatagcatggagtgaaaaggtttccttatactgcctgaccagcaatactgtgtttccagaaattccttcctctgtatctaatgttttctctctttttcttaatctttgtctcttttgttaggaaagcatcaaccaggagtagataaacctgatcccaaaacatggaaggcgaatttcagatgcgccatgaattccttgcctgatattgaagaagtcaaggataaaagcataaagaaaggaaataatgccttcagggtctaccgaatgctgcccctatcagaacggccttctaagaaaggtaaaggcatttacagactaaaataaggtaaatcaatttgtgtcatcgtgccttcgtgatctcttcatttctacatctgcagtcagtttgcaggtagaatagcctgttcatgctgtaggggatcattccgcccctacctggcttggaaacaagactttcgattcaccaaaggcagtgaaagatacatgtggaattttgaccatgtacagattaaagcaacaggttcattgagagtttcagaaagaatttaatttgagggaaatgtttctctggaggcccttcgtgaattaatccaaaactacatttttgttgccacaggaaagaaaccaaagacagaaaaagaagacaaagttaagcacatcaaggtaatcttgggtgattcagagagaaagccaaagttgggatcctattaatgactcatattctgccttgtaaagatgagtcacaggacctcagtgtgtcctctttcttcctttgcttgtgtcttctgtgctttacatgtttgctcttcagcatgtatccacttgcagacatggaggtacacagggccctgcctcatcccgtttctctgggaaatttatgaatgaagtcacagattctcactgtgctcggcaggctgaggcctccatctggccaccacagccgttgccagtggtcattttgtgccagctaaactccacaacagcttatgtctcatactattaagtatattttcaggctattaagtatactttaatatgtattaaatgttatagacctctatacgatgtatgaactctatgttacagacattccgtcacaggcccttcggtgggggacagagtggtcaatgtcagcactctatcagcacagctctcaatggctgccttctgtccactgtagaatcatctctcacaccccacaagggttttccatgggatgtgcatgtgtgtgtcagcttctcactaggctgtgtcgtctgaactcccctacagtctgaggatctttatgcatagattaggtggcccttgttaaatagtaagagaagagccgaatatgccctgcaaaactggggacgagcttcagtggctgagcagagagcatacactgcggtcacagacccagggatctcagagagattgtcgagctccctggcctccctttgcagatgaagaaatttaggcggagggtgtttttgcagtgatgctttcagtttcacttttactagtttttatttttaactaaatttaaatattgtactgtattaaaggcctaattttgttttaacttttcattgtggaaagattttatgcacataggaaggagacagttgagtaaaatttaccccataggccatcattcagattaattttaaccttaatcagctcctggccagttttgcttcatcaatagcccctcccatttcctgacttctaacatgaaattgcagcccttcaaccatttttgacttacagaagtaatttatttatttaattttttttaaactgagatggagttttgctctattggcacaggctggagtgcaatggcgcgatcttggctcattgcaacctccgcctcctgggttcaagcgattctcctgcctcaacctcccgagtagctgagactacaaacacgtgccaccatgcccagctaatttttgtatttttagtagagatggggtttcaccatgttggacaggctggtcttgaactcctgaccttaagtgattcgcccacctcagtctcccaaagtgctgggaatacaggcgtgagccacggcactcggccccaaaacaattttttatagttcagctttttttttgaactattttttggaatttgaagcaaattccaaacctcatagcatttcttccataatagttcagtatatatatttaaaagataagtgctctgtaaaaataccatgatgtcattactgtacctgaaaaagttcacagtaatttctcaatatcagtgaatatccagccagtggtcagagtttcagttgtttcatacatgttataacattcgtgtagtttgttacttaaattaagacccatataaaatccacatgtgatttttgaatgtcttttaagtattttttaaggatatatgtttctcctatattacctcttaaaacatttttttttttttacaattgaacaaacctagttgttagccatatcgtttctcacagttttttttttcgttttttttttttttgttttttttttgagacaaggtcttactctgtcacccaggctggagtgaagtgacgcgatcatagctcactgcagccccaacctcccgggctcaggtgatcctcccacctcagcctccctctagtagttgggtctacaggtgtgtgccaccaagcatggataatttaaaaaaattttcttttatagaggtgaggtttcattctgttgcccaggctggtctcaaactcctggcctcaagtaatcctcttgcctcggcttcccaaaatgttggaattacaagtgtgagcctggctgagtttgtatttttaaggcctacgttttgattcatgttatttagtcagaaaagcacagctttctcacacatgtgtgagaatttgctacaatttcaagtgtgactgaatcgtatttactactcttttcccattatctagctcagtgcctggcccagaacagatcactaatacgtatttgataactgaatagatgcatccgcatttgttgactaaatagatgtataaataagtaggatatgtggggtgggagtgaggggttttccattaggatgcagatttaatttcataatcgcagttaatggagaaataagaacggagtaacagatgttgccttttcagcacactttgctcacatgtacccactgtattccatcgaacgccagatgccaatgatgctaagatgcactgttattttatgtatctcttagaaaaactgcttgcaatgaaaccatgacacgtaatggattgaaaggcatgtcctctttcagggatgtggcaatgcgaggaaatgtacatcttagtagttcatgccatgtggtggtcccgtttgtctgggatctctacagccacatgggcactggtggtgtcttcacatggccctgaaatgagcaagttgtggaaggcacggtcctgggtgggcttgaccatcctggcccagggaagtaagtgagagatcccgttaggtgcagccgtgtgggtcaagagccacctcagccaagtgtgttttatgaaatccttgtgccgtgaagatatgattcatacctgaaacttttttcttgaaaggacctgattccttcagcggaaggcaggtgattcattaggcctaaacacagccttacttttgaatttagatctacttgcattgtgctttccagtgtagcagggaagctcagaagaggccagtgggcttcccgagttctgtgcttcctggctgttcaagctattgtgtggactcagtgtctctgtagagtgtttgaaaagtgaactccctagggcgtctggaattggaaagtcagaggacaattactagctattaatatattactttttaattgtgtatcaaaacacccaagcactgagttaatatatcctgtgcaaatatactaaacctacttagtctatccaaatatgtaactggatacactacgtaggtttcttctactgaggaaatttgtctttcatatggtaactaggtatgaatatttgctgttgaagcaagcttttcccaatcttcaagttgaagttttaattagcaaacaatgtttacaacatgtaggccaagtattagaattttcttggggtcactcatgatttatctccatgctatatgtcccccaacaaatagtctccccaagactggaacacccaaggcccattggccatgtggcaggtgcagaaacggcctcagcatcctctgacatttcgctttgtgagcatatccctacaaactcagtcagccatgttttccttgagctaagccccacctgtgcggcggtaactggttatctaaggaaataagaacaagaaaaacagctgggtacagtggtacatgcctgtcccagctactcaggaggctgaggtgtaggaggatggcttgagcccaggagtttgaggctgcagtgagccgtgattgcaccactgcgctccagcctgggcaacagagcaggaccccttccccacctcaaaaaagaaagaaaaacaataatgagaaatcctggattctacatcatcagtgcatgtatatgtttcagaaaatatcatggaacggtttgctctgagacttcagacaaggccaagaacagtaagaatagaagtagttaaaacagaggggtgctagttgatatttttgagctgattccaagttcccagctatgatttttgtctcactgagttctccctgtgatgggcaggtcatttcccttttatacatttaggaaatgggtgcacagagaagctgattcattttcccaaggctgcattgctttacagagctgagatttgaatccaagtttgtccaccgggtgcctcgtagcctttggggcctaagccaggccttgaggggtggacagggtcaaactggtccttccgcagcactaggggcatcaggaatgaaggcctggagattacagttggtttgtctttcctggatgagacaggaaactggcttaattagagcaggagtttgtgtgagagggcaatgggaaatacaggcatgtaggtggggcgaatagaaatgggtacttcctgcttcggagggttgtttgcagctgaaacatacatgcttgaaactgtaaagtgcttccggatcaaagtgttagtgttatgaaggagacagaattgggaagggctgccaaagtcgcttggaaaagattaggcctggtctgtattcgttctgagcacagacctatgggtagaagttacagaaaagcagataggggttcggctgctctttctcatagagctgttggctctaacagtgacctgagctggattaaaacacagcacactccctggcagggctgctactggagtgatcccttcactagttggaagaggtcttcagtttttaaactttaatcaaatgaaagcacacaccagcaactcacttgaaaaacagataagatgagagatgccctgggtgaagcaggttatcaggcttattctgcctgcccgggatcctcccttcccatgtggtagctcagaacgggagctccgaacccagttggaagagcttgagggacagttttacggaatgagacacagttgaactccttgtagcacacttagagcaggcgggaattgatatgtaagggaggcctttctcaccgggatgggaaggagtgggaggcaggagagactgctgtggaaaggcagtagctggtgccactggcatggagggaggagacatttctccagaaagtggaagagggtacggaggatgcagataagagcggcctaaagaggaggccccggcgttttgcaccttcagaagcgagtgttgggaatgcaggtcgttttgtggagagggtgtttcgctttggacatgctgcctttgaagtgacagagagccctgaaggtaaatgccagctagaaagttggagggtacagcacttgagtgagtgcccaacgggcagatgtgtggtcatttacttgagaatggcgttggtagctttggaaactgatgccttctctaagagatgcagacaaaggcccgcagagaagatgcagagaaaagtgagctaagggaaaaagtcaagagggaagctgcagtgagagaagggaggaagagaatgacgatggcctcattccaagcaaggagcagaaggaaggtggttctgggaccgggcaggaggccccagcctgtcttacgagagcttctgttgtcagtggcattgcgcctctgtgctgggtgtgtgcactcgccaaggtccagttccctgacctgctagtgaagtccagctgtcagcctacacgttctgttagcagagacttagagatgtccttaaatttgatgtccttaaatctggcttcaaagagactggctttgcacagatgagttagagcattttggaaggtgggaggtgggctggaggcccattaaatgggacttcagggacaaggggcattagcacagggttgagacagcatgggctcggagcagaggggagtccctctgctgtcctctaactctggtctgtccccaagcccattcagcaagtgtagcttcaagaccagctaaaggtgtattattttacaggtctaaagaagtgtgctcctgcccctgaactctctcttgtgccagtttgcttttgcttaaaatcccttaaaccagagaccaaaccttggattctgtaattatagcaaaggttcttgagcgtcaatgtttggcggagttcatgcacccacgtagatcaatccttggattctacaattagagcaaagatttttgaacataaatgtttgctggagttcatgcaccgtggagaagtctggacccaagcagagtcttttttttttttttttttttttttaatctttggagcaaggggagaaaattaaaagccaagaaagctatgggttacttgatttacagaagagcctctatctaaagtgagaaagggagcagacagaggggatgtgaatcctgaccaggattaaccgggccaggttatggtgcagcaaagcaggagttgagccagggcaggagtggggcatcgggggtccaggagaggcttcgggcgaagagtgttcagggcctgcaggatctctgtgtttattttacatagagaactccacaccccttttcttcatttgagatccttggatttttaatataccttagatttagatattcctacttctaatcatttcaaaaattgtgacccagtttagtgaagatccttctctcctgggcctgttctgcaccctggatggaggtgtttcgggaggtgctggctccgttttactgtgccattgactgtactgtctgtccagagtgacggtgtcagtgagatgattggcactgatggctctgaaatgacagggtttcttttgaagtggggtgaggggagtaacacagtgtttggaatagtctctcctagcctccatcggtggaatatatgatgccattatagaagtggtcagtgcaggatacagggtaagaatggagagagtagaaggctgggcatggtggctcatgcctgtaatcccagcactttgggaggccgaggtgggcagatcacctgaggtcaggggttcgagaccagcctggccaacatggtgaaaccccatctctactaaaaatacaaaaaattagcccggcatggtggcaggcacctgtaatcccagctacttgggaggctgaggcaggagaatctcttgaacccgggaggtggaggttgcagtgagccaagatcacgccattgcactctagcctgggtgatagtgtgacaccccatgtcaaaaaaaaaaaaaaaagtgtggagagagagtagaacagtgttcaaaagagtgtctcagtctccgctggaattagggcaggatacaagggcttcttaagacagaaagctcctggaattgaaccatatttcgtgaccaaagacagagttcagttccggtgtctctgcaggctaaaagtagcgtgatcttggaaaattaatttagtctctgagtcatcgttttctcaagtgataaaagtatcacttgtcactaattaaactgtagatcatgtgtaacacttagaggtcttcaatggagaaatcagaattaatttagctttttaaatatatgcaagcctgactgcctcattacttttataagaaacctagaaacagaatgactaaaaaaataaggtcagacagcaaaggaagcccatacaaatgagcagttctcttgtaacttcttcagaggcctgtgcttagttctttttgagggagttgaagagatggaggtggactagtgaaaggtggggcatgactcggggtggggaaactgaccaggggtcattgaggacgccattgagaaaggaggctgctgttggagaggtggagaattgcagcagtgtcagacagttcaggccgccatggagggacagcatggtccatcagaggtcagcatatggggctgggggaagggatttgagaaaaggccattggatttgggagagcacagttttgttggtgacctttggtaatggtgagtgcttatttactagtaagtgccatgtacgtagttagctcatttaatcttcaccttatccctatgacgtgggtcctattattgtcctcagtttacaactgtccgcagtgccctagggtggcttacagaggttaaataaggagctgcagccagtgaggagtggaggtgccaggctttgctccaggcccttctgattccaaagcccgagctctcaagacccttctgggagcttgattctgcaggtggagaggaagcgagaccacaggaactaatgggggcccaggtggagaggcgaagtccggaaaggcagacagcgggtcggaagtttggttgtgaaggaagggaaaacctgctgactcacccaggtcacaggcaagtgggttttttttgttttttgttttttgttttcagaaggggcagactttttttttttttgtctttaagaatcaggctctcgctctgtcacccaggctggagtgcagtgacatgatcatagctcattgcatccttgaactcccgggctcaggagagcctcccaacaccgcagcctcccaagtatccaggacaagaggcgtgcaccaccacacccggctaatgctttcattttttgtagagacagggtcttgctatgttgcccaggctggtctcgaactcctgggctgaaacgatcctgcagcctcagcctcccaaagtgctgagattccagggtgagccaccgtgcttggcccaagaaaaggcagacttcttatttagaacttgtaagagagaagagtgcaagatgctgggggagaaaggagtaaaaatcgtgcctggtagggatggatattctgggcctgcccttacgctggaccttcgggacatctggtaaaccaggcagtgtatggtttgtttaaaaaccgagctatacagtggagtgatgcctttgaagtcatgttattaaggtgggagtttgccaggtgggattatgaaggaggaggttatttcccctccttccgttagtgactttttgaggattttggggggattgattccaagtagtgtataaataagctgatgagaacacccaccatgtttcagagccgaccactgttgacttttccaagcacagtcacgtctacttgcatgatcctctgcttccagtcctgtgttccttctgctctctaccctcttccgctttggattccttgggtgttgtcctgtgtggcttttgtctgacttgattgctatcgtagcagcagatgcaaacttaccttgagagctgaacgtccacaggcacctcagggctggcttttgcagagctgtttagtacaagggagtggagggttctggtgcacttgaaaaaaaagcacacatttagagctccaataagggaaaggaatttgttctcattatttcattagtgtgcacgtgcagaattcttgggctggatgagatattcagccacctgaagggcatttatgtaaagcccatggtgtggggttgcccggctggactcaggccagggtgatcagccagccatccaatgcagggcctcaggtggccagaggccatggcaaaacttatctgcagagaattcatctacaatgtcctctgggctcctgttcttgggccagtcactgaggcagagcttttcctaagaaataattatgaaagaggtagcatgattcctccctggtgaaagccaggcattgattcttttgagcaccccctcagaggaggagagtgtagaatccacgcagtgcagcattttacagagacaatgatgcagctctgcgtagccccaaagctattgtctgcaggtggaagcatttcctaaaggcaagccagatgggccggtaccgtttccttgaaggaaaatggaaggagctgaatacccagcagtgcaccctgggcagaaatgtgctttaaaacaggccagtttaaagaagcaggggatgaatgtattcggcagctgaacatgaatgaccctagcattaaagaaagtaggcagagggtagaatttcagctaagagaagggaggggaaaggaagtgttctcaattcttttttcttttcttcttcctagcaagaaccagttgagtcatctctggggcttagtaatggagtaagtgatctttctcctgagtatgcggtcctgacttcaactataaaaaatgaagtggatagtacggtgaacatcataggtaaactgttttgacgtctcattttttatacataccagcagccccctggggcctaaaatttgtaaaacagagaacttcaaataacatagtcagtgggaggaggtcttggaatcatctcagaatgcaagttccagcccccagatttcaaggctgagaaacgaaggcttttgaggatcagataaaggaacttagacgggtcagcctccgtggaagaaggctggggtgacctcccaggaaaaatgtttgtttcccggcggcttgtggctagcgatcccagtctttcactatttggttcacgtgggcaaaagagtatttatttaactcgggaaccaaggagagggaagatggtcctcgcgagtcctctcagcaactgcttcctggcagacagagaaactgaggcacagagacatgttgccaaagggcccactctgattcagcagatatttttgagcaccttctgtatatcagactcagtactaggagcaggaaatagacggaggaggcccaatttcttttctcatggagggacagagatagtaaacaaagacacccccagataactgcagtgttaccatgtgtggtaaatactgcaaaagaaaagaaaggcgagagaaaaatcaaggcaccaaatttagattggaggtctcagaggagcagtgttttccctccttcgtaacagttgaacaacttccagatgtagctagctgcaccccctgtaaagatgcaggctctttacaatgaagacacatcttctgatgttccttctctcctgtatggccagatgcacaggaatagtgcccaaaagacctcagcctgctttccctttaaggggaaggagaagaaaaaactcctttttatttttactttctttcagcattgaatttttgttgtgtgtatggtgacttctgtttttgggaaacggaagaagccagcagcatgctgaattgtcctgacaggcctccgctggcctcttgccgaggttagcagtgctttttttgtatttaaaccatctcccgggcagtgtaaaaagtttgcaggtgcggacattctgtctgactggtctcggcagtgctctataaccctgttgtgtttcttgataaaacacagccccaccctttaataaagcaaagattgctatgaaaccagagagtctattcattactgtggagtaactagagcagtctgtagtgactagacatacggcaattaggaagtcatggagttgggatttttgtcttaattttggctgctcaaagtgccccctgtaggatattcttttttcgggaattgtttccaaacttgcctgtctttatctatggtgaaactcaagccgctttttaaggcaagcctgcaaacccaagtatcaacatgggctcctgaaggcacaggagagcagattcacagcttactgaccagtgttagggtccccacgagggccacccatttgaactcaaggttggcagactctggccccagcacttgccgtggtttcaggatggccagcggtgacacagggctatggaaccctgggtcttcatctcttcccatatcctttgtttcaccttctttttgccatattttattgtgcttcagatagaaattttatttataagataaaaagtagctctgaggctgggcacggtggctcatgcctgtaatcccagcactttgggaggccgaggtgggtggttcacgagctcagcagatcaagaccatcctggccaatatggtgaaaccctgtctctactaaaaatacaaaaattagctgggcgtggtggcaggtgcctgtagtcccagctactcaggaggctgaggcaggagaatcgattgaacccaggaggcggaggttgcagtgagcctagatggcaccactgcgctccagcctgggtgacagagggagactgcctcaaaaaaaaaaaaaaaaagataaaaagtagctctgggtgagtctttagatggaaggcaccacctcttaggagatcacccatgctgtcagctgtgcccatgccttcttcctggaagctgagttgttcaccccttaggagaaggggcctgagacaaggcattcgattttatccacacccctagaatgctcttagcaagatgaaactccatatgagatgtgaacccttacatcgcaatatgcccagacacagaacccacaacaacatactttattcttggctgtattggacctggagcacctgggcactgaggtgagactgtggggccactcctcagtcaccaggtgccaaccgagagacctgggcagtggagttgggctgctgtgttttcagccttaagaagtttttatttactcaagaaagctgtcatctttttgtgaggctatatattattttctccttccctctctccctggctgccgctgcctcgtttataattagctgtcagctcctcctatcttccctcaccgtacttctcaagtccatccccttgtttctgacactgtgtgtgggcctgccttggctgtcacctgggctctgcttccattctgctccccatttcttcttctcacaaaataaagaatgccagtgtcatcatgtcaccactgcccctaagagaaggagctgagttcccccaggtccccggggtctggcatgatctaggccctgcccactgctttcatacctgtctttgaacttgaattactctgaacgagttaagctccctgtggctgctcatagagacagtgaggttggtggtgggtctccttatggtggagcagctgcaaaggctttgtccacagggcacagtgaggggtggacacgtggcagttccagcaggaggtatagctccagcccaacacgtctcatccacacttccgctcccagatcattgacccttgagacactggttacctctactgagttttgttttgttttgttttgtttttgagaccgagtttcactctgttgcccaggctggagtgcagtggcacaatctcggctcactgcaacctccgcctcctgggttcaagcgattctcctgcctcagcctcccaagtagctgggattacagggatgcgccaccatgcctgggtaattttttttgtatttagtagagatggagtttcaccatgttggtcaggctggtcttgaactgctgacctcaaatgatccacctacctcggtctcccaaagtgctgggattacaggtgtgagccaccgcgcctggcctctactgagtttttactgggatacatcctgtgcttcccttcgtgtagtagcctgagatgctgttttctcacggggtgcaaggtgcacgctgccctgtcccactcttgcctcctcctgcactctgtcaccctggtgaggtgtatgcagcctgtagtcagggacagcctggcccaggcacctacagatccctgtctcggagtcaccggccccgcggtgaccttctctcccaccatggctctcgagtgcctaaaccaaatcatggctgtattttataccgaaagagcacgagattagaagtcaaaaggcgtgggttctagacctgcttctgaagttttttatttaccatgtgattttgggcaaactccttaatcttttgaaattcaatttctatatagattggaaacaatatataattatttataaaatggaaatatttaaaattatatagaaaatggaaataatcgtactgatcctgcccatctcgcagagttattgtgaggatgaagtgaaatgtacagataaatcactctggggctagaagggggtaaaatgatatgattatcatattaccaaaatcatattaaaatatatttgattaagaaaagtagcctccatctgtgccatgtcatcaaggctggtgtgaagtttaactcctgaaactttcagaggggtcaggggaaatttccctgcatgatgctctgctgatggcctgattttttatgcctgctagtaagtttcattcttgactctgcagctacatgggtgaccttagcaatttacctgagctctgggtttcagcttttttcaactgtaaaatggtaggaccaaaccacctccaaggacccctctgtttctaataatctgcttttaagcactttctctgaggcatgggagcaagttgctttctcaggtggagacctacattaagtcaacaattgctaataaagtgagaatgaccttttaaagaagcaaaccggttcatcagtaaccagccataaataatattgttataattctcagcaactagattcagataaaattgcattcctgtgggtgactcttttcagatgtgctgactttaataaactggagaaacttagtggatttctagttcttctgtttgagaatttccctggcacacaatagataactgttgaaaagaaatgtcactattagttctgagcctggagactcactaaggtgagattcaaaagtttttatcctgagaggggctaagaaagccctcagtaactcagtttggacttcattaactctctctgttagggagagcatattataaagagttgaaatttggagttgggtaaggctaacattgaatcccggttctgctgctgattgtctgtctgaccttgaattagtcatgtagttctgtcttgtatggttgtttcagcatgtctagaatggggatcactattgtgccttcctcatgggttgtgaggtcttgggaggtggtagggagaggcaaagatcagtgctcagaaagtcaggttttgtcattattcagtcaggacactctttggtacccagaggagtgccacttctgactgtttactgtagcaggtaagtttgttattcctgtcttttcacctgtcaggagtcagtgttgctgtctgttttgccgcttggtggtccagggaaatcagttcacatgtcgagagagagagagagaaacagatagagactggttagtgagagtgttgatgctcatctgagagcatttcgatattgggatttccctgcttctctcatgggctttcactcgagagctggaaagtttctaaagtacccacgatgtctggatggagagaagccattgtcccttaccagggcataaagcaacacactcctatgggggaatttggcctgagagataacgtaattatattaacttggtatccagatcatagcccagaaaacagactgacttttctctcctggtcagccgcattcaggatacacctaaaatctgcatggacgtgcttatctacttttttccccaagtcatgtatattaagtgaaatacggtaaaattcaccccttttaaggcacacggtcctataaatgttgacagacgcactcagtgatgtaactaccaccatagtcaagacagaacattttcatcaccccaacacgtttcctccctggccccagccctcgcacccacagccggctgtctttatcacttcccaaaggtttcaagagtccacttgtcagaagtcttgacatttttctagaaaacattaattgtcacgtcccgtatttgcagattgtcacaatcccctgcaggactccactctggctccagtcagtgagcctcggccccatcacatgtccatttattcaggggagagtccctgagcgcctctccggtgggagttgtgagcatgtgtcatgactggacacaaaaagttcatactttggttgaggagagatgccattgaccaactcaaagctccatacgggtatatagcgttaaccagcaacttgaggtcagaagtgtcacaaggtcgcggcccatcgtagtttcggccgagtgacggggacagtgagtgagaggcacccaggggagagaggccagtctgtgctggcgggtcaggaaggggctccagaagtcaggggcatggtgaatgctgcctgttgctcaacccccactcctgtgccactacctcattgaagcctttgattcctcaaactggaaaaaacaccccacttctctagcttccattgtatggcccccttctttttcttttctttcttttcagtgctcacggccttaaactgactctctagatggttagtcgctggcctatagccatgtatatgaacttcttacaaaccggatccttgactgcatcgatcttccgctgctccttctagccctgggaggctgggaggtgcaagcaggtgttccataaatctctgttagttgaataaccgactaggacgtcatggggagaagcagtgagagaaagaattcctggttggaacaaagggatctgactagggggatacttgagctgctgccattgtttgtagtcccagctggcttgccctctttctgttaggagcaacgtgcaaaggagagatgagttttgaaatattggaagttaaaatggcttcgacttaagtcacatttatctaagaccttcactgccttagtatgcaaggtatcgctgcgccctccctcctcaaactctcacaccccatttggtttctacctccacccaccagctgcttcttaggacttaggatagggcaggccattatcttgttttcctgccattttattttacttggctggaagaggcagaggaaactagagagaggttggtgtaggtcagcgtcagtctgtgtctagtgacctgcataattgatgtcctcaccctcacgtaggataatccaaaggatgaaataaatgggcttgggagtctgcctgccatatatagcctgcctgccttttctttaattttatccccaccaggaaaacctaaacaggatccggtttcccttccattctgtatgctgtggcttttggactcttgtatcacagccccaaatcccctttctgagcctcttttgtgcctttcctttctttattaaagaacctatgaattgccactgccctctaaaaccttccctgcgtagaaatcagataatgtgcttgtcactccacagacagcaattaaaacaggaacctgtttataaacaaaaatacttcagaaaataaaatacttggagtgattaaaacgagcctctccatgacgcctggcgtctcaaggagactggaatgcgttctaacctgaatactttgccgattggtgagaaaatgactgcaacatagagcaccacatatactccaagctgtgcgagtctggacaagtcactctccctctctgtgcctgagtttcttcatctataacaggataacgatgctttctctgtcatccttatgggttaaaatgttaaaataacagatacaggtatgagtaaaacgttgatgatggtggcaaagtgctttgaggaccttgggaattatttcttcacctttatttattgaagctaattttcagggacatttcatccaactaacagtggtatgaggtcagtttcattcaaaatgagggcaggaccttagggaccttcaaattaaaatggccatgaaacatcatgacttacctatgagaatggccaaaataaataaacagtgatgacacgaaatgctgccgaggctgtggagaaatttgatcactcagacactgctggtgggaatgtaaaatggcacggtcactccgggaagcagtttggcaattttcttgtaaaattaaacatgaaattaccatatgactcagcaattgcattcttgggcatttatcccagagaaatggaaacttatattcatacaaaacctgaacacaaacatccatagcagcattatttgtaatagtcaaaggcttgtagcaactcagacatccttcagaggggagaataaacacactggtacacctataccgtggaatactactcggcaattgaaaaggaaccgatgactgatacacacaacaacttgggtgactctgcggtgaattatgctgagtaaaaaaaaagccagccccaaaagtctactgtatgagtccattaatataacatccttgaaatgaacaaattaatgaaatggggaacagattaatagttgcccaggggtcatggacaaagagatggatggggaggtactgaaggaaggtggctatggttacaaagagtaacgtgagagagattggtcgtgatggaactgtttggtgttttgacagtggtggtaggtacatgaacctttatgtgtgataaaattgcacttagtcctggtgcaggtacacactcacacaaaagagtgcaagtaaaactgaggaaatcggaacaagatgggtggattgttatttatgtcaatactctggttgcgatattgtattctagctttgtagcctataaccattggaagaagttgagtaaaaggcacacaggatctctctgtattatttcttacaactgtatgtgagtttacaatgatctcaaaataaacaatataagaaaaatatttgaggcagttttcagagccagggtggtcagaatccatcttatcagtgttccggggagctgatgctactaatgtttgccagaattggagatctgactctattccattgtgctgatatttcagccagttggacatgttgcctgtagagcaggaagagagctgggagcgtaagcagagcgccacccagctagatggggaccttgggcatttatcccagagaaatggaaacttatgttcatacaaaacctgaacacaaacattcacacagctagatgtgacacaattgggtagattttcatggcccttcctctttagtaaggtttgataatgtctccctggattgtagaacccagaaaataagcacagcgccttcttttggagcaagagcagggagcagaaatcggtcaggttcaaagtactgtcatgtctggccctggggctggggctggatgccgcctctggtcctgtggcctcggctgtgacggggttgactgtggaattctgctgagctggaaaggacatggccaccgtgcgtgccattggcaggcatgctggagatagacctggggagccaagtgctggccggctgctccctgggagacatcacaccagagctacagagctcaggcgtgttcttcagccccatggcaggggacagatggtgatgggagcctggcgacctggctcttttggggaagactctttcttgagaaagtgtgctagaattgtgaggtcagcagactttgcatgatggctgtcttttctttgaagttgtaggacagtcccatctggacagcaacattgagaatcaagagattgtcaccaatccgccagacatttgccaagttgtagaggtgaccactgagagcgacgagcagccggtcagcatgagcgagctctaccctctgcagatctcccccgtgtcttcctatgcaggtaagcgtcagcgggaggctccgggaggcgtgggaaccggccgcgcagtcctttggtctagggtcacccatctcaccaccccacggagcatccctcctctgtcctaggagttattctccctggagtttttcatactttaattatcttgatcaacatcttcttggacacttttgttctcaggtagaggacaggatcacagcatttctttactcagttggccatgacattttttatttatttatttatttattttttttttgagacagagtctcgctctgtctcccaggctggagtgcagtgggatgatctcggctcactgtaacctccgcctcccaggttcaagagattcttctgcctcagcctcctgagtagctgggattacaggcgcacaccaccatgccagctaatttttgtatttttagtagagacggggattcaccatgttggccaggctggtctcgagctcctgacgtcaggtgatccgcccaccttggcctcccaaagtgctggaattacaggtgtgacccacagtgcctggcctcccataacatttttatatatggttacagataagatttctttagggcagtagttcatcagagtctaatttattagcccaagttattagaaatttggcagagtgttttaatggattctcagtttgagcaggctggataggaccttagagatgatctcttcctgttccttcatttctgaaagggaaggggcttgcgcagggtcgtacagtcagcaagtgtttgggccaggacttgacctcagccttcagaccccaagctcattgctagatccattccatccaccaagcgtacttgtcctttccacatattttctctttctttttatatctagtacaggttctaattaggccagatgactgagccatttccaattctccagggacttggctacataatgacaggagttggcccaggcagagtcacagggggaggaacagatccagttggttcttccattcttccagagtaaaaggatggctcctctcgttcgccaacattacttcatcttctcctctcttcctgatgatctccattgaattttgtggaaatcaattgtaattaggaaatataaattctgagtcagtgttactgcttgcagatattaaaaataaaaagcagagtccccatcctgggaaactgcagttcagctctagcaaatagttcagggattcttccctgtgctctttacacgctgccaaatgggatgtcctccagtaggtgccacccccaacactggctccgaccagcgttggaattagagttgactcaaaggactgttgtttgtgaattatcagccactaagtctaatctcattttccctgaatgccaactttcttttttttttcacttttaaaaattgtggtaaaatacattaacataaaatttaccattttagccatttttaggtgcacagtttagtagcattcagtgcattaatgttgtcgcagccatcaccagcatccacctccagaacgtttttcatcttgcgaaactgaaactctgtctgcattaaacactaagtcctcttttccctcctccaccccagcccctggcaacctcctgcctattttctatctcagtgaatttggctattctaggtacctcctatgagtggaatcatagtgcttgttgttttgtgactggcttatttcacttagcataggtcctagtgtgcatttatgctaggagcgtaagtggaatgtgagaatagaccttggccacaggaagattataatctgtcaaacaggataagcttgtcatcggtgctttattcagcaaatgcgttttggactcttacacgtgccagtccctgtttggtccttgccagagtgcagtcacaagaactactatgttttgcaaatttattgtgccctgggaaccatgctcagtgcttgggtacagttgactgttgttgttgttgtttgttgttgttgttaatagaaatagggttctgccttgctgcccaggttggtctagaactcctgggctcaagtgatctgctcgcctcagcctcccaaagtgctgggattacgggcatgagctgccatgcctggtatgatacagttgacttgtttaattataattagagtaaccctgtcagcctgggtatcgtcatcatcccgtttttaaaagtgaggaatctggctgggtgtggtggctcacgtctgtaatccctgcactggaaggctgaagtgggaggatcacttgagcccggaaattggagaccagcctgggcaacatagtgagaccacacttctacaaaaaataaaaaaagttaaccgggtgtggtggcatgtgcccgtagtcccagccacttggaaggctgaggcaggagcatccccttgagcccaggagttcaaggcttcattgagccctggttgcaccattgcactccagcctgggtgacagagcgagatcctgtcttaaaaaaaaaaaaaaagaaaaaaaaatatatatatatggatctgcggctggcgtgggtagagcagcgtgtctgagggaggaacgattgggagcacagctagaacccatgagccgttgatgccaaaggccggtccttaacgcccgccctgtgtcgctgccctggacagcgcacgggctctgccgttcagaacacagccacatcccgtgatctcatttgattttcacaaggacccaccaaaggaggcagagcagaatgtttatgcctaaattttacagtagagctaaccgaagcgtgaaacactcagccactttgcttatatttacatagttatggctaaaaacccatgactttcttctatagcctgctgctgcaggcatcgttacactccatgtggttttctttctctcttctttttttagggggttggagctttagaatagacttctatgtttatctgttgagtaagacttttctgaggtcttcttggggattctggaaagacctcttcttgctgttctgccagcagtggcatttgctcaagcaaaagattccggagaacagcagatccatgcagagagaaatgaacatttcattactctcttcaggacatttgcataggtttgaaaggaaggatttcagtgccaggatggcagtcaacaggaggttttgctggagcctggcttttcagcctggcctttggttctttccgttgttttcattgtctggattctccagaacctcgtggagggaggcttactggttggaggcaaaatgttccatcgctgctgatgttctagagctcacagtgatgtaaaacatttccctgctactgactgtagctaattttagttcctccgtcagaaattgtataacatgctgtcaggaaaggcagctttctgcgtgtattcacctttcttgctttatgttctccagtagagtcggccatttgcctgtttttcatgatggagttcctttgtttgggctgttcatctgaatttcaatctcctctgaccacctttttttttttttttttttttttgagacggagtctcgctctgtcgcccaggctggagtgcagtggtgcgatctcggctcactgcaagctccacctcccgggttcacgccattctcctgcctcagcctcccgagtagctgggactacaggcacccacaaccaagcccggctaattttttttgtatttttagtagagacggggtttcaccgtgttagccaggatggtctcgatctcctgacctcgtgatccacccgcttcggcctcccaaagtgctgggattccaggcgtgagccaccgcgcccggcatgctctgaccacctttattcatctgtttgggaaactggtatttggaggctgctgtttgctagtttttccccctactgatcgttgaatcataatcccagtagtatattacaaaaccacattcagttttgcaagtctgtcttctcctctgtggtctaaatattatgatgagaaagagaagagatagtacttgcgttggatgttttaagacaacataaaattctagtgtgatttgtgaaactttcatactagggagggacatttcaaagtgccactttgggaagctctggcggagagacatgtcatgtttaaaggtgcattacaaagtgaccccttgcctgatctgtggcatcagaattttattaggtggttgatggtttagtagaagaaaaccacagtagaataatggggtgggggaggatgggtaagaggggctggagagtagactcgagaagaaaacatcatctgaaggactcactggctataatgagagagtggagatcgcctgctgaccagcagccatcagtaaaggctttgaatccttcgggaaaccacaccaggcttgcattttgttgggcagagcaaagacacaatcgctttgagattaagaggattccgatttgaaaataatttactcctggtgaaagtaattgagaatatgatcaatagaaagaaattcaaatcaaacttgctgaacaagagccttccagaaagtgtagcagaatgtcagagtgcaaaaagcctttcaggtgaaaatgcatcctctcccttcccgcagtgttcctgcttagacaatatgtatatcctcagcgaggcgttaaaaactggactggatagagagtgaacctacaaccagtgtcaccctagaactggaagagcttttgagatcatctaatccaaatcctccccttccctcccaccctagatgctttcaggaaaactgagaccagaaaggttaagtgaattactcatgtgcctgttggtactgtacgaacaccttcagcttcttcatttgtttggagttgctggagaagcaactccagacttctttattccattgtattcgaagtaagtaataaacaaaaagcaaaaacaaattcaaactaatcaaaagggaaaatgaaatgacaacgtatgttgatagttcgatagtaacactgatctggaggcccagctgcagtcagctcccttgtgtaagaagtcagcgtggaagtggcaatggtggtcaaaccaaggaaacagaggacacggggcgcagtgcatccaacaaagcacttggagccaccgattctggggtcacagagagaactgctcccctcagggggaggttcagggttctctgctcctaagctaaggtactgaaggcccctttttgaaactgtcagtgtcctaatagggcgcatcttcctgacgacttcagatgctgtggaacttaatctagacacgacgctctttaactcgcatttgtgtcagctgaaaacataagttcggagcatgtgtatcttttcttatctgcagctatttccccgaagctgaaaactgggtacttaaaggaagttagcatcccggtcacattcatgggcggtgcaaggtcttacccgggagccttaccccaggatctgacttccagcccctcctgcacctgcgactggggctgtgctggaatcccagcccccaaagcatgcttggttgcgtatctttgtttgtatttggaggggaaaggaaaagaagacagtgatatttatggagagtcattaggagtgaagagcatctgaacccgtatgaaaggaagagaaagcttggctttggagcacaaagaaagctaagcataaaatggaaagcggatcttgaaatgttgtcagagaccagaacaccagggaagcagggctgctgtgtgcagtgcacaggccctggaatcagaagtacagttttgttttctctcctctgtgctgtctcagttggcaactttggcaagtttctcaacatctctgttcctcatttttcttcttgggagtggctgttccgattcctgcctcctcaggatactgagccagcacgagggttctctgaggaggggaattttctttttctgttggttttcatgtgtttctgcgtggaaacaattcttgtgctcggcaacgtcagctcatcttcatagctgggatcgtcgtcagctgaggctgagggcttctctgggtctctgtggctcccagcacggggtgttttggggaaacatgcccagtccgaggagtggagagatctgtcttctgcatgctcatggccagcccaccgcgatcactcaggtttgtgtgaagttactggagaacagtggctgagaaacaggcccagagactccaggctgggaccagtggagtccacattcttactttccttgtttaaggaatgcacctgtggcacagtttgtccatttgttcttttgcctttaattgatagagagcctggtctggggctaatgctctcagtggaagaaagggctctgtctgggctggagccatctcatcccagctctgccaccaggaagatgtgagacagaggccagcccctcagcagggaccgggtggaaagctggaaggcactggagcataagagctcttctgcgtaacgggggatgagagcagctgcttgctgacgtgggacccctgtgagacctgcatgcaaagcctctgacatggcactgacccatagggctccctaaatgtttgcttcttttagaacacgagcttcacttttggattttcttgtgttgtgaaatatacgtcacctaaaatttaccatacttttgggtatggggttattaaattcagcattggaactaaataggaggaaaggcagttaaaggttgccatcaggaagagaagctattgcagttactctttaggccttgtctgtaaaacgaatggctcaggctaagtgatctctaaatgcctaaatattgcacaggctctgccctctgtgattgcatttctcaatggttatggacactggaataatcgcacaccattgatattttattttacaaaatcaaaatgtttttacgtttaaaaagctttttataagcataggtcatgtgtaatcactagacttcgattccattaatccagcctgttgtgcaaacccagtgttaagcagtgctgatgtatggagtgtgtgctgtgtgccaggcccttgctaggcctttcccatgtaccctctcactcactctccatgtaatcctcttagatggtggcagtgccctcattttacagaggagaaaactgcagctcagtaaaggtgagaaacttgcccagtgtctcacagctggcaggccaaatggggatggcaactgattggctgccatagccatgcagccacaaacttagtggcttgaagcgacacacatttggatcttacagtttctttgagtcaggaatccaggcgtggcttagctgggtcctctgctgcagagtcttgcaaacctgccatggaggtgttggctacagctgctgtctcatctgaggctcaactggggaagggtccatttccaagctcatgtggttttggcaaaattaagtttcttgcaggttgttggactaagggcctcagtctcttgctggctgttggctggaagcagtccttagttctttgccataggagccttcccaacatggttgcttgctttatcaaggccagcaaggcagagtgtttcctctcccagcaggtttctgagttatgtaacatgatcatggacacaggatcacatccatttcatcccctttgctgtatcttatttgttagaagcagacacattccatccacactcaagggaggcaatcccaaagaaagtgaatccaaggaggtgaggatcatggggagcaccccagatctgtccacctacagtaacccacatggcagatgcaactctagaaatccaggatctaagtcctaaaggggtgagaggtaaaggaaggatctgagtgggatggggataatgtaggaagaccttttggaaacggtcaactctgcactgggaattaaatgaattggttggcatggattgaaagacaggacccatgtgggcattgtggacagagctgcagtgaggagggccccagggaccagcgccccttcctgggaggtagtgcccagtgtatacacagcccggccctggccaagggagcctcctcacagctctcaagcctggtttctccgaagattacagagttgaaattcactctagcttctcccatgtagaatgtttcgctttacaaagggagggaggtgatgcgtttagttactcagtctcctttttataaacactgcctgagcctggggacagcttgagggacaggaatgatggccctgtgtttttctctctgtgaacagaaagcgaaacgactgatagtgtgcccagcgatgaagagagtgccgaggtaagccactgcccagcctgcccacgatgctgccaaggaaaagcctcccgaccagctccgggctttccttgctgctggttatgcacctttcctttagatcacaagcttcactttgggattttcttgtgtggtgaaatatgcatcaccagaatttaccatacttttgggtttggggttataaaattcggcgttggaactgaaaggaggaaagggagttaaatgttaccatcaggtagagaagctgtgatagcaggaaaagggaattgaagtggaggctgggaaatgctgatgctcttaccacttaaacatcctacttcaccggcaaaaatagagcagccttcccagccagaagcagtgaccagtacacgtcacaaaatgctaagcaaaagcctcttccacgtgtgcgtgggttccctcccgctgtgacccgtgcccagagctggttgtgtgccccatctcgattccgagtgggtcccgtcccctctccctcccatagatggggcgtgcacaatggcagaaagtggctggaatggagatggaaagcattcctgctggccacctgctgggggtctgcgcttgagtgaatgagagagagagagggagggagcaagagagagggaagctcatggttgtttgaattagtggtttcccatgtactaaacactttgagaaaaagtgcagggattctgaaaagacagatgtacacgctcccatacaccctggcctgatttcttcaaggttgcagctctagccacttctctgaatgaagccagccctgaggccgctgcttgctgtacaccgtggagctctaagccgcccccatttgaaagcaatcaaggggcattcattgcctgtcactaagttcctcgctgccttttctctgaaaatgcaggttggctcaggttgactgggccagcattgagggaccgagtcgctgtgccacactggccatggtgacctgaaacctatcgaataatcgggccgagccgcagagcacaagggaaccagaaaccaagctgctgccttcttttcctgccttcacagagtagtctggaaagtatttctgggaggtagcaaatgggaattgattttttaaaaaaaaagaaaagggaagaaaaaccattacttggcatatgaatagctgggtgcaatagatttcagttgagggatgtagaggtgctaagcctttgttcattctgcagttcttaagaaactcagctaaagcaccaacacatgggaacgacacatttttcattttaaaattttttttgtgggttgttgttttgagacaaggtctcattctgttgccctggctggagtgcagtggcgcaatcatagctgactgaggccttgacttactgcgctccagtgatcctcccgcctcagcctcccgagttgctggggctaaaggtgtgcaccaccatgcctagctaattcttacgttttgtagagatgaggactcgctacattgcccaggctggtctcaaactcctgaggttaagtgatcctccagcctcagcctcccaaagtgctgggattacaggcatgagccaccacacctggccagtgatgcatttttaaaaagccatccaatagaaggagaaggaaatacatatcttaattactttcttgaaagggacggccacactggcggaagaggaatattgaaggcaaacagtacctcagcaacatggggactcgaggctcctacctgctgcccggcatggcgtccttcgtcacttccaacaaaccggacctccaggtcaccatcaaagaggagagcaatccggtgccttacaacagctcctggcccccttttcaagacctccccctttcttcctccatgaccccagcatccagcagcagtcggccagaccgggagacccgggccagcgtcatcaagaaaacatcggatatcacccaggcccgcgtcaagagctgttaagcctctgactctccgcggtggttgttggggcttcttggctttgttttgttgtttgtttgtattttatttttttctctctgacacctattttagacaaatctaagggaaaaagccttgacaatagaacattgattgctgtgtccaactccagtactggagcttctctttaactcaggactccagcccattggtagacgtgtgtttctagagcctgctggatctcccagggctactcactcaagttcaaggaccaacaagggcagtggaggtgctgcattgcctgcggtcaaggccagcaaggtggagtggatgcctcagaacggacgagataatgtgaactagctggaattttttattcttgtgaatatgtacataggcagcactagcgacattgcagtctgcttctgcaccttatcttaaagcacttacagataggccttcttgtgatcttgctctatctcacagcacactcagcacccccttctctgcccattccccagcctctcttcctatcccatcccatcccatcccatcccatcccatcccgctcttttcctacttttccttccctcaaagcttccattccacatccggaggagaagaaggaaatgaatttctctacagatgtcccattttcagactgctttaaaaaaaatccttctaatctgctatgcttgaatgccacgcggtacaaaggaaaaagtatcatggaaatattatgcaaattcccagatttgaagacaaaaatactctaattctaaccagagcaagcttttttattttttatacaggggaatattttattcaagg

SEQ ID NO: 17 - DNA, 2223 bp, Homo sapiens
tctccttgttttgctttcgatctggactgttctcaggcaagccggggagtaacttttagttttgctcctgcgattattcaactgacgggctttcatttccatttcacacaccctagcaacacttataccttgcggaattgtattggtagcgtgaaaaaagcacactgagagggcaccatgccggtggaaaggatgcgcatgcgcccgtggctggaggagcagataaactccaacacgatcccggggctcaagtggcttaacaaggaaaagaagatttttcagatcccctggatgcatgcggctagacatgggtgggatgtggaaaaagatgcaccactctttagaaaccgggcaatccatacaggaaagcatcaaccaggagtagataaacctgatcccaaaacatggaaggcgaatttcagatgcgccatgaattccttgcctgatattgaagaagtcaaggataaaagcataaagaaaggaaataatgccttcagggtctaccgaatgctgcccctatcagaacggccttctaagaaaggaaagaaaccaaagacagaaaaagaagacaaagttaagcacatcaagcaagaaccagttgagtcatctctggggcttagtaatggagtaagtgatctttctcctgagtatgcggtcctgacttcaactataaaaaatgaagtggatagtacggtgaacatcatagttgtaggacagtcccatctggacagcaacattgagaatcaagagattgtcaccaatccgccagacatttgccaagttgtagaggtgaccactgagagcgacgagcagccggtcagcatgagcgagctctaccctctgcagatctcccccgtgtcttcctatgcagaaagcgaaacgactgatagtgtgcccagcgatgaagagagtgccgaggggcggccacactggcggaagaggaatattgaaggcaaacagtacctcagcaacatggggactcgaggctcctacctgctgcccggcatggcgtccttcgtcacttccaacaaaccggacctccaggtcaccatcaaagaggagagcaatccggtgccttacaacagctcctggcccccttttcaagacctccccctttcttcctccatgaccccagcatccagcagcagtcggccagaccgggagacccgggccagcgtcatcaagaaaacatcggatatcacccaggcccgcgtcaagagctgttaagcctctgactctccgcggtggttgttggggcttcttggctttgttttgttgtttgtttgtattttatttttttctctctgacacctattttagacaaatctaagggaaaaagccttgacaatagaacattgattgctgtgtccaactccagtacctggagcttctctttaactcaggactccagcccattggtagacgtgtgtttctagagcctgctggatctcccagggctactcactcaagttcaaggaccaacaagggcagtggaggtgctgcattgcctgcggtcaaggccagcaaggtggagtggatgcctcagaacggacgagataatgtgaactagctggaattttttattcttgtgaatatgtacataggcagcactagcgacattgcagtctgcttctgcaccttatcttaaagcacttacagataggccttcttgtgatcttgctctatctcacagcacactcagcacccccttctctgcccattccccagcctctcttcctatcccatcccatcccatcccatcccatcccatcccatcccgctcttttcctacttttccttccctcaaagcttccattccacatccggaggagaagaaggaaatgaatttctctacagatgtcccattttcagactgctttaaaaaaaatccttctaatctgctatgcttgaatgccacgcggtacaaaggaaaaagtatcatggaaatattatgcaaattcccagatttgaagacaaaaatactctaattctaaccagagcaagcttttttattttttatacaggggaatattttattcaaggtaaaattctaaataaaatataattgttttttatcttttctacagcaaatttataattttaagattccttttcttgtttatcagcagttgttattacatccttgtggcacatttttttttaattttgtaaaggtgaaaaaagcttttatgagctcatctagcaatcagattttcctgtgga

SEQ ID NO: 18 - DNA, 1050 bp, Homo sapiens
atgccggtggaaaggatgcgcatgcgcccgtggctggaggagcagataaactccaacacgatcccggggctcaagtggcttaacaaggaaaagaagatttttcagatcccctggatgcatgcggctagacatgggtgggatgtggaaaaagatgcaccactctttagaaaccgggcaatccatacaggaaagcatcaaccaggagtagataaacctgatcccaaaacatggaaggcgaatttcagatgcgccatgaattccttgcctgatattgaagaagtcaaggataaaagcataaagaaaggaaataatgccttcagggtctaccgaatgctgcccctatcagaacggccttctaagaaaggaaagaaaccaaagacagaaaaagaagacaaagttaagcacatcaagcaagaaccagttgagtcatctctggggcttagtaatggagtaagtgatctttctcctgagtatgcggtcctgacttcaactataaaaaatgaagtggatagtacggtgaacatcatagttgtaggacagtcccatctggacagcaacattgagaatcaagagattgtcaccaatccgccagacatttgccaagttgtagaggtgaccactgagagcgacgagcagccggtcagcatgagcgagctctaccctctgcagatctcccccgtgtcttcctatgcagaaagcgaaacgactgatagtgtgcccagcgatgaagagagtgccgaggggcggccacactggcggaagaggaatattgaaggcaaacagtacctcagcaacatggggactcgaggctcctacctgctgcccggcatggcgtccttcgtcacttccaacaaaccggacctccaggtcaccatcaaagaggagagcaatccggtgccttacaacagctcctggcccccttttcaagacctccccctttcttcctccatgaccccagcatccagcagcagtcggccagaccgggagacccgggccagcgtcatcaagaaaacatcggatatcacccaggcccgcgtcaagagctgttaa

SEQ ID NO: 19 - DNA, 54355 bp, Mus musculus
  misc_feature (8835)..(10000): "n" at positions 8835 through 10000 can be any base.
  misc_feature (15149)..(15262): "n" at positions 15149 through 15262 can be any base.
  misc_feature (21932)..(21951): "n" at positions 21932 through 21951 can be any base.
  misc_feature (24275)..(24638): "n" at positions 24275 through 24638 can be any base.
  misc_feature (48355)..(48374): "n" at positions 48355 through 48374 can be any base.
  misc_feature (51060)..(54355): "n" at positions 51060 through 54355 can be any base.
gggtgcaggcctagctctgaattcaaggccagcctggtctacagatcgaatttcaggacagcaggggctacatagagaaaaaccaaaaaattaatagtaatggcagaaagatggctttgtgggtaaaggcatttgctttgcaaacctgacagccgagttcaaaacacaggtatggtggaaagagccagctcccaaaagttgttctctgaagctcagcacagcgcagaggtccacacaagcatgcattctctcaaacacagaataaagaataagataaagcttctaaaacggtttctaataatttttgtccacatttggaaaatagcaatttcaaattgtaaccaaaaagcacatcccttctcagtttaccagtggtcctgacgcagatggcttgccatatgaaaatgtgtccatttttagctttctggcattgatgagcgcactgtcgtcttttataatcaattgaagtcatcttcatttttactgtctagtaatttctctaaatggttccgcttaccatgtcaggtccacttgggttactctcagcagacgtgaagaagtaaggctataggcgtctcaaaggcatacagtaatcacactgtcttaccatcagtagacagtaagtggtgtgtggccagcggtccccctccgtccctttcagtcaccctgtctgcctgggtttctagctttgtttttagcagcacccagtcatgctgaagacttgtggtaccattgatctgaagaaatagtatggattatggattgtcattccttattctgcccttgacagacactttgtgtttgttctcctgcagctatagcaaatgtcagatttctctctttaacatttttctttgtgtatggagtgaggatattcatatagaaaagtaagggacaatagtcactatctggatgataatgcaaccctaaagccctttataacataacaaagcttatttttaaaaattgcattaatctctttgtcaggggagatggggcctgcattaccagtgccttggtacaggcatggaggtcagaggacagtttacaggaatgaattctctttctttcatctgggttctagagagcaggttatccatcttggcagcaaacacctcacctaagccatcttgccagctccaaagctaggggttgtattcaagatgtatgtccttttatatctgccagacagtatggtagacactgaggctgccaccgtgactgcacagcctcatctcatgtagcttgcttcatggcagaaggagaagtaacagggcttctccactcgtgatcactcgcaggagctgacatacagcttcctgtcggagcagggaccggcaagggatggagcagcagctgcgccatctcctacttgcagtcggatgcattgcagtttgttgttatacccaggtctatagactttggaatttacttgcatcacacacttataacccatttgtcatatttgttggatattattttcgtgcatacagattttgtacaaaggtgcttaatgttatctgtcttaacaatataaaaattaactaattaagatcaatggcatgtttgggtagcttcaaatgaaaaagaagaaaccatgtaaatgaaatactctcttttcttggaatttgtattttatcatgatttgttgttgttgttgttgttgttgtttatcagaaaatagagtgtgaaagtggagtggaagactgtggtcggtacccctcagtaatagagttcgggaaatacgagatccaaacctggtactcctcgccttacccacaggaatatgcaaggtaggggcggagcctggcggctgtgtgggaaggcctggggagctctgttctacagcagaagtgaaatgctttgaggagagaggagaagtacacttgggtacagggatgctgctcagctgggagagtgcttgctgagtatgcctggcttccatcaccatgccccacggaaaacaggtcatggtgtgagcacctattcgtgagcgccttggagttgaggcggaaggtcagaggttgaaggccattttgtcagtatatattctgttgatagccatgaacttgtctccaaaaagtagtgagtgagtgagtgaataaacaaacataaattttggtagtcaggcagaagtctttgccattagcgtacttttgtagtgtgtttgtactgtttgtgtatattccttaactcgtaagaaccacgggtactgtaaatttctctttgagccaggaggtagtggcactcacctttaatcccagcactcaaggaggcagaggcaggcagatctctgagttcaaggctagccaggtctacagatctagttccagaacagccaggactacacaaaaaaacgcttgtctccagaaaaaacaaacaaaaaacagagataaataaacttttctttgacttttgaggccatcctgtttttgttcggttagtaggacaattgctggttttatatagaacaaatcagagaaaacaacggtcggttagaggtgcttgatatattcactacactggctgtcttttagttaaggatataggttttatcaataatttctcatcccttgtttttttcgtggttcttctcccagaaattaagcaaaatagaaaaagtaggaggaagtagtaggtggcaggtaactttcagagacccttcccaagtcactcaaagccatttacagccaacattctaaaaataacagaaattgttgtcagtttcctgcttttcttgaactaagattagagtgtcttagcaaccaactatatcacccaacatttcttttcttctgatgcccacatcaagtcacatggtattagtagaatcttggggctttaccctcccaaccaaaactacaaagtgagattacatctcaaaaatggttttgttaaagaagaaggagaaggagaaggagaaggagaaggagaaggcgaaggaagaagaagaagaagaagaagaagaagaagaagaagaagaagaagaagaagaagaagaagaagaagaagaagatgattattctaagtctcagtggaagaccagcttagctgagatttcatgaataaaaatgaggtcgataggagagtaaggactgtgtctacctcacaaatatacctattacctaacacttgataccacgtatgtacataaacgtatgtgtgtgtgcatagtttacatatctgtgtaatatgtgcatatagcttaaagtgtctggaaagatttaatggccggatcactgaagtggatgtctataaaatgggtgttagcatgcctcagccctttgttggtgctatgtaaacagttctgttactttctgaagattaaagagcgtgtgcttagtgattctgtagcactgagtgcagataactgagttaagaatataacactgcagacaaaaacccaaaacacttcttaatttaagaattaaagcagcagtggaattggtaggaaacaaatgtgagcttttgactgtcggacttgcgtccactactttagactattacattatatagcttcctcatccagaggcagaaataaaagccaccttttaggacctctgcctcatagatatccatatcattttaaagataataaattcacttataaataaaatattactctaggtacagcagtctgcattaagaatatttaaaaatacagcattaaatctgaatttttaaaaatatacttggtcacactaaagaatagcattctgaattgttgatttttcaggcctgaaaaacctgatggtaggtcatagagtaaaataagaacacattattataagctttatttaaaatattttaaggtctttatatttctttattactggattctccacaccccgccccctgccgttttgttttgttttgttgtgttgtattgtgttgtgttgagacaggctcttactgtgtagctctggctggtcaggaattagctgtgtagaccaagctggcctaaagctcacagagacccttccctcctgcctctgagaccgactgttggggttgaggctatatgccactatacctggcttctttttccctttttgaaaatgttttcaaaagattttatagccattttatgtctagaaaacattgaacaatgtttagcttttctctcttgaacagtatagtcactctaatagactttctgatttttaaactttgacagattaccaaagctttacctgtgtgaattctgtcttaaatatatgaagagtaaaaatattttgctaagacactcaaagaagtgtggatggtttcatcctccggccaatgagatttaccgaaggaaagacctttcagtattcgaggtaagcaagtataaacaaaaacatggtctttttgaaccctaatattcctaactgttgactgtgtgcttggatggtttgtgtatagatagcacagtgtgtattcaatcttagcatcggaattcacactgctctttaagatagcgccatggtttagcatatttatctgactacattaagcaaccatttagactgatgaagaattcttacttcatcacatcaacttttttggggctttttaaaatccctttctacagcacagtatgcaccagtgaattagtggtctccttggctctttgtaaattccacattctttggcaggaggaattagctttgtttagcagctccagccagtgtctggcaggtactccctcttccagggaattgagcagctgtacgtatctgcttagcacacaaacacctgtgcttctgtccagttcttgccagggtggataaatcctctgggcgagatcccagcagatgttgggactcttccccagtctctgtggacagctaccctagagaaccttgccgttcccaggaagccctgtgttcctgggtctcattgtaggtttcttgaagatattttgtgttttcagagcagacgtagtagcagaaagtctctgctttattttcattgtttagccaggcttctgctgccaggctcggggatctagcttagctgatcagctgtatactgaggactccaggctctcctttggtggtcctgtctgttcagagggtcactgtccgttctcggcattaatcctcctcactgtagctgcacatttctgtgctttgctgtattggcctctttgttaccatcctggtgtgttgtttactcttcagggtctcagatcaagccttcctcctacggcagacatgatgtcttctttttctgaaaaccagtgtcctttctctttccaatgctcatgttgctgtgtatcattctgctgcacagctgccgtttgctctggcctccagtgtccctccattataataagggagggtcatcagtttcccatgtgtctaagaggcttctcaggcagggctttccctctctagactggtcaggtacctactgctgtggtgttttttaagcaccttcctgctctttctagtgagcttgaagggcaagtggaattctttgtgaggctgcgctattacttcttattaaaggccaagcacaggctgctcagcctgagtactactggcatttcaagctgaataatatattgcataggaactgtagtatactttttaaggtgtttagcagcatcctgccgtctacctcctggctgctgctgctggtgcctcctgtccattcgtgacaaccaaaaatgcctcagcagccacatatctgagcagaaagagggtgggaggtgaaggataccaagtacaggttaccccacttgatgtactgtcgggctgccactcaggcagccccaagaaggcaggggagagagttggtctcagggagcctttgcgttgtgccagctttactgtttggtcctttcctcgtgccctggatgcttttcctccaaccgaaagaaaattgaaacgactgttcatcttttcccagacagcaaaacacattgtttgccttaagtaattattgaataaatcatcatgagtaaggctgtgtgtggacgctctaatctatcaggaagtcatctgggcaggataatcagtcttgttagacatgtgtttgaaagcacagagatgaaagtcgcccaggagtgtagttcattcctacactgagggtgtggaggaaaccctaaggccctattctagcatcttgattgaaggtatcagctttggaaaggaaactttcggatcttttctgtgatttagaaagaagtaaaccgtatctgtgattttggttttgtgagtctcttctgtacctgtctcttttcctagacttctgattgatcggagattgtttcagtgttttcatttctgtttctgatgcacagatgtacatcgccattagttcttgtgtacggcactgtttccaaaaggaccatactcccaaatacatcaaaacgtcctttaattaaagagagaattgtatcctcagtgccagttgcctgtatttgattatgttgctatgtgtgggactaaggttctgtccaagggaaatagttatatgaaatctaaaaataatttgtgcagtataagaaccagtatggtccacaggagacctgggaatggtcaagttcattgtcaaagagctcgggttagcaaaacctgactcccctaagaagagtgtggggtctgtttggctctctgtttcagcaagtcactacatttgatcaaagacattggtttctgtgccttagctcctgtggaggcctcggtgtcccagcttgagtcttttattttgaagagaagtagactataatcattacacttactgtaggtttaaattcacctgactctctctgtaattattcccaacacagagattgtatattctccagttatattaaaatgatacttgggataaaactaaaatggatgcctctgctgtttaatccacacttttgaagaatcagaataactcaggcggttcatttatattatttttatttgaagtccttttgaaaataacaaaagtttggcatgcatgatgaaatttttatttgtttttttaattttcagatttacttggctccaatttaaaagtaagagggcatgcctgataaattttaactcataataaattgcaagtgaaagtgactttgctaacgttgctgtttcttgaacgagcttaaggaggagacgttagctgtcttgaatttaccttaacaagaggaaagatgggattctggctctgcaagtaacagctgttccctggttaacactgtctttgtttaatggagtattttaatcttagagtgtaggatttagaaataaaattatatactttttaaaatgatatacagaagaagcaagtttatattctgatgatacttttatgttaaataatgttgtctgtttctctttttctaggttgatgggaatatgagtaaaatttattgccaaaacctttgcttgttagccaagctcttcctggaccacaaaacattgtattatgatgttgagccattccttttttatgtccttacaaaaaatgatgaaaaaggctgtcatctggttggatacttctccaaggtaaaccacgagccagcatggccttctctcgcttgcttgcaaatgtttttagtggagctcaggtctttgaacagggtttttttgttttgttttctcttgtttttgtatttttatgacaataatttgagtaagtggctcatgtttctgaaaacctcagctttttgtttaaagctcatttgaaaggacacaaacaagaaacaaaacaaataacaacaaaaggtgcctaggaagtgtgtaaaggaccccagaaccctgtgctgtgctgacagtgaccatgcgacatttcattaccaccttgtagactgcctcgcagctttgatttccaaatgttgagcttctttcttcttttaagtggtgtgcacatgaagctttctgtgatggagcacttaagacctcagcctctctggctcatttcctacctcgtggtcagcagtatccagtgttagagcattggtgtgggctgctgagatggctcctgagaaacgtccaggacctgcttggtaggagagaactgactcccagaagttgtccgcatgcaccctaccctgccctgcctcccaccccacacacaccaaggaatacatgtaattaaaacaaaaacaaaaacaccactggcaattgatggcctagttgataggtggctggttttccaccgctgcctctcatgatctgtgctgtggtttttaagttctaagggagtcttgcctgtaggaaacctacctgtctctagcagtcaacatggggaagaacttgcatactaaggcacagtggctcgtcttttcactggttcagagctcttctccagaagaaactgctcagaaactgctgttgctaagtcatgcaccttgaaagagagctggtttggaatgtgtttgccaggtgttgaactttccctgggtatgcacccaagaatggttacagaaacagagatggtaattatccagacgctcagcagatgagtgactttattggatctgcttttctttaatgttcatgatgaaacactccatagaagtgctgttttcacaggaaataagaagctagactatcttcccggtgtgttggcatatgctgctaatataaatactcagagggctaagacaagggatcaccagtttgtggtcagccaagacggcatggcaagactgtccatgtccctcagtgttctctccctccagacacatgaaccatccagaggtcctcctgtctcatccctgtgtgcagctattttgactgactctctttccttctttctttctttctttctttctttctctctctctctctctctctctctctctcttttctccctctctctctctctttctttctttctttcttnnnnnnnnnnnnnnnnnnnnnnnnnnnnnnnnnnnnnnnnnnnnnnnnnnnnnnnnnnnnnnnnnnnnnnnnnnnnnnnnnnnnnnnnnnnnnnnnnnnnnnnnnnnnnnnnnnnnnnnnnnnnnnnnnnnnnnnnnnnnnnnnnnnnnnnnnnnnnnnnnnnnnnnnnnnnnnnnnnnnnnnnnnnnnnnnnnnnnnnnnnnnnnnnnnnnnnnnnnnnnnnnnnnnnnnnnnnnnnnnnnnnnnnnnnnnnnnnnnnnnnnnnnnnnnnnnnnnnnnnnnnnnnnnnnnnnnnnnnnnnnnnnnnnnnnnnnnnnnnnnnnnnnnnnnnnnnnnnnnnnnnnnnnnnnnnnnnnnnnnnnnnnnnnnnnnnnnnnnnnnnnnnnnnnnnnnnnnnnnnnnnnnnnnnnnnnnnnnnnnnnnnnnnnnnnnnnnnnnnnnnnnnnnnnnnnnnnnnnnnnnnnnnnnnnnnnnnnnnnnnnnnnnnnnnnnnnnnnnnnnnnnnnnnnnnnnnnnnnnnnnnnnnnnnnnnnnnnnnnnnnnnnnnnnnnnnnnnnnnnnnnnnnnnnnnnnnnnnnnnnnnnnnnnnnnnnnnnnnnnnnnnnnnnnnnnnnnnnnnnnnnnnnnnnnnnnnnnnnnnnnnnnnnnnnnnnnnnnnnnnnnnnnnnnnnnnnnnnnnnnnnnnnnnnnnnnnnnnnnnnnnnnnnnnnnnnnnnnnnnnnnnnnnnnnnnnnnnnnnnnnnnnnnnnnnnnnnnnnnnnnnnnnnnnnnnnnnnnnnnnnnnnnnnnnnnnnnnnnnnnnnnnnnnnnnnnnnnnnnnnnnnnnnnnnnnnnnnnnnnnnnnnnnnnnnnnnnnnnnnnnnnnnnnnnnnnnnnnnnnnnnnnnnnnnnnnnnnnnnnnnnnnnnnnnnnnnnnnnnnnnnnnnnnnnnnnnnnnnnnnnnnnnnnnnnnnnnnnnnnnnnnnnnnnnnnnnnnnnnnnnnnnnnnnnnnnnnnnnnnnnnnnnnnnnnnnnnnnnnnnnnnnnnnnnnnnnnnnnnnnnnnnnnnnnnnnnnnnnnnnnnnnnnnnnnnnnnnnnnnnnnnnnnnnnnnnnnnnnnnnnnnnnnnnnnnnnnnnnnnnnnnnnnnnnnnnnnnnnnnnnnnnnnnnnnnnnnnnnnnnnnnnngatttggacgcttttctcattgatttcagtaagtgaaaatacattaccttccttccagagtagctgccggctgtttcaggaaactgtacccgcataaagctttatttaacctgctgtgctgttttctttttgtaatcgtacatagtgggtcttctgtttataaccacctgagttagaagatcttccctcacgtgacagtttccctgacacccacttacactccagggaaaatgagactagatctcaccacagtgcccttgcctcagaaagccattacctgcaatgagctggtagagttctgtggcactgtgctcactataccattaggtaattattgggaataagcacaagcgattgttagttacaaggagttttcgctttctcagattttgcccagtagtctttgtggagcagaggagagcaggggtaaagagagcctgttcacctgaggaggctctagttacttccctctcactgttgcagaagctgttggtaacgaggtttctcaggagctgctggcttcatatgcacttgtagccctgagcctctctggttaaagctggatgcttgcaacagtgcagcggctggatgcttgcaacaatgcagcggctggatgcttgcaacaatgcagcggctggatgcttgcaacaatgcagcggctgtgcttctttcttagccgctgtctctcttcttgcttatttcatactaaggctcaagctgcatttagagagatagtagcctgtgagccccttaccctgtgatgataggactctctagctatatgacagtctgtcacttagtgcacgtgaattcgtaggttgttagctggataaaggaaatttgaatatatgtgcaggaaatgcaaggccttgcatgtaggtatgctgtgagggtccataaggaagtatgttgactctataagtctctatcattagattctgaaatgttgaagtctgcagataaattttagactgattttgtataatttcctgaccaaaaaaatataaaattaaaaaggattttgggttgattatttttataccttcagatagtatttccaattattaatttgttttcctagtcttactgttttggcctagttatccaggagactaattgtccaaggagggctatatactagctcactgtcgttcctttccacatcctcgctgtaatcagactctttttcttctttagttttccatgttttaaatcactgttccctgagccttccatacttgtacctaatgcactgattgctcctctcctgccctccctcttccctccctcatccctcacccccttgtttgctacttaatctctttcttgtattcatgtctttttatctatgtccctctgggtttgaccaagtccatgtatgtggctttagttcctggtggtgtaggagtgggtacacatgtgaagaccatcattacatgaggttttttttaaggggggggggttcttcttgtttatattggataagtaaatgtacagttacattcgagttaaatccctgctacagctatttggaaaggcagaattagctgactctttatggaatattttacagtcatcatgtatgaggcgctcatctataactacactttctgggatacatcacaaccatgcaggtctaagcttgctgacagtgttctcgtgtctctagactaaaaggacgttccaggagacagctccaggctaccttttaagctttttgactcaacagtttgcttctctgagttctttttctgtgcatggcctttcctgacatggccccttcctcttgcctgttcaaaaccatgctcatttggtaacaactcaagaacctcttatctctaatgctgtctttgtaagttctatcttataccgtcccagctatgttctatacgagcatgcttagaccgtgtttgtccttttgtgctaaacatcagtatatcgtgcttctgagttaccgtgatctccttggaaacttttttggatcagcatagttcctataacaatttgtattagatgtcgttttgctgatatgaagtgataatgaagctatctaaagtgatgcctagattataaaggaactggtaccaccaggtaaaaaagtcaagctctaaatacagtgatataattacaggggacatacatgaatgtacatgtatggataacccagggttccctttaagtgctaaaactattttaaaacttcagacatgaaaaaacaaggtggacttgaacttttctttcctttgagaccaggtctcattttatacttctggctgacttggaattcactttgcagaccaggctggtcttcatcttccagagatctgcctgtctctgcctcccatgtactaagatctgaggtgtgcagcaccattcctaaccaccaccctgtaatttcagacatgaaatacaggacacactggaatacttttggggacatttgcggtcattatgaatgccatcctccggatgtgactgggtttagtagtcctgacagtcttgtagaacccttggccttgtctctccactagagtgcttaagcaccatgatgaaagattttagtatagttgaaaggtggggtggggaatagtttgaagggaattggtattgttttacagtactcacaagaaaacgggaccgagtgtaagcccaataaaaattcactttaaaaacagaattattccttgaccaaccattgtaaagaagacagggtatgctgttgaaaaattaatagcatctccttggtagtcacttaaaatattagtaggtaaatatctttccagaaccatttggatccaggcattcacagaggggggtggggggggagcacataacctctcatcagtttttcctcacaggtcagtgctctgggtaagaaagatgagcaggacttgtaagatttctaaaatatgttctgttccattaaaaggacctcttaataatggtttgggttctgttgtgtaaggctgggacctgttgattaaggttgtattttcagttagtcagagcaactgtaaagtagggaagtccttgtcaataatgattgtaatttagcaaaggaaaacagcatactgcacctggacttttatatatgttccaatagagtgtgtgtgtgtgtgtgtgtgtgtgtgtgtgtgtgtgtgtgtgtgtgtgtgtatacgctcttgagtgcgtgtgtctgtttgtctgtctgtctgaaaaatgcatgcacaagattttggcactgttgtccggtacagtaagagaactgatggggttgtccacaggcccaaatgctacccttccaagaagctgtctcttgcttctgggacagcttatctggcacttgtcagagtgaggtctctcaggaggctgtttgcacatcttggccagagtgagtaaaaggtgccagcatctcagagacagcctgctcatagacagactcagggttcatgactgctcaagaagcgatggacacaggctgcaggggtctcttctcctggattctgagatttcctctcccttagtcaaaaactttaaagccctcctacacacacacagacaactctccaccctcactagacatgtcaagacttcaaagaagcccacttcccacaaaacttctgctactttttgcctcccacggacaaggaaaatagctgctcttcccacggggaacagctaggcactggggagctagaatgttccttcctgagccctggcctgctcctgctgttagagctgcccagcaatgccttatatatttcactgtttctttattttgaaagaaaattcagacttgagagaaaagttacaatattgtgcctagaatttccatgaattctttacctggatcccctgggcgttggcatgtatagtgtctgttcttttattctccttcttctctctcatacgtctctttcctgaattgtgatgaggatgaaccgcgtgtgttagtccatctttaaagatcctctgctgtgtatcccacaaactctcagaaccaaaatatccctatcagcaggcactctgtatgagtgagtgtgctagattcaggtttcgtcttgccagtgcttcctgctgtccttttgggggaaatacctctcagtgtgggtttatttctcaccacattcagtcactgggtctcttaaatttcccaagatcaggggtattggtgggtttgtcttgattttagttccttggacattgtaaagtgtgcggggacctattctgtacagtacctgccttcccattggggcttctctgatattagatttgggtggtaagctttggggagaagtactagagaaactaaggttcctcctccttggcatacaaaatgtgctgaccatgttatgcggtggtacctgccaagtcattgtaatagtgtctggtaagaagataccttgaggttatgtaaataccatttctcccatcttttcctcctagtttcattgatgggattttttttttttaatttggtgtttggaggcagagcctcacataacctaggctgtcctttgacttctgacactccttccctcacctcctgagtttaggatgacaggtgtgtatctgcccaacctaaagaatgattttcacgagggctggagagatgggttagcagttaaaagcactggctgctgttgaccaaagatccgttcagttcccagaactcacgtagtacctcacatctgtgtgtgactctagttccacggggatctgggctctcttctggcttctgtgggcaccagtgcttccatggtacacagacaaatgttcctgcaggcacaagagccatccacataaaaatgatggatggatggatggatggatggatggatggatggatggatggatggatggatggatggatggatagatagatagatagatagatagatagatagatagatagatagatagatagatagatagatagcagagctgtgctcctcccttttccgtaggtcaccggctacactcatctttaggtgctccctcctctccgttttgtactgatgagcatgtaggtgtgccctttcttactactactactactactactactactacttctactactactactacttctactacttctacttctactactactactactactactactactacttcttcttcttcttctccttcctcctcnnnnnnnnnnnnnnnnnnnnnnnnnnnnnnnnnnnnnnnnnnnnnnnnnnnnnnnnnnnnnnnnnnnnnnnnnnnnnnnnnnnnnnnnnnnnnnnnnnnnnnnnnnnnnnnnnncataagtatcacatacccagaacacatggaggccagagaccttaagatttattttattttatttttaattacgtgtgtgtgtgtgtgtgtgtgtgtgtgtgtgtgtgtatgtaagtaagtatgggttccctcagagatatttcaccaccaccacccccagctggagttacaggagattgtgagatgccccacataggtgctggacggtccttgggaagtaaaatatgcattcttaaaacctgggccaggggctggtgagatggctcagtgggtaagagcacccgactgctcttccgaaggtccagagttcaaatcccagcaaccacatggtggctcacaaccatccgtaatgagatctgactccctcttctggagtgtctgaagacagctacagtgtacttacatataatcaataaataaatcttttaaaaaaaaaaaaaaaaaaaaaaaaaaaaaaccctgggccatgcttggctcactgtctcaagccttagtgattgggatgcctgaggtacactccagtgaatacttgaataccagtgactaggttaaatgctcttgctgatgtctctgttgacttgtcagccaacagtggctgtatgcagcagcattatctgtgtagcgtatgcagcatatctgtgtagcgtgtattcagagctaacaagccaggctgaaggttgaactccaagctcagggaactgacatgccccagaacatgccttcatgagcatgcatgttagatgtttcacatactacaggcagattaaagactcaaggagtcttgtgctcagcaaagggtctgcattaaaaaaagctagtagaagttagtgggcatgctagataacagctggagtaagaacagccaaggggtccatgaggctggggaacgtggctttgagattccagaaaacaaaggagatgagtgtttcagcactgactgatcctagcacagctgggatttgtgaaattctttctgtgtgtcacctgaattgcacatgtgagcccaattctcacagataactatggggaaagtgacacaaaaaaacagtcatagatcctcagtgtcccaaaggaaaaggtgtaagcagtatacctggaggactgtggcctaagtggaattttaaaaacatgaatctggggctgggattaaaagcacttgctgtatgagcctgacaacatgagtttgatttctggaatgcagtccatggggggagtggagatctgagtccagaagggtttccactaactttcatgtacaaacacagcccacacacaacaaggggaatgttataaagaagtggatttacccaagaatgatggcccacgtctgttattctcggttatggcagaggattgccatgggttctaggcctgcttggactacaaaatgagaccctgtctcaacaaaacacagagcagggagaagggtggttcagaaagcttgactttccagagctgggggcaacatggtggggttgtttttatactgtaaagactaggacactggattcgagagtgtgtgggtgtctgtgtgtctgtgtgtgtgtgtgtgtgtgtgtgtgtgtatgtgtgtgcgtgcacgcgcgcgcgtatgtacaaatgtgttagggaacactgatgagaaagattgaagtaaaaacaaaagtaatgcccaggtgcagttttcattacaaagtcataaacgaaaggcatttagtgaaattagttgcactttcctagctaaaagactaaaaactcactaactagaactatagattctagagtcagcaagataaccagctcagtgggtatacgtgcttgctgtgtgactctggtgacctgagttcagtcccaggaacccagagggtaaagaggggaaccaagtcctgaaagttaccttctgacctctatatatagtctggcatctacatgaagatggtgatagagaacatttttaattaaaaatattttgtttacacatgggctgcttcagggctgctgagatagacctgtggttataaccatattcttctcttccagaggccccaggctcagttctcagcgtccacatggcctcttaacaaccttctgtaactccagttccaggacaccaaccccctcttctggccgctgtggcactaggcatctacatggtgaatagtcatgcatgcaggccaaacactcatacatataaaataataatacaggaggggaaagaaaaagaagagtctgcttgctgagtctggtgataaccggtctttaatcccagtactcagaaggcagaagcagtaaggtcgttgaggggttgagtggtggtattgcacagttcacctatgctacctactcactgcagtttttctttcttacctttttaaagtggtcctgaccattaaaaaaaaaagaacaaacaaacaaagccactgtcccagcccctagctgtgtgtggcacccagtgttgctggtcttcctcccgtctgaggttgtcattggaatgaaggctgtttcttgagttcacttacttaagttgcaacaggaaggatcgttgttctcaactgccaatcttgggcagagagaagagactaagttggttgaagagatgtttctctttcccttcctcttgacaggtagttcatttcttggcacatttattttagaaggaaggttccagtgttagacctcagaaacagtcagctctgtccgctccctttctctgccactcttctcccagtcagtgcaaccaaggcaatcattaaagagaaacaagatgtccttgtgaagtggcgttgaggtccttccagctctcggatagagacctctcccttgacacttggaagagctcgggccagccactgtcactggaaggcttgttttgatctgtgcaattaagtttgatgatgacatattttaatagagtctagtctataatagaataaggaaagtgaacatctttccttatttcctcattgtaataagtttctccaaaagcctttgccactactgttttagtacacggagctgatctgtgatacattttaatatgctaaagataatatggaggtggaaaattgagtctgtggtgatttattcagaggttgactgctactgaatacatagacatgcattgcatgaggcagtgcagccaatgtttttatgtatcttttttttcaaataaactaggtttatcataaataagaacaaataaatagtttgtatagactagtgtgtatcattgcttcagtgaaaacatgactatgaaacatggggtctgccatctcattcttttctgaacaccacttacttgctttacatacctcaggcttttccagggtttggcacacaggtggatgttgttgccgtgtaacctttgttcagattgctacccagtgggcatatgcagcgagtagtgttggaacccactactgggcaaattccattccgataaccaataagcatcagttggcagtggcatcctgaagacagggacttttgccgggttgaatgcccagccataagcacagtgcttgtcagtcacataatgggcatgcagtgcttgtcacataatgggcatgcaataaacaaccgttaagggaagaaatgagtgtctgactctgctctttgtactactgggagtacctccaagtacacacagccagcttctgacagaattagctcttgatctgagattttctcatggccttctgtcttgtcacatgtacacctttattcttccttctgcagacatgctttggacggactttggccagcgtggcctcggtgacgcagccaagagggtacatgatccaggccttgttgtggggtgtcagacacagggttcataactcatctctgcggtcttaggtgtgagggtatactgaggcttcgcagtgggaagtgcttccaactcgctttcactggccccgttatggtatttgtaaggcagagcaagatcacacaagctttgttcttagtgcttgaaactagtgctttcctgattttggttccaaggagactattacctttaaatctgttttccagctgataaaagaagcaatgggcttaatgttttaagtgaaaaacaatctactataaaagtttgcttgcagggcaatggtggcgcacgcctttaatcccagcacttgggaggcagaggcaggtggatttctgagttcgaagccagcctggtctacagtgtgagtttcaggacagccagagctacacagagaaaccctgtctccagtttgcttacctcttcaggataattttgataatgcagatgactgggtcagaaaatggttacattttcttgtttgctcctttaattttgctttgggagaaaatatgtttttctttatttgcttagagttatattagagaaatacagttttacactatatcatactacactgttgtgtttaataacataaaaacttaagttttataattatttatgttgcatcttgctttggattaacattaaagaagaccttttcttcaacaaaattgttttaattaatatttttaaagtacataaaagtaattgagtgaattaaataattttattatttatatagcaatatgttgtccatattgaaacaaatgcgcaacatagttatactgtagcaggaaccaaagataaggttgctaaaattgtgatgcccatgtacctgggaactaagtagggttccttatgtgaaaatggattgttctggaatagggggaatgatactaaaaactaatctgaacaatgaaaagaaccagttcattgtcttaaagctggtgaatgaagcatttatcctgtttcccctgtctgagctgtaccactaggtgaccaagtggtgcttgagaaaagcaatctcttcccatgaattaatggatccgtacattgaacatcaaatagctgcaaattgcacaaagaggagcaaacagacatgatcaaacttctattctgtcttgctggaaaagacatagaagaacatggtgaacgataatacaagcacaccacgagaaagccccaagatcaggaaccgataggaaagaaagaatatggggtagaaggagaaatccacacattaaaagaaagttaagtctttgtcttaaatggacacaactgcattggcaccttgatattgtggtggtaaaggcataacaatagcaatagagcctgagagatgtgtcagtcagtggttaatagcactgaccactcttccagaggacacaggttcaattcccagcatctgcatgatagcctacaaacatttgtaactccagttccaaaggatccagtgccctccttagcctctgagcaccaggcatgcacataatacaccaatacttgcaggcaaccattcataaaataaacaaagctaacccaggaggtggtggcacacacctttaatcccagtgtttgggaggcagaggcaggctgatctctgtaaatttggagcccatctggtctacagatccagctccaggacagccagagctacacagagaaaacaaaagcaataaatctaaaaatagtaagaataataaaaacctatccctgattgctaggaaaaggctttcagtagttattgatgagagaaggggaaggaggtattgcctgggccaaacagaagattgcttggtggtgatcagcaaaatcctaagtgatagtcccaagggcagttgccttttggtaatccactaagctatacattgtatgtggttgtctgtgttcgttggaggcgtgttttgttttaaagtgggaggtcatataccctatggcatttgttttatggctgtaacccttaaaactctcaaaacagcctttttttatttattggtggtattacatcagtggtgttgtaaagagagagagagttcttcacctttactgctctacataagaaacattaagtgcataagtgcttggtgcttggcaccagcttcctgtcagcctttgcaaagctgtttttatgtgaagcaattgcaccaaacatcactgagactgaggccctcaagtgttgaatctcttagagaacggccttcctgtaacttctgcttccactgttaaacatgattgaagactgaagggtgatgaaatggaagattcaggtaagaaatacttgtctgggacttgagaggtggcttagcagttaaaagtactggcttctctcacaggacccaggtttaattcccagaacccacatgcatctcgcgacagtctgactccagtttccggggatccagttttctcttttggcctccatagatagacaccaggcacccccacgaggtgcacagacattgcatgtgggcaaaatattcatactcataagaaatataaaatagccttaaaatttttaaatactaagaaagaaatgtttctgccgtgaggtggaaagtcagaggtgaagccgagacgagacattccagcctgggcactcatgctttgttctcctactgttgattacactccagagtgaacgaatatagttctgtcagacactgcaagtgggagtgggatgccctctccttccagggctaatgcacttgtgaaatttggatatttaaaaaacagtgcttacagaagagaaaatgggaacgaaaaggcttaggttgccagaatgaagctgtgctaggtgagattaaggaagacacctagagttatctgtggcttctccctctctgtcccctctctctccccatnnnnnnnnnnnnnnnnnnnnctctctcccccccccactttctccctcttcctctctctaacacacacatacatacacaccacagtggggggtgggggggtgtgtgtgccaaccacaagatggctttctgttcttcctgccctttgctttgtccaatacaggatctttcctcttgaattcaaggaagttaattttattttctgtaccacagtagaaggtacatcagaggactctgtgccagcctgccttgcaccctgcagattttcatttgcttccagttaaaaacttacagaccatagcaagtacttttagagaagagataaaatgaatggtgcttgtgaactgttttaaacaccatttagaatacagtttagaaaactcttccctgaagaaaagtcactagctttcatcactactgggaacttttcagagaattttctctgaaataccttcctgccacatctccataaattaactttctttgacctcatcacacataatgctaaagggttaaaaccaaggaaaaagtaattgtgtgtctcagcctctttctctgcagattgcacaggaagtttgttcctgtctgcagcagggtaattacaagagatggttccataatttacagttgagtgtacttgtccataatcacacacctccaccttggcgtgcagaccctcctgtgtgtgccctgtccttttatttgtaaatgattaccatatgatctcttgcagtgcagcattgaattgagttatcagtaatgaacttcagctattactgtgtatgtgtgaattcctgttatttatgtgattagtggctcttagatttaagttgcctggtaatgaacaaattaaactccctgcgatttgtctctagctaaatagtcctgggcaccctaaccagaatagtgactagtgtgcccgcagtagagattcaaccactgaaaccttccttccctgtacattcaagaaccttcaaagttggtgatttggtgattaacaatgtccacacaatagaaagactcgtgggaatgataactgtgatattatggataatgccgtgctcatattaatatattgttactgatggctcaactctagctgcatccagtgttagagtcagtctgaacagcagcagaattgtaccttgtgcaaggaactcagagaaatgtactgtctgcaagctcaaaaggcaatgatgtcttttaatactgtttgtaataagttgggcacaaaggcacacatctgtaatgccagtgcactggaggctaaggctggtagatcattagttcaaggccacgccatagcaagattctgtctttaaaaaataattccaaggggctggagagatggctcagtggttaagagcactgactgctcttccagaggtcctgagttcaattcccagcaaccacatggtggctcacaaccatctgtaatagaatctgatgccctcttctagtgtttctgaagagagcaatggtgaactcatatacataaataaattaaatcttttaaaaaaaaatccaagatgtgtgtggtggtgcttgcccgtaaggagatcgagtcaggagaattgtgagctggaggccagcctggtctacagcacaagttccaggccagccaggactacaaagtgataccttgtctcaaaagcaatgataattataataaacccttgttattgcttctgaaaaccctgcttgtatgatacagcatatattcttgtttctctcacagaaacatctaacatagccagactaaatgtttgagttctatgaccaaagctactggcaagtcagccaaccactgaagtacgtgtcccacccacccctagttcccacacccagcacacactgtcctattggcagtggctgagccactgccctgacacagctatctatttccagaagctttgtgcctcagagtgtgttcaaaagcatgtagcatgtgcatgcgggaggggtgcgagcatttgtctcgctaacttggggatactaaagatgcttctgagccttgagcagatcagaggacgggctgggctttgattttagaaagttgtctcaaagactgacaactcccgcttgagatgtactttgtttgaaaacaaagggaaaatggaaagagatttgttcttccacttttcctgatgccatgctttacacagtctgtgtctgctaggtgagcgctcagtttctagccctgggtgctggtgtgtgtgtgtgtgtgtgtgtgtgtgtgtgtgtgtgtgtgtgtgtgtacaccagacagagagacgggcaggcagacaatatttgtagagctgtaaaaggtaagagaatggcctgggatggggagagggaaacagannnnnnnnnnnnnnnnnnnnnnnnnnnnnnnnnnnnnnnnnnnnnnnnnnnnnnnnnnnnnnnnnnnnnnnnnnnnnnnnnnnnnnnnnnnnnnnnnnnnnnnnnnnnnnnnnnnnnnnnnnnnnnnnnnnnnnnnnnnnnnnnnnnnnnnnnnnnnnnnnnnnnnnnnnnnnnnnnnnnnnnnnnnnnnnnnnnnnnnnnnnnnnnnnnnnnnnnnnnnnnnnnnnnnnnnnnnnnnnnnnnnnnnnnnnnnnnnnnnnnnnnnnnnnnnnnnnnnnnnnnnnnnnnnnnnnnnnnnnnnnnnnnnnnnnnnnnnnnnnnnnnnnnnnnnnnnnnnnnnnnnnnnnnnnnnnnnnnnnnnnnnactcgctcgcacacgcagactctctctcacacgcacgcacacacacacacagctttgttgggctagctgagctgtgcatttactgggctcagctaactgggctgcccctccagtggctagaagtgaagcccttccagttcactcggttgtgggatcttggcgccagggcagtttcatgccatttgatgaaagtgtgcttggtctatgagttttgtgagaattttgaaatcatgtagcttttcaataggaaagtcttgtgaggattttgtacttgtatgtagaattttattcaaggtttcaacttggatagcaatttagggtgcctttttgctgataggtgttattttttagaatattttttcaagcagtctttagtgtgaagaaaattttttctaaaagaagaaattagttttaaataccaaattacttcttaagttttctcttttgtaaacctgtgctcttcctaaaatatcctagaatttaaaatactgctattgcatttaaatgtgtgtgtgtgtgccacagtgcacatgtggggaccagaggacaacttgtggaagtgagttcgcctgctgtgtggtgctcagggattcagctcatcagcaacagcctttacctgctaaggctatcagaagttaacagcatcctgtctccatttctgtctcatcaaaaacagtggctcctagtactctaccatctcccagtgaagttgcctctgggaacaaaccggcttgactgatatttgggaatagtagttggctttgtgaacaatgtgattccttctgaaatatatttatgaaaacatttttaaaaaatcatttaatttaaaaaatttttaaatgcttttagcttggttatatgtgtcattggtagagtattcctctctcattctacaacatcttctcctataccccaggaccttatttccctaacaaggaagttatggattgaattcaacagttgatcatctactcaggaaaagaattcagcactcaggaggcagaggcaggcagatctctgtgagtttgaggccagccaggactattacacagaaaaactgtcttgaaaaaccaaaacaaaaaggctgagtgtagtttgcattgacataccttaccctagcagactgcacctgttggcttcagccatcacttgacatagctaaagccatcccaggaagtcttcattgagggattactcagatccgattggcctatggctaggtctctgagagattgtcttaattatccatgtgggagggcccagtgtgggcagggctgcccctctgcaggctttctaagaaagctaaactaacagcctggcatggtggcacatacctttaagcccagcactagagagacaggcaggaggatctctctgtgagttcaaaaccagcctggtctacatagtgacctctatggcagccaggactacattgggagactacatagaaaggaaggctagctgaacaggaatcagcaaacagtacttcagcagtgatttcagcttcaggtcctgtcctgacttacctcaaatgaacctcttcttagtctgtaagccaaataagctcctcccccaagcagcttttgatcagagtggtttcttcccagccacagaagaggaaactggagcacactcagtccccggttctgtttgactgagagaaacctctgtgcagtgcatgccacaccctctttactaaaactttaccttctgcccaggctcttcctacacgtcaggcccaccctttaaagttctgggttaaaggcactcctcaagacttttgcttaatactgtatctgaaaccaaactctcgtgggggaaagagttgagatttaatgagacggacatgaaggtcaggaagtgattctaacgtgcagctatggatgagaaccgtagctagacccaagcacagggaaggaagctggggagagctcccactaaagcgggtggtcggttataaagacaccatggactcagtagtgtcttggggatgtgtgtctggccctcagactgctcccatggagcagatgctgccccggtcaccaagctcagcagcatgtcacagatgtgcagcaccctctgtgacaggcatagcaggaggaggaggaaagtcctaacttcgagtctacatctcaacaccctacatctcatctccccttggtatctgatgcagatcaactactagagcatccacagccaccagggagccatcaaaattgtttggcaaacccccacgtgctctgtaggcttgggcacatgtgccagtacagggccatgtctctagtgcaggcctccctttgggaggaacatgcagaccattcttctctggagtaggcgtcgggtagtggggatattcagtaaggaacactagtgactttgttccacataactgagggagagcttagcagtggagtgctcttcaggaagctagtgcatcttcaagatgtctacggctgagatgtgactcagccaacagaactttcccaaagacagcatgtccctgggttttcaggccggttttcccaggacacacttgagtcttctagaatctgcgagtctttgttatatttctctgggagcttgtgggtctgctgaagcctcgggcagccactgtgtttgtgggttgatgggctagttgttcattcagggtagtcattgaaataaatacttgacagccaaaaggaatttgggagccaattatgtttgctgggaattttcagtagttaatttcttgactattcctgaggccaaaggagaaggggcttttcctttaattaaatttatatttgggtggtaggaaacttctgaggcagtagaatggtcttgaggtagctcaagcaaacgtaggaataggaaggaggctcatctcagtccgacgccaaagagctctttgacttcttcctctccacattctcttaatttcccctacattaggagtttttagtcatctaaatgaacgcctatagatataacccttaatagctaatctttaagccaagcattattctgtgtttttattaacccatgtaatgcttccagtaacttgaaaagataagtgtgattattaactgtgtggtctaaatgaggattcagacatacacagagattaaagaagtgccttgggttacatagctgttacatggtaggtcctgaattctgccacacagcttgtggctccacagcctgtgctcctagcctcctgtgagctgtcgcaatatatgacagttctgaggttcttatggtctcattgccctgcttctcaacgtttgtattattcatatatacagatagtctgagtacagttcaggcagtctgaggtattccataagtattccaaagtaatgctactttcctctttaactctttttcattcgtgacagtaaagtggaattttccagaaatgtcatgacacaacagatgagggaccaaagtagatattgactggagtgtaaaatgtaaagcaagctttctcctctctagtttgtttatatttttaaaaatgcagggaaggctttttttaaattatcgaaaattagagtaacactaggttcgttgctgttttaaaattaatcaatgtcacttctctgtaaaaatcaacagatacagcctttataaacaaaagctctttggagtcttaaataagtgtttaaactacaaagttctgaagccaagatgtcttagaaccccaccagtgtatctcagcaggtatagtgacatgagccctggttagagatgcatgctctcaggcctctctctaccttctaagttgtaattcatgttgtagccagaattcttttgtagtgacatccaggcatagaacagagcaatcagccactcattgactctagctaacccacatagcctgatagggctttaggaaatccatctattctattctctcccagtaaggaactgatgggacctgacttatcccattgtacattcagtgtctctcccacacaagcctgtttgcctagcagctccagagcaggtcctcaagggccctgaccttgagtcacctttagggtctgtgagagtgcaggttgctcggcgattagtctagttgctatgtaattacactgggcccaaagaattatggtaaagagtgtctcaaacttccagtttcaaatccagtctgtttcaaaatgtctactttgagagacattctcaatcttttggtaaggtcatctttcagacacatcacaggtcatttggaacagggctctcttaaagatactaacttcaggatcagcactgaatttaaacaaaagacggcccctcaaatccactctggtaatgaaactgctaaccgtctacatggtcacagtgctgctagcccaggaaacgaataacagaccacatggcccagtgaactgccacctccaaggaactccatggctaaaggcattggcttacctcctaagttaacatgagcccatggctggtgtcaatccccaggcctgcaaagcccaggctgtgttctgttgtgggtcttccattggcgtctgctgagctcagcaggtgttggtgaaaggtatataatccttggagattatctcccctaaagcaactgaaagctttgaattcacataatccagacagatgggagctggaactgagtagcaagccaaagtttatgctgtgtgtctgaggaggttcagatggtttggaagcagacaatgacagatggaagtgtacacggatgaggggggacacttgtgaagatctctgtcacacccttgcctctttttactcttgctccactatatcatcctgcatagcacttgttcaaaacgagggaagttccaaataaatgagagttgggatcaaattgattttgatttattcatgactgccaaaacaaactttgacctcatcaaatagttacctccataaagtgggtctaccctgctttcctagaggcagttagccattcagtctctggtcaggaccaggcagcgagaactgatactttaggccgtcctcaatggaggccaggtggcctgtatgctctgcttggaaatgcttttttccctgcaagaggatcatctctgagtcaagcatgagagacttccgctgccccttcgacctcacctttcccctggtatgcagttccagtgacgcagaggaggaagtggatcatgctagtttggggtggttaatgcaggggatggtgtgtgggctactccgtttccattacgaggttctcactcatgactgagtgctcgttgcctgaatctttggctcaccgacaagttcaagggaatattcgcaccagcagttaattatcctgaagctcctgggacttgtcttccacacgtcacttttcgtctgaaacagtaggtttccccaggggtagttgaagttttctgattgaaagtgtcctgcgttaaggagaggtgtgagcacgccgtggggatctattcaccaggggtgtattgtacttgtttcagatgcttcaggacaatacaccggcttccaagataagtgctttttatttccctgcatcttagatcaattatttggaatctttttggtaagttaaacttaagagcttaaaccatcacatctctgtaattaataagtcaaatgttcttaccaaaatttactgtgtctgctttatattgtaactgtgctttgaggagctgagagaaagtaggaagggacagaaggtggcaagaagcccctcacttaacacccatgtcgcgaaggacagcataggtcagcatcagcagctcagctccttccaggcaagcgcctgccgcagatgacatttatagccagccgctcttctgtcgtcagtgcacaaccaggaggcacagcacctttccaaacagcacagattgtcattctgcatgccatttcagtcaactagtaagaaataagacatgtgttcatggtcatttttactgttcctggtggattctgtttaacatcagagcatcctccgtcatggggagattccaaatagttctcggcaaaagtgccattttcttcctggctgcaacttctttgagggtctctggattcccagaggaggaggagacacactacaagcagggccaggcacctcagggcattggctttgggtggtgtttggtgctcatcatccctgggatgtgtgcaggaggttctgactaaacattgggtttccagtcatattctcggcaccctgaaaagtatccctcccaacaagtgcttgcagagtccctgcctcttcacagcctctgagtgcacacacaacaggagggtgctttgctgggagagaccagtgggctcaatgtccatgacacatagagcgtgttaccttccacctatggggcagcagtcctgcgctgcagtcaaaaggccaaggaattgtcaggagtcagccttttgacactgcaggagtggagggtactgaaaggtttgtactccagtgctccccaggggctcagcttgctggctcgcctaaattaccgcatgctttttagactcggggtacaagaacagctaggtaaaattgaaagggagggtgggaatgcttccctcttaggtcaaagtgtgggaacatagagacataataaaaaccgtgcctccagggtaaggtagttctgtgtagtggtgagcgtaggtgggagggggaactgcttgtaggccaaatttctgccttcaacagtgggattcacatgaatcagtgagggcctggggacttccatagttagtcactgcagggaacttttaattgtgggatcttgtggacaaagggaacagttatcatccatggttctatacctgcgcctcacccccccacccccggcagaagtacagagctggggctcccagctgactaagtaaatttctcaggctatgccaagcacttagggagcaggtgacgggatacgccagttttctgtgctgaggtttgggcttcctccactgctctggcaacgcagcactctccatgttgacaggacacgatatgggctggctgcagcacagcagctgtccacgttagcattcctgacaccgctgttgaaaacctcagtgtggcagagcggcacgcgccgacagtggcttggctgttaaagtctggtgtttgtttgcattcaatacttaaacaggacgagaggagttaaaccaaaaatcttaggcaaaacacgatgcttattttatttctattctgtatgatgacattcaaataaaagctgtcaagatgcagcatgctgttgaggtagagtgtctttttctagatttctgcattatttgcaagtggttttgagaaacaggaagaaaatggatccaaggcattgatttctctttgtaacaacaacagaaaaactaaaacagaaaattcttgcaagtgcagccattttggaactgtagatgaaggggaggaacgctgatgtctgggttggtgtagagtggcctggtttggtgagtgctgccacctactgtctgtgctgatgtttgtttacacgcaggaggttcacggaggtgaacctcagggaggtgaggctgttgaaacaattagagcaaagaagccatcactacttgacagtcaattcttctctcctccattactgcctcttaattaccgagacagccaccagcttccgttcatttcctctaagtgggcttaaagtcttctcatttcagagtttctttgccagaaaagctgtgcggttcgagcttcatgtgctcgtgtattttatttgtaattgtaggagccacattctcaggttggcttagtttttatgagaagggtaaaaatagagctagcatcgtagatttgcgtttgccaccataggcgtgaaagccagtgttttattaatactaaaacagcttcaaatcagccgctggttaaacggaacaggcagtgcaggctgtgtcagccgaagccccttcactaagccccagctgtcaaagggtcatcgggtcctctgtggaaaacaacctgcccattaatgtcggggtggtccctccccaggatccgagagatcctgacattgagtatccgagagaatttcaggcttgcaggggatttatgtgtggagattccccagaagtctctttagtcttagctttcaacctccgtgacacacaacaccatgtatgttagctgccaccagctgtgtgaattcgcttacagtgtcaccacaaaagttgacaagcagaaatttgacgaggtgacatcactgtaattgagagaggtgacgagcttgacaggacacacttgacctgtgtgatgcttttaccttgtggctgatgacattgttcctagtcctggccctagctctgacaaccaagctgagtgcagttttgcttttcctgcctaggctatttgctttctcgaagagaaggccaagcagggtctcccgaaaagccgctctctgacctgggccggctctcctacctggcctactggaaaagtgtcatcttggaatacctctaccgccaccacgagaggcacatcagcatcaaggccattagcagagccacaggcatgtgcccacatgacatcgccaccactctgcagcacctccacatgattgacaggagggatggcaggtgagtgccctgctttctgctttcttgatccacagcaggatcaagcctgttgttgttgcttttgctggttttccattttcataacctgggtcaaaggaatctggattggccagggactttgttcttttaaaacagtagcccaggtaaccttcaaactcatgcgatcctcctgcctcagttctggattacaggtatgcaccagcatgtccaccatttaatcttgagttggtttggtttggtttggtttggtttggtttggttttctagacagggcctcactgtatagccctggcatccctccatctcagtttgttagaccaggctggccttgaactcacagagagtctcctgcctctgcctcccccaagtgctaaggttaaaggtgtatgcaaccacaccccactagctctcagtttttttaatctcactttgtcttgtctccctatattacaggtttgtcatcattagaagggaaaagttgatattgggccacatggaaaagctgaagaactgttcccgacccaatgaacttgatccggagagtctaagatggaccccaatgttaatttctaatgctgtggtttctgaggaagagcgagaagctgagaaggaggtgatgacgagctgcgtcatcctgagtggtgacttttgtcttgtagttgcttaagctaagagagtcatttgcgtcattgtgaaagctcagttataacgcttatgaaacgatacagcgctaatttatcctaaccgattaagacatgataattttattgaattaagtatgaaaaatgagacatttatcattgatcacaccgaggcactcagcactgacagtatgtaatcagatcagacttggtgctgggctgcagtgctgccatgttaatcgattctttgtgtttataaacttgcgtagagtgctccatgccagtgagcatgtaatgtagtgataaagagcttgaatcaattcactgcatcgttaacaccacttactatcccatgaaacccagccgtaacaccacttactatcccatgaaacccagccgtcttaggtctgctctcctaactgatacagctggaatgtgcttgaccagctggtcagaactcacttagagagagatcctttttcattgatcctggaggctccagccgtgtaactgacctcaccgatgaccattttgctccccaccccaggctgaacgactaatggaacaagccagctgctgggagaaggaggagcaagagatcctgtcgtccagagttagcagtaggcaatcgtctgcaaaagtacaatcaaagaataagtacctgcactccccagagaggcggccagtggccggggagcgaggacagttgttagagctgtccaaagagagcagtgaggaagaggaggaggaggaggaggaagatgatgaggaagaggaggaggaggaagaggaggagagcattcagacatctccccctcggttgactaagccacagtcagtttccattaaaagaaaggtgtgtatgcagataagctgttttctggtctgtctggcttctcttcacagtttttgtttcactctctgtagtttccctgtagtttacatctcagtggtccagtgtcacaatcgtttatcttacacttgtggttctgcttactgctaacgtgtgcagcatgctaaccaccctagtctggtgttcactgccacctgctggtctgcaggacacctcagaggcctgggggggtcagaccagaccaggtcacatgactcactagagggccagccacacctcagagctccaagtccagcgttcctgcattagtgtcccttattctcacatagggttcttaggtattccgcaccctttagtttgctgctggtgttctgcttgtgtggccagtgacacggaagtaaaactcttcatatcctgggtaccaggtagtctcctcagacagcgccagttcctgcccagtgggatagaaagcgcaacattggtttgtgtgggggtgggggtaaatgttcttccacatctgctatctttgtctgcagtttctatctgtgacatacagcagggcagatattattaatacagccttgacaaggagggataacacggtagaaatgaaagctcttcccaggggctgtcctaagaagtattttccaggcagtttgctagtctaactcccaactaggttctttcttctgacctcacagttggagttagcagagggagcaccccgtgaagtgcacttgtggctactcagcattttaacttcttatacagagaagtcagtcttgtgttatgggtagaatgagaggaaggagatctataaacagagtcattccagtcatggtgtgggccacagctctccgtatggattcacctgaaggaaaccagctctttatattggctgcacttgcgtttgggggaaaggtgtgggggcttagggagcagataacagcaagtgttaaatgactaatacggttagattttagaatgttaataggcctgtatgtgctctttaagaacattgaaagcattaaaagtgtaagatgcaggaattcttcagtactgtttatctggaaatagtgccccccccacccccaccatgctgggaggggagcccagtgccttttgcatgagaggtaagtgctctgctagtgagctacaccctggccctggcccgaagctgacattcacgtagacatactgagccctcacagagcagcattctgccaatttcatggttcattgacacatatcttaacattgaatctacctgttcctttatttaaattttgtatattagatgggtgtccccccccccttgggaaaatagcttattgttgcaaccacgggaagtcatttgtgccattatcttattcagagactgcgttactttttaaggtatcttccatatcaaaatagtctataaaatttttaactgcccacatcccagtagccaagactctctaactctgcagttttctagccagtaattattcaagcaccttttcattttggggacaaggaagttcaccttcagccccaccatgtttctcatagtgcctatcatgccgtgggcatctccagagcagttacaaggtaataaatgactgacctgatagccgattgttgcaacatttataaaagcgtttctagaatcatctgtgatatgccagatactgaagctggtgagtgccacttaaaaaataggtgctggaaaagcaatgctcagcttttaaaatctgcagttgagttgctaggatgttctctctcaaagcatctgcttgagtaaacaagtgttttatttggaaaacatatgcctgtgttcttggcacccaagagggatgttcaacatcaaatggaaggttaagtacaaaggcattgaagaagtcctgacatgtaagagtctcgggcgcacgtcagtacacgtttactgcgtatcacctcagctgtttaattcctcaggagcacttatgtattatgttttgaattaatttcagaggccttttgtagtaaagaagaaaaggggtcgtaaacgcaggaggatcaacagcagtgtcaccaccgagaccatttccgagacgacagaagtgctcaatgagcccttcgacaactcggatgaggagaggccaatgccgcagctggagcctacctgtgagatcccagtggaggagggcggcaggaagccagttctgaggaaagcattcccacatcagccagggaagaaaaggcagacagaggaagaggaaggggaagacaatcatttcttcaagaccgctgccctttgtagaagtaagtggagggttagttcgccgcagggtgtgccagtgcacctgagacacatgccagcccatcctttctcattcccagcgtctcgcccctttttccttgcaatggggtactttgtttctaaatcagaataatcctgtaggtggtttcttcttactctgtagaaattgcctcaccctaaactctgaaggctagtaagaaacacagcacacgttccctgatactgctctgtgatctacctagttagcatttttggacatcagggtatttgttaccagtgtgcacttctgttttccttgaaaacaacttctcagtgcatcagggtgtatcctaatattcctctgtgtgatccagaagcacctgaacttcaaacaccctcaatatcagcgttggtaatatgggatgatacagaaatcccaaagacagactttcttttgaagttgacagggataccctcttctacaaacataccagactcaagtgaattgtctctgatgccctgttttaaagcacgtatcccttactctgctagcacaggtactccaagatggacggtgaggagctgtaggacagctcctggtagctggaaggctgaaatgactctgtctaaaacttgctgcagcctagggaacaactcgcctcctttctctgggaaccacaggaattgctgtctatgtctctttttcaaagcataagccagcacttccctgactccttagtgaatatttgctatctcctgtttcattttttaaaattttatcctttccttttttaaagacaggctctcactatgtagccccagctggcctggaactcactatatagacacactggcctcaagctctgaggtcagcctttccctgcccttcaggtgctgggattgaccagcatacctgacccattctccctctccttctctcctcttttcatctcactctctatccctctcttcttgtctgtctctgtctctgtctctctctgtctctgtctctctctgtctctgtgtgtctctctctgtctctatctctctctctctctctctctctctctctccctctccccctccccctccctccctccctctccagttttacttagaattcaacctgtttgtgccggtcttgtacctggtgagcccccaagacctgtcagttttcctctgccccctcagtactggttccgggcataagacagcccacattgcccgtatgtgtgtatgaggaatctgaatgcaagccttcagcactgtgtggcaagctcttacactgcacccactgcgccttctccccagactcctgtgtacatgtgaggctcatggagagctccctctgcagatgtggacgctgagcctgactctcacttggaggtgtcggctcggaagcctgcagatgagctgctgctgctgcctctcaccttggctttgttctctttacctttgatggtcacattccaccatatttctttcacgatcctctccttaaaggagattattagaaaactcatcttctcatctagggatgtattcctatagaaactgtatggccagtgactcatagaataaacgtgggtaaaggcacttgctaccaagcctgacagcctgattttgatcccaaaaactcacatggtagcaagaggaaaccagttccttcaagttggtgatgctcgtcttcaatcccaatactcaggcagagacagaggcaagcagatctctgagttcaaggccagcctggtctacagtgctgtttctaggacagccacagctacacaaagaaactgtcaccaaaaggggtgaggaggggcgctaagagacattgagatggctgattcctgccattgtgaatgaaaggaagtggtgtgagtatccttggggaagtggccaagctctggagcttgtacagagtcctctctaaatcaagtacatgctgtcagctagtggtgagctcgatgtctgtagggaagtttatgtgccctcactttattatataaatgagctgatcttgctggactccagccattctggcatcaactttgtgactttgcttttattatcctctaaaatactgtttgtttgtttgtttgtttgtttgtttgcttgcttgcttgcttgcttgcttgcttgcttgcttgcttgcttgcttgcttgcagacagaagctgtcctagaactcactgtatagaccaggcaccaccacccagcaaaaatagtgttttaataagaaatgtcttaaggccccagtgttttatgtctacatacttattcatgaatatgtctatttgtttgctgtatttttagtagcaaacattcgttttgttttgttttgttttgttttgtttattcctctcagaattttataaggtggagtttgggtgagagaaaaccctgaagcagttgtctgcctgtacagggcaactggtatagagagcctttgaaacaaacattcttatttctgtgtacatagaggtccagaagaataggttttagacttgtaagaaaatgttcacttccatctggttgctgattgtcattctaaatcagatcttatatttgaacagcagactgatccctaatataccatgaacagaatccctgatttaaaacaacaatgggggctggagagctagctcagcgggtaagagtactgactgctcttccagaggtcctgagttcatgtcctggcaaccacatggtggctcacaaccatctgtaatgggttctgatgcccttttctggtgtgtctgaagacagcgatggtatactcacatgcatcaaataaatatttaaaaacaacaacaacaaaaacccctgtgttttaaatattcagtaatattatggtaattgtattttagcttgtgtcattgataaattgtgatgctaacaatgacagtgattacaactgcgctgttctgtgtagtcactcatgcagttcagaggtacacagtaagtaatgtctgggctggagagatgctttggtggtaagagcagtggctgctcttccagaggacccaagctccatccccagcacgcacatagtggtagacagccatctataactccagttccaggggatctgatgccctcttctggccttcatatcaggcatgtgtatggtacatagacatgcatacatgcaagcaaaacacccacacacataaaataaaatgaacaataaataataagaacaaagttatgtcagctgggatcatctaaatctagcaaatgttcacagagaggaggtcctttcctccggatggtaccagattaaccctttgagtgcagtgatggtttgggtatgacctaacattaatcctgtcctgtggtattttcagatttgttgatgttgaaattgattgttttacttttttagtattgtggagctcccagtttttgcatcttagaatgtctttgacttcctaggcctaggttactcgggttggcttattccacaatattcctagttacctctctcatcaactcttaaagtgctaaagtaaagcagtgcttgcttatttaaaagggtgtgttaagttgtctctggttttccttcctaaaatgtgtgtttttctgtctttttgtctcctcattaagaagatgtagatgatgatgcagaacacttgaaagaaggcagcaaagacaatcctgagcctctaaagtgcagacaagtgtggccaaaaggagcgaagcgagggctctccaagtggaagcaaagcaaggagaggaagacgggcttcaagctgaacctgtacaccccaccagagacacccatggagccagaggaccaggtgacgatcgaagagcagaaggagctttcagaggacaagggcagccccgtggggatggaacgggaggtgacagagaccgtggatgccttgctgcctcaggaggggagcagaagggaagagacaggcatacccgtgagtccacataaatcaccaggtggaaaggtagatgaggaggacctcatcagaggtgaggaggagggagaggaagagggagaggaggagggagaacgagaagaacaggaagaggaagaagaagtaactacagaaaaagacctagatggtgctaaaagtaaagagaacccggagcctgagatctccatggaaaaggaagaccctgtgcatctgggtgaccatgaagaggacgaggatgaggaggaagagccatctcacaatgaggaccatgatgcagatgatgaagatgatggccacatggaggctgccaacatggagaggggagacctcccaagagaaaccttcaaagacgcactagagggccaggaggcttttttagacctgagcattcagccgagtcactcgaaccctgaagtcttgatgaactgcggtgttgatctcacaatgtcctgtaacagtgagccaaaggagcttgctggggacactggaactgcacctgagtctgacgcggagcccccggaagaacagacacagaagcaggaccaaaagaacagcgatggtgtggatgctgagctcgaagagggaggcccagccgctgtggaaattgactccgagaccgcccaggctgttcagtctttgacccaagaaaacagggagcacgatgacacctttccagattgtgctgagactcaagaggcctgtagaagcctgcagaactatacacacacagaccaaagtcctcaaattgccaccacgctggacgagtgccaacagtcagaccacagtagcccagtttcatctgtccattcccatcctggccagtcagttcgttctgtcaatagccccagtgtccctgccctagagaatagctatgcccaaatcagccccgatcagactgccatcacagtgccacctctgcagaacatggagaccagtccaatgatggacgtcccgtcagtgtcagatcactcacagcaggtcgttgacagcggattcagtgacctgggcagtattgagagcacaacagagaactatgagaacccaagcagctatgactcaaccatgggaggcagtatctgtggaaacggctcttcccagaacagctgctcctacagcagtctcacctctagcaatctgacacagaacagctgtgctgtcacccagcagatgtccaacatcagtgggagctgcagcatgctgcagcagaccagcatcagctcccctccaacctgcagcgtcaagtctccccaaggctgtgtggtggagaggcctcccagtagcagccagcagctggctcagtgcagcatggccgccaatttcaccccacccatgcagctggctgacatccccgagaccagcaatgccaacattggcttatatgagcgaatgggtcaaagtgattttggggctgggcactacccacagccatctgccaccttcagccttgccaaactgcagcagttaactaatacacttattgatcattcattgccttacagccattccgctgctgtgacctcctatgcaaacagtgcctctttgtccacaccattaagtaacacagggcttgttcagctttcgcagtctccacactctgtccctggagggccccaagcacaagctaccatgaccccaccccctaacctgactcctcctcccatgaatctgccaccacctctcctgcagcggaacatggctgcatcaaatattggcatctcccacagccaaagactgcaaactcagattgccagcaagggccacgtctccatgagaaccaaggcggcatctctgtcaccagctgccgccacccatcagtcacaaatctatgggcgttcccagactgtagccatgcagggtcctgcacggactttaacgatgcaaagaggcatgaacatgagtgtgaacttgatgccagcgccagcctacaatgtcaactcggtgaacatgaacatgaacactctgaatgccatgaatgggtatagcatgtcccagccgatgatgaacagtggttaccacagcaaccacggctatatgaatcaaaccccccagtaccctatgcagatgcagatgggcatgatgggaagccagccatacgcccagcagccaatgcagaccccaccccacgctaacatgatgtacacggcccccggacaccacggctacatgaacacaggcatgtccaaacagtctctcaatgggtcctacatgagaaggtagacagcctggcagcccacccagcccactgggccccactattggattgatctgcacaaatacctttgaagagtacgatttcaaaaccagcattggtgtgaatgcaaaaacatttgttggcaccatttatttaaaaaaaaaaaagctgtatgcagcagaaagaaagccttatacaagttgtttttcttttttcctttttttcttttttggtacctttatttctgttacttttatataaaattctctgcaaaggaaggcctctcttaggactctagttggcagcggccacacgtcgtgcctgcttccattaaacagtgtggatacaagcccctccccaaatcacctgttttaatactgaacctccagcttttctccttcctgtctactccatggaaatgcctttagcatttcaattactgtatattttgtttaaggtgacccttcagcatgccgctaatgtctttgttagtgacagtgcattttgtagtactgtacaagtgttgtgctaacggtaagccatttcttaagttttttgccttgattagggtaccctaatttgagggttaaaaaaaacaaaacaaaacaaagctctatttttgttaattataaaactgtaaagagctacagagctatccccgtctggttagtgaagggggtttatcgctaaatgtttggtgtaaagttgagaagacctttttccattttggtggcaggctcctttggggggaggcagctttctgttttataaatgcacacttctgtttattgaatgaagcatatctcagtgtttatctgtcaggttttgaagcatttcatatatgtccaaatacttggcaggatttaaaaaaaaatagtgaatttggtgtaaagttgctattttatggaaatgcctctaactttacattttcattccatctgtagatttttctatctttataaaatattggagttattttttaaggaaaaatagaaaagtagcttgtgaatagctcaaactaagcttacaaatcgcatgtaaaaaagcagaaaagttatttgtgtctgtttctattgcgtccttttttagcctttgtacctggacaggtgacagtaagggccaagcaggagaggcgggcgcggccttgtataaaataggagccagcgggactcttgtatctacctgttctctttttagtcagttacttcaaaaaaaagaaaaagcaaaaacaaaaaaacaaaagctgtacattttaacataaaataaattatgatgagccatttctagcctctcgtgtcctgtcatgttatgattgatggagaatgaccagctgagctgtgtcatgtgtcacatttcagaacacatacacgatgggggaaataaattatttagtgtaaattgaagttatgagattttttttttctgatttgttttgactttgggggaggggttggcaataagtatgaatgagtactatctaataaaaccatcacctataccaaatacctatttaataaattaatttataatggattttaatgcttttccatgaaagttgactttatgctggtgcataccttctgtatgccaatcattgtctttaaataaagtgagtttggttttttctttttgactttgatcttcattttgcccagagctcccacatagataatccatttgcttcctttgtgccaagcacgtgtaaagccccagaggcctggtaccacactagcaagctgcttgcttttttttttttaaagacaagtcacaagcttctgactcatggtggtatgtctcaagattcaagtcttttccaaagtgtggaggttttactctgttgtgaatgattgtatgttttctttagtgtttatagtaacacacacaacatgaatgcttatacacattccatggcattcagagaaagttttgactgtgagttaaaatatttgcttacttgagcaacaaatttagaagtaaattcttggcttgttacctgtatgcgtttggctcactaagtttgcaaggcatctaagcaggcgcttgaaactctgcaggtcaaaccgtccataacttggcctcaagcaggcagagcagtgcatccacaccagcgcaaaaggccaccccggtgctcttgcccttgcttgctttctatgagtgtacggtggggttaacatccacattttacctttgagccatctgctcccaacaagccagtggagtaatctctcaaatggatgagggaggcttcaaagaaggcaaagcgagagcaaaatgtaattttgagagaaagaaagcatgctgtccgtcttctgagcagcagatgatgctgtgccgtttgtctggattgattgctagagcagatgggagtggctgagggtcccagcgctgcacatctggcaggaagctgttgtgtgtctaggaaccctactgaaaccccctcctccactttttatgtgctaatttagtatcttgtgtctttgggggtataggcactcccatttccctttgacagtagcctgtcaatcaatcagacctttgccctcttgcttgtttcacagtccaagggagcttatggatcaagtgctagtagctgttccacacctgccagatcagcacagtggttccttgtgacactgggagatggcttagatctgtcataactggacatgactgcttttagactggaatcctctgatagccctcatctttaaaaccagcaatatgttctctcctttgtaagagtgatcatctgatgccaacggcacttaaatagctcacatggtgcctacccaggtatgcaggccttgcttgccaacatactgttagaaatagtgacccagactgcctttgtcagcactccgcccccataaactacacacactgcccaggagtgggaggaacacaacaaagttaattgcccccaactcacccagctacaaattgtaaagctgcaatctatccagatgaccggaatcagctctcctaaacacgagtctgaaatggcccgaacttgtcacgtctctgccataaaatctgtactgctcagtgaatgcgggatcctttgttggaggactcgaacccagatgcagcctcctgccatctttctggggtggctttcctgtgtcttcctcctttacccactgatacccagaacgttatttccctctggtcttgagcatttcttccgcctcaagattccaagtcaaatttctagaatcttctgccccctcaaggctgtgtgcaccaagtgccagctcccccgtgtgttctcaggttccctctttcctactgaggaagagagctatggattatttcttaaaggttttgtttttatattaagtataggagtgttttgcctgcactgtatgtgtgtccctggtacccatggaagccagaagagactttgggtcccctggaactggagttgcaggcagttgtgagccaccgtgtgtgtgctgggaaccaaacctgggtgttcttcaccactgagtcaactctccagcataggtcaggaattcaaaaccagcctgggctgctcaggcagtgagaggctttctcagaccctcctagcaataaaggtttctcagtgagaaatgagctgcttgggattttttttctatcaaaggtggctaacccaccaagagccaatattccctaggtcacccccaccttgtaaaactttttttcaaatcttttcatctcccctgctctgtaaaactttgaagtaaaggccttggctcttgccggtttcctctttccttcatttccttctctatgctttccaaattagccaggctagggtagactgtgagattttgaacctcagccagtggagcagccaagctcccccttgcgttaaggataaaaggcaggccagcttggccctctgtgtgcttaccagccccatttggcttgagcacgccttattttacagtaagaagtggccttccccggttaacttcgagtttatttgagagcacaagagaaagcaggttccttcccaacaccccactaacttgtctgaggtggcctctccccaccatttcatctcccgtatcccacactgcattttattaccatctgcactttgtaatttgcttaatcggttttagaatgtactataaatctcaataatgctttttaaccaaacgaaaacgttgcttatgaagtctttaaacactaaactttctgttcctccattctcctacttctaaattccaggagtcagcaggaccagacagctaacactaggttctctgcttcaaaaggactccactccagggaaaggggggatgtggtatgaggtacggggacagtggctccagaaaatcctgagtgggactatgtatgttctatcctacatgtgcgttcaccttcagcgagtatgtcatgaaaatagaaatgctgacttgtctggatactgaatagatgagaccaacagagctgaggtcaaaaggagccagcaggatgctctgatgaaacgcctaagtaggaacgactttgaccctgggttcctaccccaggagcccttggctcataggacaccaagtgtgggtcatcatggagtccatctgctggcctctaccactccagtgttctctccctcagaaccatgagagccctgctttgtccagccaagcacctggcccaatgagcactgtctccagtcttgctgcctgacaagagcaggtgactcggtgtgttggcggtacagctttgcctgttgccttcgcaacgttgtggcaatgttttggttttttaaacttattaggaaaccaatattgtaactgttaagtgagtctctggtaatctcccttacctatgttaagagaggacccagccttctcctgaactaagggcacccagagcatcctcagaattcctggaaaccaacctgtccacaaggtcccaagctacaggtggcatgaaagtaaaacagcttccccaggagtcacagtgacctggatgactttacccagctgccctggactccagcaccctacagtaagaacatgtcttggattttttagttcacactgaagacatgggcccttcctatccttctccagcaggcattagacacacacacacacacactttctccaggacgctgtcgttcatgatgctccactgctggtgtcctctctcagcagcctctctctaggttccatcttctcagggctgctggttctggaagcccacatgcggggttgtgctgctgctgctgctgctgctgctttctcaagagtgaagaatgaccatcaggtgccagcttaactcagctcatnnnnnnnnnnnnnnnnnnnnaaccacacatctgcggtgtgagtaaaaaaaaacaaacctccctgctacccttactgaaggcaaaggagtattctggtcccctaaaactaagtgccctgcctctccttttctcccaaattgtgaggttacactcttccctgtctaaatttaccacaacccacttggatgctggcagctctggctatggcgatgcaaggaaaggcatttctgttcagaggctcaggacaccatgcctacccctgccaggtgcctgcgcacatgtacatggactgcactgaataagaaatgtgattctgtccaggcttcctcccaagtcctaaggcctgtcctgtaacacagcttaccaggcaaatttctgtggttgaaaaaaaaaatcaagctctatttttttatctttttataataacatgatttttccctttcagagccaagcatttaatcacaacacagtacccacacattaaaacaaaacaaaaaacagcccaaacaaaggaaacctttttttgcttccaacttaaagacaggagattgtggagagcggtaccttttccttacccagatccccctgcagctgacttggcctaccatgaggcaaagaactagactggaggagacagcgggcatcctccctgctgcgcccagcctttggtttcactgtctcatctccctgcccaccaaagcctccttgcagacgtgcttcagccttctgctctgggtgccagggtctctgatcctctctgaggaggccccctacagccctaggtcactgtcccctggcccggcctgtcgccgctgcttcaccagctgcttgtccagctctcggagttgcttcaagaagccccggttgggcaggacacagcggttcttagccacttgttgaatggcgtccaccaaagtcatgttcttgtggatcatcaggtaggccaggaccagagttgctgaccgacttcggcccatggcacagtgaaccaggatcttacctgcaggtggaggagacaggaaagaaagccagtgctgaacgggatggggttcctcaacccacatttactctgtcacccacagtatgacttgggccacagctccccatcagcaaaatggggacacagtttcttggctctttctttctttttctttttcttttgtttgtttgtttttgtttttgagacagggtttctctgtatagccctggctgtcctggaactcactttgtagaccaggctggcctccaactcagaaatccgcctgcctcccgagtgctgggattaaaggcttgtgccaccacgccagctctcttggctctttcataggcgtgttgggaaggcagtttctgtacaccgcacttgtttgctgatgatcacgtgataggattggtagcaggcagacgctacaactcttgcttggtaagagaaggcattaaaacatctgtgagatggcccaactccatgcctcagagagtggcctcctggaagcgattgactgatggttttaatgtttattcagtcatgtttagcagggttcaaatgtcaaagcataccccaggagactgactgggtgacacacacacatccctcccaccgggttccttgaccctcaagagcaacaggtgtccccaacccttcatctcctcttccagagaagactctgcctagaagagtctcccatttactgtacttcatgccggcctcctaccctcccctgtcctccctctctccccctccctcccttttgcttctactgtggatagaaaccagggtctcacccctgccagacaggcactgaactacactcgcagcctttcaaaacccatttctatatcttgtttatttcattaacagtttacatttgaggtctctacacctcagaatataaatagttctcttttctttctttcttaagcatcctcccaccccatgctgggaataaaacccaagaccttacacatggatggcaaacacatcctcaagatacatccccagcaagaaattattttcaaagcatatgccttccttttatttctttttgatgctggggaaccaaatccaaggccttgtatgtgctcaatacccattatttcactgacctagacccctggcccttgaaagtatatattttgaaactactggtgtgtgtgtgtgtgtgtgtgtgtgtgtgtgtgtgtgtgtgtacatggacagagtttccctgtgtaacccaggatgttctcaaactcatctcaacatcctcctgccttagtccctcaagtgccaggattaaacaatttaaacagaatgcatcaccacaccctgctagtagaacctgtaagcaattgactcttttgacagtgttaggatacaatctgacttagtccttgtcacatacacaaagacaatggtgccttagtatgaacaatgtcacatgcatcaaatatacaaataatcattgcttacactggggagggggcaggcgattgattcccttaaaaatgatgtacaagcaaccaggtccctcaggcctccacttggtggcgctctagagcccacccaggacacccgttggccctgtctcatttcagctttgacttaaaccttgttatcattgtccctgccttgcagatggagagacaggttcaggaggtgcaatttcaatttcttgccagaggtcacccacaatactaatgccagaagtatcttaatgcaaaactgtgttnnnnnnnnnnnnnnnnnnnnnnnnnnnnnnnnnnnnnnnnnnnnnnnnnnnnnnnnnnnnnnnnnnnnnnnnnnnnnnnnnnnnnnnnnnnnnnnnnnnnnnnnnnnnnnnnnnnnnnnnnnnnnnnnnnnnnnnnnnnnnnnnnnnnnnnnnnnnnnnnnnnnnnnnnnnnnnnnnnnnnnnnnnnnnnnnnnnnnnnnnnnnnnnnnnnnnnnnnnnnnnnnnnnnnnnnnnnnnnnnnnnnnnnnnnnnnnnnnnnnnnnnnnnnnnnnnnnnnnnnnnnnnnnnnnnnnnnnnnnnnnnnnnnnnnnnnnnnnnnnnnnnnnnnnnnnnnnnnnnnnnnnnnnnnnnnnnnnnnnnnnnnnnnnnnnnnnnnnnnnnnnnnnnnnnnnnnnnnnnnnnnnnnnnnnnnnnnnnnnnnnnnnnnnnnnnnnnnnnnnnnnnnnnnnnnnnnnnnnnnnnnnnnnnnnnnnnnnnnnnnnnnnnnnnnnnnnnnnnnnnnnnnnnnnnnnnnnnnnnnnnnnnnnnnnnnnnnnnnnnnnnnnnnnnnnnnnnnnnnnnnnnnnnnnnnnnnnnnnnnnnnnnnnnnnnnnnnnnnnnnnnnnnnnnnnnnnnnnnnnnnnnnnnnnnnnnnnnnnnnnnnnnnnnnnnnnnnnnnnnnnnnnnnnnnnnnnnnnnnnnnnnnnnnnnnnnnnnnnnnnnnnnnnnnnnnnnnnnnnnnnnnnnnnnnnnnnnnnnnnnnnnnnnnnnnnnnnnnnnnnnnnnnnnnnnnnnnnnnnnnnnnnnnnnnnnnnnnnnnnnnnnnnnnnnnnnnnnnnnnnnnnnnnnnnnnnnnnnnnnnnnnnnnnnnnnnnnnnnnnnnnnnnnnnnnnnnnnnnnnnnnnnnnnnnnnnnnnnnnnnnnnnnnnnnnnnnnnnnnnnnnnnnnnnnnnnnnnnnnnnnnnnnnnnnnnnnnnnnnnnnnnnnnnnnnnnnnnnnnnnnnnnnnnnnnnnnnnnnnnnnnnnnnnnnnnnnnnnnnnnnnnnnnnnnnnnnnnnnnnnnnnnnnnnnnnnnnnnnnnnnnnnnnnnnnnnnnnnnnnnnnnnnnnnnnnnnnnnnnnnnnnnnnnnnnnnnnnnnnnnnnnnnnnnnnnnnnnnnnnnnnnnnnnnnnnnnnnnnnnnnnnnnnnnnnnnnnnnnnnnnnnnnnnnnnnnnnnnnnnnnnnnnnnnnnnnnnnnnnnnnnnnnnnnnnnnnnnnnnnnnnnnnnnnnnnnnnnnnnnnnnnnnnnnnnnnnnnnnnnnnnnnnnnnnnnnnnnnnnnnnnnnnnnnnnnnnnnnnnnnnnnnnnnnnnnnnnnnnnnnnnnnnnnnnnnnnnnnnnnnnnnnnnnnnnnnnnnnnnnnnnnnnnnnnnnnnnnnnnnnnnnnnnnnnnnnnnnnnnnnnnnnnnnnnnnnnnnnnnnnnnnnnnnnnnnnnnnnnnnnnnnnnnnnnnnnnnnnnnnnnnnnnnnnnnnnnnnnnnnnnnnnnnnnnnnnnnnnnnnnnnnnnnnnnnnnnnnnnnnnnnnnnnnnnnnnnnnnnnnnnnnnnnnnnnnnnnnnnnnnnnnnnnnnnnnnnnnnnnnnnnnnnnnnnnnnnnnnnnnnnnnnnnnnnnnnnnnnnnnnnnnnnnnnnnnnnnnnnnnnnnnnnnnnnnnnnnnnnnnnnnnnnnnnnnnnnnnnnnnnnnnnnnnnnnnnnnnnnnnnnnnnnnnnnnnnnnnnnnnnnnnnnnnnnnnnnnnnnnnnnnnnnnnnnnnnnnnnnnnnnnnnnnnnnnnnnnnnnnnnnnnnnnnnnnnnnnnnnnnnnnnnnnnnnnnnnnnnnnnnnnnnnnnnnnnnnnnnnnnnnnnnnnnnnnnnnnnnnnnnnnnnnnnnnnnnnnnnnnnnnnnnnnnnnnnnnnnnnnnnnnnnnnnnnnnnnnnnnnnnnnnnnnnnnnnnnnnnnnnnnnnnnnnnnnnnnnnnnnnnnnnnnnnnnnnnnnnnnnnnnnnnnnnnnnnnnnnnnnnnnnnnnnnnnnnnnnnnnnnnnnnnnnnnnnnnnnnnnnnnnnnnnnnnnnnnnnnnnnnnnnnnnnnnnnnnnnnnnnnnnnnnnnnnnnnnnnnnnnnnnnnnnnnnnnnnnnnnnnnnnnnnnnnnnnnnnnnnnnnnnnnnnnnnnnnnnnnnnnnnnnnnnnnnnnnnnnnnnnnnnnnnnnnnnnnnnnnnnnnnnnnnnnnnnnnnnnnnnnnnnnnnnnnnnnnnnnnnnnnnnnnnnnnnnnnnnnnnnnnnnnnnnnnnnnnnnnnnnnnnnnnnnnnnnnnnnnnnnnnnnnnnnnnnnnnnnnnnnnnnnnnnnnnnnnnnnnnnnnnnnnnnnnnnnnnnnnnnnnnnnnnnnnnnnnnnnnnnnnnnnnnnnnnnnnnnnnnnnnnnnnnnnnnnnnnnnnnnnnnnnnnnnnnnnnnnnnnnnnnnnnnnnnnnnnnnnnnnnnnnnnnnnnnnnnnnnnnnnnnnnnnnnnnnnnnnnnnnnnnnnnnnnnnnnnnnnnnnnnnnnnnnnnnnnnnnnnnnnnnnnnnnnnnnnnnnnnnnnnnnnnnnnnnnnnnnnnnnnnnnnnnnnnnnnnnnnnnnnnnnnnnnnnnnnnnnnnnnnnnnnnnnnnnnnnnnnnnnnnnnnnnnnnnnnnnnnnnnnnnnnnnnnnnnnnnnnnnnnnnnnnnnnnnnnnnnnnnnnnnnnnnnnnnnnnnnnnnnnnnnnnnnnnnnnnnnnnnnnnnnnnnnnnnnnnnnnnnnnnnnnnnnnnnnnnnnnnnnnnnnnnnnnnnnnnnnnnnnnnnnnnnnnnnnnnnnnnnnnnnnnnnnnnnnnnnnnnnnnnnnnnnnnnnnnnnnnnnnnnnnnnnnnnnnnnnnnnnnnnnnnnnnnnnnnnnnnnnnnnnnnnnnnnnnnnnnnnnnnnnnnnnnnnnnnnnnnnnnnnnnnnnnnnnnnnnnnnnnnnnnnnnnnnnnnnnnnnnnnnnnnnnnnnnnnnnnnnnnnnnnnnnnnnnnnnnnnnnnnnnnnnnnnnnnnnnnnnnnnnnnnnnnnnnnnnnnnnnnnnnnnnnnnnnnnnnnnnnnnnnnnnnnnnnnnnnnnnnnnnnnnnnnnnnnnnnnnnnnnnnnnnnnnnnnnnnnnnnnnnnnnnnnnnnnnnnnnnnnnnnnnnnnnnnnnnnnnnnnnnnnnnnnnnnnnnnnnnnnnnnnnnnnnnnnnnnnnnnnnnnnnnnnnnnnnnnnnnnnnnnnnnnnnnnnnnnnnnnnnnnnnnnnnnnnnnnnnnn

SEQ ID NO: 20 - DNA, 6909 bp, Mus musculus
ggcaaaggacaggcggaggctgaggaaggcagcggggagacccggtctgcagcaacaaagggcagcaagcgattggccgggctggaggcgaggtcttggtttcctaaagatgtctttcacttgaagagtgcagtccttcccattggtgaactaagacaactctccacgttgcctggcagtcagtcctctctttaaggatggttgtccctatgctgttgcttcacatgggctgggatcctctgcccttgtgttgaattgtgactttggaatgtgcaggttgtgttaagtacaaggcgaatctctatgggtaacgtctgtgttggagaagccatttgtcaaccatggtaaaacttgcaaacccactttacacagagtggattcttgaagcagtgcagaaaatcaagaagcagaagcagcggccctcagaagagagaatctgccatgcggtcagcacatcccatgggttggacaagaaaacagtctcggaacagctggaacttagtgttcaggatggctccgttctcaaagtcaccaacaaaggccttgcttcatataaggacccagacaatcctgggcgtttttcatcggttaaaccgggcactttccccaagccaaccaaggggtccaaaggaccgccgtgtaatgatctacgcaatgtggattggaataaacttttaaagagagcaatcgaaggccttgaggagccaaacggctcctccttgaagaacattgagaagtatctgagaagccagagtgatcttacaggcaccaccaaccatccagcctttcagcagaggttgcggctaggggccaagcgtgctgtgaacaatgggaggttactgaaggaaggaccacagtacagggtcaatagtgggagctcagatggcaaaggggcgccccagtaccccagtgcttttccatcctcactcccgcctgtcagccttctaccccatgagaaagaccagccccgtgccgatcccattccaatatgtagcttctgtttggggactaaagagtcaaatcgtgaaaagaaaccagaagaactcctgtcttgtgcagattgtggcagtagtggacacccatcctgtctgaagttttgtcctgagttaaccgcaaatgtgaaggccttgaggtggcagtgcatcgagtgcaagacgtgcagcgcatgtcgagtccagggcaaaaatgcagataacatgcttttttgtgattcctgtgatagaggattccatatggagtgctgtgacccaccactttccagaatgccaaaagggatgtggatttgccaagtctgcagaccaaagaaaaagggaagaaaactacttcatgagaaagctgcacaaataaaacggcgatatgcaaaacccattggacgaccgaaaaataaattaaagcaacgattgttgtctgtaaccagtgatgaaggatccatgagtgcattcacaggaagggggtcacctgatactgatattaaaataagcatcaaacaagaaagtgcagatgtgagtctggtgggaaacaaggagctcgtgactgaagaggatctggacgtttttaagcaggcccaggaactgtcttgggagaaaatagagtgtgaaagtggagtggaagactgtggtcggtacccctcagtaatagagttcgggaaatacgagatccaaacctggtactcctcgccttacccacaggaatatgcaagattaccaaagctttacctgtgtgaattctgtcttaaatatatgaagagtaaaaatattttgctaagacactcaaagaagtgtggatggtttcatcctccggccaatgagatttaccgaaggaaagacctttcagtattcgaggttgatgggaatatgagtaaaatttattgccaaaacctttgcttgttagccaagctcttcctggaccacaaaacattgtattatgatgttgagccattccttttttatgtccttacaaaaaatgatgaaaaaggctgtcatctggttggatacttctccaaggaaaagctctgccagcagaagtataatgtgtcctgcataatgatcatgccccagcaccaaaggcaaggatttggacgctttctcattgatttcagctatttgctttctcgaagagaaggccaagcagggtctcccgaaaagccgctctctgacctgggccggctctcctacctggcctactggaaaagtgtcatcttggaatacctctaccgccaccacgagaggcacatcagcatcaaggccattagcagagccacaggcatgtgcccacatgacatcgccaccactctgcagcacctccacatgattgacaggagggatggcaggtttgtcatcattagaagggaaaagttgatattgggccacatggaaaagctgaagaactgttcccgacccaatgaacttgatccggagagtctaagatggaccccaatgttaatttctaatgctgtggtttctgaggaagagcgagaagctgagaaggaggctgaacgactaatggaacaagccagctgctgggagaaggaggagcaagagatcctgtcgtccagagttagcagtaggcaatcgtctgcaaaagtacaatcaaagaataagtacctgcactccccagagaggcggccagtggccggggagcgaggacagttgttagagctgtccaaagagagcagtgaggaagaggaggaggaggaggaggaagatgatgaggaagaggaggaggaggaagaggaggagagcattcagacatctccccctcggttgactaagccacagtcagtttccattaaaagaaagaggccttttgtagtaaagaagaaaaggggtcgtaaacgcaggaggatcaacagcagtgtcaccaccgagaccatttccgagacgacagaagtgctcaatgagcccttcgacaactcggatgaggagaggccaatgccgcagctggagcctacctgtgagatcccagtggaggagggcggcaggaagccagttctgaggaaagcattcccacatcagccagggaagaaaaggcagacagaggaagaggaaggggaagacaatcatttcttcaagaccgctgccctttgtagaaaagatgtagatgatgatgcacaacacttgaaagaaggcagcaaagacaatcctgagcctctaaagtgcagacaagtgtggccaaaaggagcgaagcgagggctctccaagtggaagcaaagcaaggagaggaagacgggcttcaagctgaacctgtacaccccaccagagacacccatggagccagaggaccaggtgacgatcgaagagcagaaggagctttcagaggacaagggcagccccgtggggatggaacgggaggtgacagagaccgtggatgccttgctgcctcaggaggggagcagaagggaagagacaggcatacccgtgagtccacataaatcaccaggtggaaaggtagatgaggaggacctcatcagaggtgaggaggagggagaggaagagggagaggaggagggagaacgagaagaacaggaagaggaagaagaagtaactacagaaaaagacctagatggtgctaaaagtaaagagaacccggagcctgagatctccatggaaaaggaagaccctgtgcatctgggtgaccatgaagaggacgaggatgaggaggaagagccatctcacaatgaggaccatgatgcagatgatgaagatgatggccacatggaggctgccaacatggagaggggagacctcccaagagaaaccttcaaagacgcactagagggccaggaggcttttttagacctgagcattcagccgagtcactcgaaccctgaagtcttgatgaactgcggtgttgatctcacaatgtcctgtaacagtgagccaaaggagcttgctggggacactggaactgcacctgagtctgacgcggagcccccggaagaacagacacagaagcaggaccaaaagaacagcgatggtgtggatgctgagctcgaagagggaggcccagccgctgtggaaattgactccgagaccgcccaggctgttcagtctttgacccaagaaaacagggagcacgatgacacctttccagattgtgctgagactcaagaggcctgtagaagcctgcagaactatacacacacagaccaaagtcctcaaattgccaccacgctggacgagtgccaacagtcagaccacagtagcccagtttcatctgtccattcccatcctggccagtcagttcgttctgtcaatagccccagtatccctgccctagagaatagctatgcccaaatcagccccgatcagactgccatcacagtgccacctctgcagaacatggagaccagtccaatgatggacgtcccgtcagtgtcagatcactcacagcaggtcgttgacagcggattcagtgacctgggcagtattgagagcacaacagagaactatgagaacccaagcagctatgactcaaccatgggaggcagtatctgtggaaacggctcttcccagaacagctgctcctacagcagtctcacctctagcaatctgacacagaacagctgtgctgtcacccagcagatgtccaacatcagtgggagctgcagcatgctgcagcagaccagcatcagctcccctccaacctgcagcgtcaagtctccccaaggctgtgtggtggagaggcctcccagtagcagccagcagctggctcagtgcagcatggccgccaatttcaccccacccatgcagctggctgacatccccgagaccagcaatgccaacattggcttatatgagcgaatgggtcaaagtgattttggggctgggcactacccacagccatctgccaccttcagccttgccaaactgcagcagttaactaatacacttattgatcattcattgccttacagccattccgctgctgtgacctcctatgcaaacagtgcctctttgtccacaccattaagtaacacagggcttgttcagctttcgcagtctccacactctgtccctggagggccccaagcacaagctaccatgaccccaccccctaacctgactcctcctcccatgaatctgccaccacctctcctgcagcggaacatggctgcatcaaatattggcatctcccacagccaaagactgcaaactcagattgccagcaagggccacgtctccatgagaaccaaggcggcatctctgtcaccagctgccgccacccatcagtcacaaatctatgggcgttcccagactgtagccatgcagggtcctgcacggactttaacgatgcaaagaggcatgaacatgagtgtgaacttgatgccagcgccagcctacaatgtcaactcggtgaacatgaacatgaacactctgaatgccatgaatgggtatagcatgtcccagccgatgatgaacagtggttaccacagcaaccacggctatatgaatcaaaccccccagtaccctatgcagatgcagatgggcatgatgggaagccagccatacgcccagcagccaatgcagaccccaccccacgctaacatgatgtacacggcccccggacaccacggctacatgaacacaggcatgtccaaacagtctctcaatgggtcctacatgagaaggtagacagcctggcagcccacccagcccactgggccccactattggattgatctgcacaaatacctttgaagagtacgatttcaaaaccagcattggtgtgaatgcaaaaacatttgttggcaccatttatttaaaaaaaaaaaagctgtatgcagcagaaagaaagccttatacaagttgtttttcttttttcctttttttcttttttggtacctttatttctgttacttttatataaaattctctgcaaaggaaggcctctcttaggactctagttggcagcggccacacgtcgtgcctgcttccattaacagtgtggatacaagcccctccccaaatcacctgttttaatactgaacctccagcttttctccttcctgtctactccatggaaatgcctttagcatttcaattactgtatattttgtttaaggtgacccttcagcatgccgctaatgtctttgttagtgacagtgcattttgtagtactgtacaagtgttgtgctaacggtaagccatttcttaagttttttgccttgattagggtaccctaatttgagggttaaaaaaaacaaaacaaaacaaagctctatttttgttaattataaaactgtaaagagctacagagctatccccgtctggttagtgaagggggtttatcgctaaatgtttggtgtaaagttgagaagacctttttccattttggtggcaggctcctttggggggaggcagctttctgttttataaatgcacacttctgtttattgaatgaagcatatctcagtgtttatctgtcaggttttgaagcatttcatatatgtccaaatacttggcaggatttaaaaaaaaatagtgaatttggtgtaaagttgctattttatggaaatgcctctaactttacattttcattccatctgtagatttttctatctttataaaatattggagttattttttaaggaaaaatagaaaagtagcttgtgaatagctcaaactaagcttacaaatcgcatgtaaaaaagcagaaaagttatttgtgtctgtttctattgcgtccttttttagcctttgtacctggacaggtgacagtaagggccaagcaggagaggcgggcgcggccttgtataaaataggagccagcgggactcttgtatctacctgttctctttttagtcagttacttcaaaaaaaagaaaaagcaaaaacaaaaaaacaaaagctgtacattttaacataaaataaattatgatgagccatttctaaaaaaaaaaaaaaaaaa

SEQ ID NO: 21 - DNA, 5292 bp, Mus musculus
atggtaaaacttgcaaacccactttacacagagtggattcttgaagcagtgcagaaaatcaagaagcagaagcagcggccctcagaagagagaatctgccatgcggtcagcacatcccatgggttggacaagaaaacagtctcggaacagctggaacttagtgttcaggatggctccgttctcaaagtcaccaacaaaggccttgcttcatataaggacccagacaatcctgggcgtttttcatcggttaaaccgggcactttccccaagccaaccaaggggtccaaaggaccgccgtgtaatgatctacgcaatgtggattggaataaacttttaaagagagcaatcgaaggccttgaggagccaaacggctcctccttgaagaacattgagaagtatctgagaagccagagtgatcttacaggcaccaccaaccatccagcctttcagcagaggttgcggctaggggccaagcgtgctgtgaacaatgggaggttactgaaggaaggaccacagtacagggtcaatagtgggagctcagatggcaaaggggcgccccagtaccccagtgcttttccatcctcactcccgcctgtcagccttctaccccatgagaaagaccagccccgtgccgatcccattccaatatgtagcttctgtttggggactaaagagtcaaatcgtgaaaagaaaccagaagaactcctgtcttgtgcagattgtggcagtagtggacacccatcctgtctgaagttttgtcctgagttaaccgcaaatgtgaaggccttgaggtggcagtgcatcgagtgcaagacgtgcagcgcatgtcgagtccagggcaaaaatgcagataacatgcttttttgtgattcctgtgatagaggattccatatggagtgctgtgacccaccactttccagaatgccaaaagggatgtggatttgccaagtctgcagaccaaagaaaaagggaagaaaactacttcatgagaaagctgcacaaataaaacggcgatatgcaaaacccattggacgaccgaaaaataaattaaagcaacgattgttgtctgtaaccagtgatgaaggatccatgagtgcattcacaggaagggggtcacctgatactgatattaaaataagcatcaaacaagaaagtgcagatgtgagtctggtgggaaacaaggagctcgtgactgaagaggatctggacgtttttaagcaggcccaggaactgtcttgggagaaaatagagtgtgaaagtggagtggaagactgtggtcggtacccctcagtaatagagttcgggaaatacgagatccaaacctggtactcctcgccttacccacaggaatatgcaagattaccaaagctttacctgtgtgaattctgtcttaaatatatgaagagtaaaaatattttgctaagacactcaaagaagtgtggatggtttcatcctccggccaatgagatttaccgaaggaaagacctttcagtattcgaggttgatgggaatatgagtaaaatttattgccaaaacctttgcttgttagccaagctcttcctggaccacaaaacattgtattatgatgttgagccattccttttttatgtccttacaaaaaatgatgaaaaaggctgtcatctggttggatacttctccaaggaaaagctctgccagcagaagtataatgtgtcctgcataatgatcatgccccagcaccaaaggcaaggatttggacgctttctcattgatttcagctatttgctttctcgaagagaaggccaagcagggtctcccgaaaagccgctctctgacctgggccggctctcctacctggcctactggaaaagtgtcatcttggaatacctctaccgccaccacgagaggcacatcagcatcaaggccattagcagagccacaggcatgtgcccacatgacatcgccaccactctgcagcacctccacatgattgacaggagggatggcaggtttgtcatcattagaagggaaaagttgatattgggccacatggaaaagctgaagaactgttcccgacccaatgaacttgatccggagagtctaagatggaccccaatgttaatttctaatgctgtggtttctgaggaagagcgagaagctgagaaggaggctgaacgactaatggaacaagccagctgctgggagaaggaggagcaagagatcctgtcgtccagagttagcagtaggcaatcgtctgcaaaagtacaatcaaagaataagtacctgcactccccagagaggcggccagtggccggggagcgaggacagttgttagagctgtccaaagagagcagtgaggaagaggaggaggaggaggaggaagatgatgaggaagaggaggaggaggaagaggaggagagcattcagacatctccccctcggttgactaagccacagtcagtttccattaaaagaaagaggccttttgtagtaaagaagaaaaggggtcgtaaacgcaggaggatcaacagcagtgtcaccaccgagaccatttccgagacgacagaagtgctcaatgagcccttcgacaactcggatgaggagaggccaatgccgcagctggagcctacctgtgagatcccagtggaggagggcggcaggaagccagttctgaggaaagcattcccacatcagccagggaagaaaaggcagacagaggaagaggaaggggaagacaatcatttcttcaagaccgctgccctttgtagaaaagatgtagatgatgatgcacaacacttgaaagaaggcagcaaagacaatcctgagcctctaaagtgcagacaagtgtggccaaaaggagcgaagcgagggctctccaagtggaagcaaagcaaggagaggaagacgggcttcaagctgaacctgtacaccccaccagagacacccatggagccagaggaccaggtgacgatcgaagagcagaaggagctttcagaggacaagggcagccccgtggggatggaacgggaggtgacagagaccgtggatgccttgctgcctcaggaggggagcagaagggaagagacaggcatacccgtgagtccacataaatcaccaggtggaaaggtagatgaggaggacctcatcagaggtgaggaggagggagaggaagagggagaggaggagggagaacgagaagaacaggaagaggaagaagaagtaactacagaaaaagacctagatggtgctaaaagtaaagagaacccggagcctgagatctccatggaaaaggaagaccctgtgcatctgggtgaccatgaagaggacgaggatgaggaggaagagccatctcacaatgaggaccatgatgcagatgatgaagatgatggccacatggaggctgccaacatggagaggggagacctcccaagagaaaccttcaaagacgcactagagggccaggaggcttttttagacctgagcattcagccgagtcactcgaaccctgaagtcttgatgaactgcggtgttgatctcacaatgtcctgtaacagtgagccaaaggagcttgctggggacactggaactgcacctgagtctgacgcggagcccccggaagaacagacacagaagcaggaccaaaagaacagcgatggtgtggatgctgagctcgaagagggaggcccagccgctgtggaaattgactccgagaccgcccaggctgttcagtctttgacccaagaaaacagggagcacgatgacacctttccagattgtgctgagactcaagaggcctgtagaagcctgcagaactatacacacacagaccaaagtcctcaaattgccaccacgctggacgagtgccaacagtcagaccacagtagcccagtttcatctgtccattcccatcctggccagtcagttcgttctgtcaatagccccagtatccctgccctagagaatagctatgcccaaatcagccccgatcagactgccatcacagtgccacctctgcagaacatggagaccagtccaatgatggacgtcccgtcagtgtcagatcactcacagcaggtcgttgacagcggattcagtgacctgggcagtattgagagcacaacagagaactatgagaacccaagcagctatgactcaaccatgggaggcagtatctgtggaaacggctcttcccagaacagctgctcctacagcagtctcacctctagcaatctgacacagaacagctgtgctgtcacccagcagatgtccaacatcagtgggagctgcagcatgctgcagcagaccagcatcagctcccctccaacctgcagcgtcaagtctccccaaggctgtgtggtggagaggcctcccagtagcagccagcagctggctcagtgcagcatggccgccaatttcaccccacccatgcagctggctgacatccccgagaccagcaatgccaacattggcttatatgagcgaatgggtcaaagtgattttggggctgggcactacccacagccatctgccaccttcagccttgccaaactgcagcagttaactaatacacttattgatcattcattgccttacagccattccgctgctgtgacctcctatgcaaacagtgcctctttgtccacaccattaagtaacacagggcttgttcagctttcgcagtctccacactctgtccctggagggccccaagcacaagctaccatgaccccaccccctaacctgactcctcctcccatgaatctgccaccacctctcctgcagcggaacatggctgcatcaaatattggcatctcccacagccaaagactgcaaactcagattgccagcaagggccacgtctccatgagaaccaaggcggcatctctgtcaccagctgccgccacccatcagtcacaaatctatgggcgttcccagactgtagccatgcagggtcctgcacggactttaacgatgcaaagaggcatgaacatgagtgtgaacttgatgccagcgccagcctacaatgtcaactcggtgaacatgaacatgaacactctgaatgccatgaatgggtatagcatgtcccagccgatgatgaacagtggttaccacagcaaccacggctatatgaatcaaaccccccagtaccctatgcagatgcagatgggcatgatgggaagccagccatacgcccagcagccaatgcagaccccaccccacgctaacatgatgtacacggcccccggacaccacggctacatgaacacaggcatgtccaaacagtctctcaatgggtcctacatgagaaggtag

SEQ ID NO: 22 - DNA, 96594 bp, Homo sapiens
  misc_feature (659)..(1103): "n" at positions 659 through 1103 can be any base.
  misc_feature (13097)..(13318): "n" at positions 13097 through 13318 can be any base.
  misc_feature (25404)..(26575): "n" at positions 25404 through 26575 can be any base.
  misc_feature (66626)..(66645): "n" at positions 66626 through 66645 can be any base.
atgaaactctcaaaagggaacctgaatttttcagggtatctggatatctggtctgaagacatctgtaatacagttaacaaagaatcctgtaataatctctctttcaaaagaatcataaaaaagttaagatgtcagatttttctcagccaggtgcagtggctcatgcctgtaatcccactactttgggaggctacagtgaaaggatcccttgagccctggagttcaagacatgcctgggcaacatagggagacccccgcctctatttttatttatttatttagattttttggtatcttcattttatcttatttattttgttgagatagagttttgctcttgttgcccaggctggagtgcagcgacggtgctcttgtgtaacgcctgttgagctacagacaggaaaaggcccatcatggtttctgtgtacgcctatgctgtttctaatagaaaggacaaaatagagcccaaacatctgttgaccagttaagtttgttaatgaaaccaaattgcagctggtttatcacagatcaaaagtgaggcaaattatagaaaggatgtatgaacaaagctggtttctaaaaaatagtggctaaagaattctaaacccacttgtcaaattaacaaaaatccttcctggattttgcttaaaccactgatnnnnnnnnnnnnnnnnnnnnnnnnnnnnnnnnnnnnnnnnnnnnnnnnnnnnnnnnnnnnnnnnnnnnnnnnnnnnnnnnnnnnnnnnnnnnnnnnnnnnnnnnnnnnnnnnnnnnnnnnnnnnnnnnnnnnnnnnnnnnnnnnnnnnnnnnnnnnnnnnnnnnnnnnnnnnnnnnnnnnnnnnnnnnnnnnnnnnnnnnnnnnnnnnnnnnnnnnnnnnnnnnnnnnnnnnnnnnnnnnnnnnnnnnnnnnnnnnnnnnnnnnnnnnnnnnnnnnnnnnnnnnnnnnnnnnnnnnnnnnnnnnnnnnnnnnnnnnnnnnnnnnnnnnnnnnnnnnnnnnnnnnnnnnnnnnnnnnnnnnnnnnnnnnnnnnnnnnnnnnnnnnnnnnnnnnnnnnnnnnnnnnnnnnnnnnnnnnnnnnnnnnnnnnnnnnnnnnnnnnnnnnnatgacatgaaaaattaaacttgcaattaatataatatgtattagttgaaatgataatttttatggtgatttagcctcttagaaatccttggaaaacattattagcttatgaattgaaaactctctttgttaatgagtagtgggaaagaacttagtgttactctaaaaagatggggaattaaatattcagttcaaccagcgttttattgagtgcctgctctgggcttgctgctgagttaggctcataaatataagttgaacaagattgatgtttgcagagatgaaatactggttgcttttgttttttctttcaatcacccttccctccagagtagatggctactattgccagagtgattcaaacattcaacaggtttgtgtgtgtatgtgcatgcccttccctgtgcattatggtgtcacctgctcctgcagtggcttcctattcatctgtcacgttcacacaccacagcttggcttttttcacagccaactttatttctgttttttttttttttgagatggattctggctctgttgccaggctggagtgcagtggcgcgatctcggctcactgcatccaccacctccggggttcaagcaattcccctgcctcagccttccgagtagctgggaccacaggcatgcaccaccacgcctggctaattttttgtattttagtagagatggagtttcaccatgttggccaggatggtctcaatctcctgacctcgtgatctgcccgccttggcctcccaaagtgctaggattacaggtgtgagccactgtgcctggcctatttctgtttttcatttttaaattatatttgtcttttttagagacagagtcttgctctattgcctaggctggagagcagtggcacaatcatagcccactgtggcctcaacctcctgggcggctcaagagatcctcttgcctcggtctcccgagtagctgggtctacaggtgtacaccaccacagccacctaattttttatttttgtagaggtagggtcttgttgtgttgcctaggcttgtctcgagctcctggcctcaagtaatcctccttccttgacctcccaaagtgctgggattagaggcatgagccattgtgcctggcccaacttaatttctttatcccttttgagcatatacctgttctagtcaggcacatggacttggtgtcccttttgtttgacagctcattcttagcttctgttatttcactttgatttccttcattcattccccgatacatttatttagcaaataggcattgaaaccctcttatgatcaagttgtggtcttgggaaatcttagggtatacaaagatgaatcaagcatgaatcctgtttttaagaattttatagtctagtaggggtgacaaggttaatacacaagtaagcataatactaagtgggaaatgaatgtcaaaacagtaaaaaagctaaaagcttcctgttagacaaagatgtttggggcttttgagaagttgtttgcactgggccatgaaggatttgaatttgggcagagggacggtggggcacttatccaggctcagcattatctttcaaggttcagtttcagtcccatccatccaagagatgttcatccatcctccacgtggtttcagcaaggtagtatagtcacagttgtttccagacttcttccttctgtaatcagaggaacacttcctttaaagcgaatcttatggggaagacaaatatatgtaaaacagttaaagtggagctgcactgttgggttcaaggtgctgcaatggcccaaagtttaacccacaaggggtacctgaaggtaatacccgaagtaactccttgtcacagagatctaaagagcctagtttgaaaacctctggagagacagaaagagtttgggctttggcatctgaattaaaatccttcatgacttaatggctctgagatcttggctaagtcaagcctgttttccttttgtaaaaacaacaatgctaccttacagagttgttttaaagtttactgataatctatgtaaagtacctggaccacagtaggtgtcaggaaatggttggtattattattattattatagtttagtgctttgttatttctttttttttaaacaatttattgaggtgaaactcacataacataaaatgaaaaaaccattaaaaagtgaacaaatcagtggcatttagtacattcagtgttgtgtcaccactgccactatcaagttccaaaacatttttattgatcccaaataaaaccccttacccattaagcagtttctctagatatgtccctgagactccaccaatctgtgttttgtctatggatttatctattctggatgtctcatatgaatgaaattatatgatgtgtggccttttgtgtctggcttctttcacagcataacgtgtttgaggtccatctacattgtagtagcatgtatcgaaacttcattgctttttatagttgtatagtattctagtgtatggatataccacagtttatctgttcatctgttgatggacatttgggctgtttacaccttttggctactgtgaatagttttgttatgaacatgggtgtacgtgtacttatttgagtatctgttctcaattcttttgagtctatacctagaaatggaattacagaaccatatggtaattctgtgtttaactttttgaggaaccgccaaacagtgctttgctatttcttaattgcttcttatatgttctgtctctagctttgctttgtattccccatagtacctaccacagggctgcatgcagggagcatcagctcgctaaatatttgttggtttttctttgattagtatttataacctcacctcccagttcacatgttttgggcctgaagcattgatttcagaggaaatagatgcatccaggatttgaaagataagaaatatcaccatatggatggcgtttcatgttgtcagacaacagatatttgttaaccaaggacactattttgagcaactctgccaataacctgagctgggtgctgatagaagaaaaataagtcaaggtcccttcccctaaacagttctgttctgtttcggaagatactgcttagatttgtggatgctcactcagttacacaatgggctttgaaaaaatccaggttttccaacagtgatccctttggggaaaaaaaagaaagaaaaagccaggacttatgaaagtaaaatagttaaaaataactgttagcaagtaaaactcaggatgacaaaagtgtaaactctattattaatctttgtttttttctaccactgttttttgcctcatccataatctcatgacttgagtgttatgacattgattttgaaacaacacacacagctttagtaaaagcttagaggaggcctcgcataatacttatgatccaggatattttgactcttcttatgctgacatgaatatttctgaatagtgttgatgtttatgtaataccagtgaagctaaaagctcagtgctggactaagcatttctctagatatgtttagaatatttgtaatgaatgatgtaaatagtgttatattataagaccgtatgatacaaccatataatttactgatattttgtagttaaaaataaaatgattcacaaccttagaaaatagaataatttaatttgatgtagcacaaatccccagaattaatttaggatgatttgctacctttttgatagccttttagtccaaccttcaagtttttatagaaaaaaaatgaaaagagaataatgattttagggttttcgcttgtgatagaatgtcctatctacatgtgaagcaaatccccatgctctgaaaaagagaaatagtgtggataattccaaatcaggaaaaaaaaaatcatttctatttggcttttgaatgaattatgcatttttttttcctgtggatttgtctttccagttagatactgcttaggctaaaatgaaattggttttcaatctattctcttgcttatatgaatttacagtggggccagtgggatgttggaaacaaatcagcctaagattaaaaaatttgcggtggataatatacaaagtggataatatacatgtgtttagttgagaattggctacagataagagacttctgattttgttcctctcctagctgtgtattttttttttttttttgaacactgtgattctgcttgtagcaaagagctgctgagttacatctgcttctgcctaattaactctgttggttggtgtcagatgagagctaattttgagattaaatcgaggagtggggtgtgtgtcgtggctgggggaggggagaaggaggatccaaggttgcttgattgttttacgtaagatcaaaatgcagttattcacaattgttcttttaaatttattttttgcttttcaagtaaaaataatcactgctgtcctaaaatgtgacttgtgtcaatacatatttactattatgtaaactggtacgtttttcttgtaggtgagcttattggtcatatctgggtagtccattcagtacctaggtgcctggtggcctttgggacaaacagcgaatgctgcccaggaatgtgaatgctgaccttaaaacaacttttgactgtctttttttctgataaatgttatatctgtttggctatttgagtagtagtgggtttttgtttttgttttgtttttccatgatgagattttttcttaggaatctatcacaaacctgatttttaaaatttgaacaggtctgggcttagggatgaaatttacttctataggcacttggctgggtccttggggcttcattttctgtctcaagtttcatatttataagaatccttcagtggtctaaaagaattattatatcaccaaatgtagtataataactcattggagctgtttgtcttgaatggttgtggagatacacggatggttgctgaatttaaggatgtccttatgtccaaatgaacatttccttttttcttttggcagatttgcctgaagacctggataatctccatttttgtcatggactgttaaaacgtttgaagttccaattctggtactttcccttattttattacatttttaaggtataaaatgacaatcttattgaaatgtgttggtaatggatataaacaattgttttatggatataaatgattgtgggtaaagatttgtgggctgggtgcagtggctcacgcctgtaatcccagcactttgggaggccgaagtgggcggatcacgagatcaggagtttgagtccagcctggccaacatggcaaaaccctgtctctactaaaaattcaaaaattagctgggcgtggtggtgggcacctgtaatcccagctacttgggaggctgaggcaggagaattgcttgaatctgggcggtggagattgcagtgagccgagatcatgccattgcactccagcctgggcgacaagagcaagactctgtgcccccccaaaaaaaaaaaatgattgtggtaaaagcttgtcatgaaggtatattttaggtatctattagttatgaaacacattttttttttttttttgagatggagtttcgctcttgttgccgaggctggagtacaatggcgcaatctcgactcactgcaacctctgcctcctgggttcaagcgattctcctgccttagcctcctgagtagctgggattacaggcgcatgccaccatgcttggctaattttttgtatttttagtagagacggggtttcaccatgttggccaggctggtcttgaactcctgaccttgggtgatccacccgccttggcctcccaaagtgctgggattacgggtgtgagccaccacgcccggctatgcattttgttttaatgtacgttcgtttgcttgtgtaacaaaacacctaaaagcaacttggcaatattgggcacttttcctgtgacctcttctactttctgcagttgtattttgtgcaatcaaattaaattagttgtgattcatcctgaataaatgatgaaagattaaataattacttggatacagtgaaatatcttctaatgaaattttgcccgaaaccattttacttgggaaagatcaatttcctgttctaaactaactgacagagaatgattctgtgttctatcctgaaagtggttgcactgtgaaagccagtgatttcattcctaaacacactgtgttccaagtctaacatttttgtcaagggtttatataatgaaacaaaagtgagtacttattagatttgtagatgacatagatgacagaatcaagattcaaaacaatctttagcaggttggaagataggcttaaatcaacgagatgaaattgaacggtaataaacgttaaattgcagcatttcaatttgcagaaggaaaggggtggaaagactcaacttgacagcactttttgaaaaaagatctgggatttttagttggactgcatgctcaccatgaccacttgtgtggcaggggtattgaggaagttcctgtaatttgggttgcatttataattggataatgcctgaactgtcatattttaagatggccaatagccaaactagtgagcaaccaagagaaagtggtgctttgaaacaatgtgatatgtggaagggttaagaaactgggatatgagtggtctaagttatggctggaggtagcatggggttttgtcgttagtggttttcaaaaggtacttgtttttggacatttgaaggcctctcatactgaagaaatactaagaattgtcttgggatccttccagggaataggactagttaggaataggaatagggtcgaagttatggggtggcagatttttgcttctctgagcaagaaatttagctagagctgtgcaacagtggggtgagctgcctcaaaaagtgacaaattatcaatcactggaagtattttaaaaatgtaaagactcattgcccatctatttgggatattgggcagggatcttttattggataactagaggttggactggatgaccttcagccccaagtttctgaatctgaggggagaatgagtagagtgaatttacagcttactgatcacagggacaatcttgtttaaattgcctcctttaaggtggcattttgggttggcatttaaaactgtactgtttgaacaagtatagttcaatgacccagctgtttttcagcaacattccaggatctctgagagcaaatactatattcttcagtatgtctggctaaagtttttaaggaaagatattattttcttctcttaggtatagtctgtctaaataaataaccagagataactttaattttgtattttgttataaaaatttcaaagtatatagatgttgcatttgatgaaagtgataactatatattgaatattagataatgtgtttatttaatcctctcagtagtcctgtaagggatataccagtattgcctacaagtaaagtgatggaagcttaagttatccagggttcctccactggacattgtggtagggctggggttcagacccaggttggtctctttgcagaggcagaactagctagagcaggcagttgtggctcaggtgagaacagtgatggacttagttggattttagaattggctgggcacagtggcttacacctataatcctagcacttttgagaggccgaggtgggctgaggtcaggagtttgagaccagcctggccaaaatggcaaaactccatctctactaaaaatacaaacattagctgggtgtggtggcacattcctgtaatcccagccacttgggaggctgtgcaggagaatcgcttgaacccagaaggcagagattacagtgagctgagattgcgctattgcactccagcctgggtgacagagcgagactctatctcaaaaaaaaaaaattaataaaaaaaattaatgatgttcgaccctttaatctgttattgactcttcccttgggtgaattccatcttctcccgagcctcagtttacccacaaagttctgcagtttaagtgacaagttatatgtgagcacactctgtacagtttaaactataaaaagaattaagaagtggatgttatcattggacaccaagattagagctcaggtttggcccaattcccaggccaaggctctttctccttgtagcctctttgtagatgtactcaataccagattggagatctagggtggtttttgtatataccaagcatctctcagaacaaatgccactgtccacctggaatcagatttgtatatatcttctttgtactgagctgtttaatgagctaactgggtattaagataactagaatgctctactacttaaaggtgaagggttatgttactgtattattttcagttttccaatttgtgggttagagggtatcatagacctctgttaaagggatggggatgtgattccatagaagtagctagatgggaagtttttttacgtatgagacttgggaaatacaatacctagctgaaagctggattatttactcttttttttaagtttaagattttttgaaataagtttaatgtactttcatcagattttttatatcatagacttattctttgatgtgtattttatgtttatggcagacatatacctcaaaccactttcatataattttgttaatttcaataaatataattaaatgtataatttagatgtgattatgcctcataaatgacttcatatagagaagtgaaacattctaaaaacaatttcttctcagactgtgacccaatttcttgttgaaaaatatagtcactgtggctgtgttatgtaatacctgcctgtcattacttcttgtggtcattctgtgtctgaaaaagtcatgctaaagaatcttttagtttatttgtgtaagcttcattattaagagactttcccctctttttatcctttaaggtcttgatttcccagttaaagatgttcttcacccgaatgcagtctttcctgttggtaaaataagacaaccatcaacattgcctgtttgtctgcttttgaatctcttaaggatggatgtttgtaagatgttgcttaatacagtctggaatactctgtccatttgttgaattgtaaatgactttcaaatgtgcaagttctgttaaatacaaagagaacctctatgggtaacttttgtgttgaagaagtcatttgtcaaccatggtaaaacttgcaaacccactttatacagagtggattcttgaagctatacagaaaataaaaaagcaaaagcaaaggccctctgaagagagaatctgccatgcggtcagtacttcccatgggttggataagaagacagtctctgaacagctggaactcagtgttcaggatggctcagttctcaaagtcaccaacaaaggccttgcctcctataaggacccagacaaccctgggcgcttttcatcagttaaaccaggcacttttcctaagtcagccaaggggtctagaggatcatgtaatgatctccgcaatgtggattggaataaacttttaaggagagcaattgaaggacttgaggagccgaatggctcctccctgaagaacatagagaagtatctcagaagtcaaagtgatctcacaagcaccaccaacaacccagcctttcagcagcggctgcgactgggggccaaacgcgctgtgaataatgggaggttactgaaagacggaccgcagtacagggtcaattatgggagcttagatggcaaaggggcacctcagtatcccagtgcattcccatcctcgctcccacctgtcagccttctaccccatgagaaagaccaggtaagcgaaggagtaatgttcgtgcattctcactactgtccttttgtcttttacggtttcacttaagttttatgtggacaaaagttctgaataaagtttgataaaattgaatgttttgccttagagcaggcttttgtattttaaaatgtatatattgtactgcattgtgtggaggacttcctcactggttggccaagaatttaatggaagagtcatgtggtttgtttttaagctctaattgctaactggttggtgtctgaagggaccaggaaggataatattgatctttcttcatccaggcagggtcatatatatttcagaaatctacgaaaaggccatcgtatatttttctctttattactattttcaaagaagaatctacagacttcttattttactattattatttttttgagacagaatctagctctgtcgcctaggctggagtgcagtggcgcagtcttgactcactgcaacctctgcctcccaggtttaagcgattctcctgcctcagcctcccaagtagctgggattacaggcacctgctaccacacctggctaatttttgtatttttaatagagacaggacttcaccatcttggccaggctggtctcaagctcctgacctcaagtgatgcgcccgcctcggcctcccaaagcgctgggattagaggcgtgagccaccatgcccagctagacttcttattttaatggtgataatctatgcttttttttttgagatggagttttgctcttgttgcccaggctggagtgcagtggcacaatctcggctcactgcaacctctgcctcccgggttcaagtgattcttctgcctcagcctacctagtagctgggattacaggcacatgccaccatgcccagctaatttttgtatttttagtagagaccaggtttcaccatgttggccgggctagtctcgaactcctgacttcaggtgatccacccgctttggtctcccaaagtgttgggattacaggcgtgagacaccatgcctggctgataatctatgcatgtaagaagttattttaatacgtcacctaaatccctcatttcaataaaaagtcattttttattgtccacttctctgtgttgtaggtgaatgtttattttgtctcatacagtatctttttaaaatactctgatttcttgggccttatgttatttctatagtatttataaatatatggcagaattctccttacattactgctaccactttaagtttttggttgagtaagatttgtctttgtttcaaagctacagtatttacttcccaaactaaacacaaagtagagcagcagaaagttatttatagttcatgtctagttttggggtttattctctgtcttttgggtgagcagatatattgatatcagttaattttattaatacatgttataaaacattaatcattgttgatagaaaggtggttttggctgggcagggtggctcctgcctgtagtcccagcaccttgggaggccagggtgggaggatcacttgagcccaggagttcaagactagcctgggcaacatagtaagacccctgtctctacaaaaaaatcaaagaattagccaggcttggtgaagcacatgtgtagtcccagctacttgggaggctgaggtgggaggatcacttgagcatgggaggtagaggctgcagtgagccttgattgtactccagcctgggtgatagagtgagatcctgtcccaaagataaagaaaggaagaaagaaaaggtggttttggccaggcacagtggctcatgcctgtaatcccagcactttgggaggctgaggtgggccaattgcctgagtttgagaccagcctggccaacatggtgaaaccccatctctactaaatatacaaaaaaattaggcaggcgtggtggggggcacctgtagtcccagctatttgggaggctgaggcaggagaatcccttaaacccgggaggcagacgttgcagtgagctgagattgtgccactgcactccagcctgggtgacagagcgagactctgtctcaaaaaaaaaaaaaaaaaacaaaaaaaaaaagaaggaaagaaatggtggttttattcatggtttactgcagccttgaccttttgggatcaagtgttcctcccaagtaactgggaatacaggtgtatgccaccatgcccagctaagtttttaaattttttgtagagatggggttttnnnnnnnnnnnnnnnnnnnnnnnnnnnnnnnnnnnnnnnnnnnnnnnnnnnnnnnnnnnnnnnnnnnnnnnnnnnnnnnnnnnnnnnnnnnnnnnnnnnnnnnnnnnnnnnnnnnnnnnnnnnnnnnnnnnnnnnnnnnnnnnnnnnnnnnnnnnnnnnnnnnnnnnnnnnnnnnnnnnnnnnnnnnnnnnnnnnnnnnnnnnnnnnnnnnnnnnnnnnnnncatgagccactgtgcctggccaacatttatttgttaactatatttttattttgttagtcttctgccacatttatttgatccttaggtggttgttgtgtttgtgtaaccaacctctagttctctgtggcagaatgtgggcataaagaaagaagtaaagttatgaaattttcttcttaataacatttgtttaaaagaaaatacaaaaagccacttaaatcctaattcatatgtctgacacagccaaatcagggacctctgtttttaattaaatacatatgtatatatatatttttgttttgtttttttgttttttttgagatggagtcttgctctgtcaccaggctggagtacagtggcatgatcttggctcactgcagcctctgcctcccaggttcaagtgatttccttgccttaacttcccgagtagctgggactacaggagcgtgccaccatgcctggccaattttttgtattttagtagagacggggtttcaccatgttggccaggatggcctcaatctcctgacctcatggtccacctgccttagcctcccaaaatgctgggattacaggcgtgagccactgtgcccagccttaattaaatattttttataaaagcttatactgtgaagaaattccttaagggactatagagccatttcttgatggatttggatatctttgtttttaaaaatatgtacactaccctaaggtatgttaaggttttataatgaacaggtacgtggactaattcaggtagctttaggcaatttaatagtatgtttcaataattttgtgatccaggggatactttttacttgtgatggaagagtcagtacaaattttccacagtatcttctgatccttcgctttaaccttgcccgtcatttcttgccaaccttatcatatttttttcaggcagcatctgtacagaagtatttttagtctaaaggaaaattcatgtctgaaagtgtctaggattgagagcagagtaatttattgcttagcaggcaattgttactgctctttttatgatgctgatctttaaattgtttagttagcatcatgctataatgaggaaagctgagaaatgttttctagaatttttacttgatgaaatttggagactaattctattaagtaatcatttgattcttaaaaaacaaaaataaataaaaatcagtttaaacaaagttggcaacatgtttgtattctttaatgaaatagcatttttttccagctgggtgcagtggctcatgcctgtaatcccagcactttgggaggccgaggtgggtggatcacctgaggtcagcagttcaagaccagcctgaccaacatggagaaacctcgtctctattaaaaaaatacaaaagtagccgggcatggtggtgcatgcctgtaatcccagctgctggggaggctgaggcaggagaattgcttgaacttgggaggcagagattgcagtgagccgagattgcgccattgcattccagcctgggcaacaaaagcgaaactccatctcaaaaaaaaaaataaataaataaaatagcatttttccttaaaaaatgtgagaaaattacaacataatatattaccctttgaaattaaaagtgatttaatagtttaaaaccatgtaaactcgctaagtaaatttaatagaaattcttagcccgggatccacaaatgaacttgggtgggtatcccacaaatcctctgaaatagagtgtgaagtcatgtgtgtgtatccatgtttttctttttttttctttttctttttctttttttttttttttgagacatagtttcactcttgtcacccaggctggagtacaatggcacaatcatggcccactgcaacctctgtctcccaggttcaagtgactcttctgcctcagcctccctagtagctgggattacaggcgtgcgccaccatgcctggctaatttttgcattttcagtagagacggggtttcaccatgttggccaggctggtcttgaactcctgacctcaggtgatccacccacctcagcctcccaaagtgctgggattataggcatgagcctctgtgcctggcctccacatgtttttctatggctagggtctatagcaagcttgtccaacccatggcccatgggctagatgcggccctgaatggctttgaatgcagcccaacacaaattcgtaaactttcttaaaacataaagagatttttggcttgcggcgtggtggcacacgcctataatcccagctactcaggaggctgaggcacaagaattgtttgaacctgggaggcggaggttgcagttagctgagattgaggcactgcactccagcctgggcgacagagcaacacttcgtttcaacaacaacaacaagaacaacaacaacaacaacaacatttttttgtggtttttaatttttttttttttaagctcactagctattgttagtgtattttatatgtggccctagacaattcttcttccagtgtggcccagggaagccaaaagattggacactcctggtctacatcttttgtcaaaggcacccaaaatgcctagtagccattttaaaatagtttgagtttcttatactaaatcatagtatgctaattgtcgacctatgatgattcttcctttggctgctgaacttggattcatatgtagattgattgtactataatttcctatatataagactttttctaatatatttgaaaagattatcattgttcttgatgtgcttgaagtcataggatttgccttgcattgtgggaggaaatttatgatataagtgaaaacagttcagaaatggagtgatctcaattacaatctagtcaactaatgccttttttttgagacagagtgtcactgtgtcacccagtctggagtgcagtggcatgatcttggctccctgcaacctcagcatcccaggttcaaacaattcttgtgcctcagcctcccgagtagctgggattacaggtgtgtgccaccacactgggctaatttttgtattttagtagagatggggtttcattaatgttggccaggctggccttgaactcctggcctcaagtgatccgcctgccttggcctcccaaaatgctgggattatagacgtgagctactatgccccatgcctggcctaactaatgacttttttttttttgagatggaatctcactctgtcatccagactggagtacgctggtgccatctcagctcactgcaacctccgcctcccagttcaagtgattctcctgcatcagcctcccaagtagctgggattacaggcacgcaccaccaagcccggctaattttagtatttttagtagagacagggtttcaccatgttgaccaggctggtctcgaactcgtgatctcaagtgatccgcctgccttggcatctcaaagtgctaggtaggattacaggcttgtgagccaccgtgcctggccatgactttcaagaagctgtttattctggttacttttttgagcagttacattaaatgtaaaacaaaataaaaatagtaagaataataactaacgttttgtaagtgttaaatgctggcactattccaagtgctttacatttattatctccttgacttgtcacaataactgcaagggaggtagattattacccttattttacagatgaaaaaatgaggctgaaagcttaagtgatttgcccaaggtcactgatagagctagtgagtggtgaagccaagattctgacgagacagtctgacctcagagctctttaccactgggcagtacactggtcaacagtggtggctttttttttttttttgagacagagtctcgctctgtcgcccaggctggagtgcagtggcatgatctcgcctcactgcaagctccgccttccgggttcacgccattctcctgcctcagcctcctgagtagctgggactacaggcgcccaccaccacgcccggctaattttttgtatttttagtagagacggggtttcaccgtgttagccaggatggtctcaatctcctgacctcgtgatccacctgcctcggcctgtggtggctttttattaacagtaaaagtatctcttccagttcttcaaatgattagaagcagttttgccccaacaaatagatttccagcattttaaatttggtagatgcaatgagcttattatagtttttaaagtagatactatttataatattagcaatatggaaaggcagtagagaaagtagtaagtctgtgtctaattagattgaacatcatcatcattccgatgcatgactgctaggaggaatacaatgcaagttaaaatagaagggctccttcctttctgaaatgtaattgcacatcttctgatagtctggaattcaaattgggtattaccacactggcttcttagcataaattctttgtatttatttaagaaagctctcttcggtgaggtgatatggaaatgaattaaaccactgaagataaaactttatctttgacttggtgagggaactcctaaaggatagtattaatgtttctcattaaaagtagtaaagctcaattaggtcagattatgaggactttggaaagtcacatattctaagagagacttccattatcactgcgcactttgtagcattaagattccatttgaacatttgagctttagcatttttataaaatcagtttagttccatttaaaataaattccatagtatttcactttagtgagaatgtcttcataaaatttattaagtgtcaagtcttggtctgtttccagtgtagtacataatgtgggaattctcattctaggttggcatcgtaattggaaggtgggacactttcagtatcaagtagggcttctgatgttttttctgttgaagaaatatttgtattagaatcttacaaaaagccttcaaacataaacaaaattacaaaaacagtgatactgtcaataagaaaaaaatcaaaatgatttttttttttttggatacagagtcttgctctgttgcccaggccggagtgcagtggcgcaatctcggctcactgcagctgccgcctctcgggttcaagcgattctcctgcctcagcctcctgagtagttggggattacaggcatgtgccaccatgcccggctaatttttgtatttttagtagagacagggtttcaccatgttggtcaggctgataagaatgattttttttttttttttttggagatggagtcttgctatgttgccaggctggagtgcagtggcgcgatctcggctcactacaacctccgcctccctggttcaagcaattctcctgcctcagcctctggagtagctagactacagacgtgcaccaccacgcccagctaatttttgtatttttagtagaaacggggtttcaccatattggccaggatggtctcaatctcttgacctagtgatccacctgcctcggcctcccaaagtgctgggattacaggcatgagccactgtgtctggccacaaaatgatttttaaaaggagttcagatgatcagaaatggggttgaaagacaaacgtaggacccttgttatgtgtggtcttggcttattcagttgtttattctatttctcctgccccttttagagagatacgttgttagggtttttggcactgttattaatatgaaatatttctacaaatagaagataaatgtacatcctacagcagttgcttgagttgtttacacacatgaattagataagtttatttttagattttcttttcttctgttttctccattctgttttctcctcttcagtccccttaaccctgccctagagcagaccctcctcatctgttctgggacttttccaatagcctgtactttatgaaggactattcattagtccatattgttctttgatgtggcaggcttccagaagtctctcagccctaggggaattgttcatagtctcaggcaactctggatcttttttggcagaaatgtgtatattttttatctgctaattatagagcctgaatgtcctcctctctgttgaccttcttagttttcctttgaattggtatcctttgtgttgcagatgtcatctttcttgaagagtgcttgattatgtgtatttaactgaaaatcgaataaatctctaaatattgtaaaatatgctcttcaaaataacctgcattttggaattggtatggataaagtcagttttagaatcactaaagtcagacagaaacctattgtaatgtgaaagacgaggtggatcaaatacttgctgttccagggtcatggaaggaaaaaaattgcagttcatgttcttcttataattaagcttcagaagttcttcacaatagcagtgtctgaggactgcttttgtgagcaggtagtaccagttgttgagacattgttgagagagcacatgaattgtctcaaactagttagttgggtcaagggaaagataaaatgaagggtgaatgagtctttctattgtactctgaggcatgacagcgtgttccacttttgagcttttatcaagatgggacttgtctagacttctaatgaaatgggcttcaggtaaagtagaaacattatgtcaagaggatttttggttgttcaaatgaatgttaaacattcttttaactctttggatcttagatagatttgatagttgtgatacctttactgtatgtaacacatgatcctgtcctgaatgatcagcagctttcaggagttactcttgtattcccagctacatttgtgatactttcagtgctaagaaaatctatattctgtagctttgaagttatttaacagttaagtactatttgctggtttattctgattttgtcttaaatgacaaatattttattcatcctttctcttcaaacattatttaacaaatgtacgttttaatgtttctcaaaaatgaaggtctatattctttttatatgttttatctttgtatgttatttctttcatctttttttttttttttttttttctgagacagggtctcactctgttacccaggctggagtgcagtggtttgatcatggctcactgcagcctcgacctcccgggctcaagtgatccttgatcctcccacctcagcctcctgagtaactgggactacaggtgtgcaccaccttgtctggctaatttttttttttcttttttttgagacagtcttactctgttgcccaggctggagtgcagccgtgtaatcatggttcactgcagccttgaccttcccaggctcaaatgatccatcctcccacctcagccccccaagtagcttggactacaggcacacaccactacacccagctaatttttgtattttttgtagagatagggtttcgccacgttgcccaggctggtcttgaacgcctgagctcaagcagttcacacacctcggcctcccaaagtactggggttataggcgtgagccaccgtgctcagccttttatttttaatatataagaaatgccttttttttttttttttttttaatttgagatggagtcttgctgtcttgcccaggctggagtgtagtggcatggtctcggctcactgcaacctccgcctcccaggttaaagcaattctcctgtcttggcctcccgagtagctgggattacaggcatgtgccaccactcctggctaatttttttgtatttttagtagagacgggggtttcaccatattggccaggctggtctcgaactcctgaccttgtgatctgcccacctcggcctcccaaagtgctgggattagaggcatgccccaccacgcccagcccattgttttatcatgacagtagcaatgtgttttaattgtaaaattcttgactttttgttttgtttataaacttccttttcttggccctgtgccttaaactacagtagattaggtgaaactgttctctgatcacactagcatttaaaatatgaacctgaatcttctcaggtactttgatctctccaatctattaatgtttctgagtacataaacatcaattagctcaccaaattaaagttagcaaatgcgtcagccatgtaatttgcatgtgacattttgagttagcagggccaagagggaagtatgtttttgtgagtgggtgtgcttatctctctgtcttcaggtggtgatggaaagttgtacatgtaagagaaggagttgtggcagtggatatgtgaaatgctaactgtacatatgcctctgcttggggcagaagcactttaccagagaagtctccaacagttgcaaactacatattctttttccttatataagtgaatcttttaattagtgtaatattatgtagagtgtatgttttttctgtttttttttaatgaaaggtgatattttgataaatctgcaaaatgagcaatatagacaacattttagagtgaatgatactagatttaaactatgaggctggtctctgcaaagatacaaagtaaatactaatcactggtctaagcaaaatccaggaaggatttttgttaatttgacaagtgggtttagaattctttagccactattttttagaaaccagctttgttcatacatcctttctctaatttgcctcacttttgatctgtgataaaccagctgcaatttggtttcattaacaaacttaactggtcaacagatgttttggctctattttgtcctttctattagaaacagcataggcgtacacagaaaccatgctgggccttttcctgtctgtagctcgacaggcgttacagaagagcaacctaactttacttacaagttcaatttttcttcctcagtatttttattataggtatacaaacattgtagttttgtctcccccatcaagtcggtcttttgttgttaatcttccatctgttagtccagtatacacttctcaccctgctttttagcattgcaaaatcttagcatgcagggaaaaaggtactattgcaggagaggtaattgagatatcagcgactcttccacaattcaagggaaggagtggaactagcctggtgaatttagataatttcttccgtcttctttgatgtcagtgagctgccatatggagagcagtgaggcctgcaggaaggaggtgagccttggtctgggctgcctagggtgttcagagtgacatgggctgagagccagaggcagagcttgactgtttctgttagtagtttctgatgtgaccagccctgctttttgtccaaggtttccctgtcatgcttgccaccctatgggtatgatgaagtttaagaaacagatcataaacattatcttgggaaagagaaacataagaacatattaaaatctagtaataaggccattaaaagatgactcccatttgatatttgaccaacttgttttcaaaattagtattgtaaacacttctgtcttataacaaaacccagctttagctgttgagccttgagttgtgagtaaagcagcagaaaacaggatctgctagtggaagagtattggctgtttgaagaacatcagctgttccaggtagactcctggcagtgtgtgagcagacctgggaaaggcaggcatggagggagctaggaaaatacttctctcctaacctttataatttataaaattagagtatttcataaatattaaaagagtagtacagtaaacactctatttctttcacatagattcaccaattttaacattttgccacattctttctcttcctatatgtgtgtatatgtatatgtttttatacatgggtgtgcgtatatatacagcacatttatatattcacaattttgactaaactgttggaaactaaattacaaatattatatttcacccctaaatacttaataatatatcaaaaatgttctcttatatactatactattacgcaaaaaattcggcagtggaatgagtgttaactgacagtccatatttccccaaatggccccaaaatctcatttataacttttgactttttttgagatggagtctcgctctgttgcccaggctggggtgcagtggtatgatcttagctcactgcaacctccacctcccaggttcaagcaattctcttgcctcagcctcccgagcagctgggactacaggtgcgtgccaccatgcccggctaactttttttatttttagtagtgatggggtttcgccaggttggccaggctggtcttgaactcctgacatcaggtgatctacccgcctaggcctcccaaagtgctgggattaaaggtgtgagccactgcgcctggccaacttttgacttttcatccaggatccaaccaaagatcatatattgcatttggctgtcatgtcacctttaatagagaacagttttccctcctttttgcttctgaagacattgacatttttgaagagtctagggtagttgtcttgtaggatgtcccacaattagtatttgtctgactgtatcctcatgattagattcagagtaaacatttttgacaagaatagcgtgtgggggtctgggagtggtggctcacacctataatcccagcactttgggaggctaagatgggtggactgattgagctcagaagtttgagaccagcctgggaaacatggtgaaaccccgtttctacagaaaatacaaaaaaatcagctgggcgtggtggcatgtgcctgtagtcccagctacttgggagactgaggtagaaggattgcttgaatccaggagatggaggttgcagtaagccaaggtcacaccactgcgctccagcctgggtgacagagtgagactctgtctcaaaaagaaaaaagaaaagaaaaaatactgtatgggggatgttgtatatttcttcttgtgagataccaggagataaataatttcagcttgtctcattactggtggtgcttagtttatcagttggttaaggtggcatctgctagatcttcgtttataaaggcgccttttcccttttgtaattaacaagtaatctgtgcaatgatactttgaaagcatgtgagtaacctttcacccagtgtgtattagttttctattgctgctgtaacaaattacagcaacttaatggtttaacacaacacaaatgtattgtcttacagttcggtaggtcagaagtccaacatgggtttcttaggttaaaatgaaggtgagggcaaggtaatgttcttttctggaggctctaggagagaatcttttcccttgcttttttgagcttctagaggctgcgcatattccttgactcatgatcccttcctccatcttcaaagccagcaatgttgcatctctctgactgttctttcacagtcacatctgcctcttaccacagcctggacagtttttcagcttttaaaggatgcatattattagattgagcccatttggataatccagataatgcccttatctcacagtccttaactttatcatatctgcaaggttattttgccaggtaaggttctgggcattaggaagtagacatttttgggggagcccattattttgcctgccacacagggtttagtattgtcacctaaatcaaattttgcattgggggttgcaaatcattgaaggttttgggctatggtgaaccatgatcaagtctgtttagaaaggaaagagggccaggtgcaggtagctcacatctataatcccaatgctttgggaggccaaggcaggtggatcacttgaggccaggagtttgagatcagcctggacaacatagtgagatcccatctctagaaaaaatttttaaaaattatccaagtgtgatggcacagaactgtagtcctaactacttgggaggctgaggtgggaggattgcctgagtccagaagtttgaggctgtaagtgagctatgatcgtgccactgcactctagcctgggcgactgagcaggactctatttcttaattaaaaaaaaaaaggaaaaaataaccagaaaggaattaatcacagtttatgggagtaatgctagctgaaggccgggggtcaagaggcctgagttttgagtctcatggtacatcctgagtcatttccaggagagcaggaacgggggctgcctcttgcctccacttcatgtccctttactcactagttgaagaactgaagaatnnnnnnnnnnnnnnnnnnnnnnnnnnnnnnnnnnnnnnnnnnnnnnnnnnnnnnnnnnnnnnnnnnnnnnnnnnnnnnnnnnnnnnnnnnnnnnnnnnnnnnnnnnnnnnnnnnnnnnnnnnnnnnnnnnnnnnnnnnnnnnnnnnnnnnnnnnnnnnnnnnnnnnnnnnnnnnnnnnnnnnnnnnnnnnnnnnnnnnnnnnnnnnnnnnnnnnnnnnnnnnnnnnnnnnnnnnnnnnnnnnnnnnnnnnnnnnnnnnnnnnnnnnnnnnnnnnnnnnnnnnnnnnnnnnnnnnnnnnnnnnnnnnnnnnnnnnnnnnnnnnnnnnnnnnnnnnnnnnnnnnnnnnnnnnnnnnnnnnnnnnnnnnnnnnnnnnnnnnnnnnnnnnnnnnnnnnnnnnnnnnnnnnnnnnnnnnnnnnnnnnnnnnnnnnnnnnnnnnnnnnnnnnnnnnnnnnnnnnnnnnnnnnnnnnnnnnnnnnnnnnnnnnnnnnnnnnnnnnnnnnnnnnnnnnnnnnnnnnnnnnnnnnnnnnnnnnnnnnnnnnnnnnnnnnnnnnnnnnnnnnnnnnnnnnnnnnnnnnnnnnnnnnnnnnnnnnnnnnnnnnnnnnnnnnnnnnnnnnnnnnnnnnnnnnnnnnnnnnnnnnnnnnnnnnnnnnnnnnnnnnnnnnnnnnnnnnnnnnnnnnnnnnnnnnnnnnnnnnnnnnnnnnnnnnnnnnnnnnnnnnnnnnnnnnnnnnnnnnnnnnnnnnnnnnnnnnnnnnnnnnnnnnnnnnnnnnnnnnnnnnnnnnnnnnnnnnnnnnnnnnnnnnnnnnnnnnnnnnnnnnnnnnnnnnnnnnnnnnnnnnnnnnnnnnnnnnnnnnnnnnnnnnnnnnnnnnnnnnnnnnnnnnnnnnnnnnnnnnnnnnnnnnnnnnnnnnnnnnnnnnnnnnnnnnnnnnnnnnnnnnnnnnnnnnnnnnnnnnnnnnnnnnnnnnnnnnnnnnnnnnnnnnnnnnnnnnnnnnnnnnnnnnnnnnnnnnnnnnnnnnnnnnnnnnnnnnnnnnnnnnnnnnnnnnnnnnnnnnnnnnnnnnnnnnnnnnnnnnnnnnnnnnnnnnnnnnnnnnnnnnnnnnnnnnnnnnnnnnnnnnnnnnnnnnnnnnnnnnnnnnnnnnnnnnnnnnnnnnnnnnnnnnnnnnnncagatggatgtatattatattcttttagtttttagtaaaaattcagaaaaataaacatgaacttgaggtaacgagcctctagaattcttcattttatttcatttcacaatgtttcagcagtcttctgcagttagttggaaggttttggaaattctgactaatccagttgttgaagaataactagttagcttaataaatatgttttctagagctgataaaaaagatgattttttcatctgatgagctctgaccctctataaaccttctaacttaactcattttccaccagctacagaaatgtaacaagatgccaacaattacatcctcatggagcatgtatactagcttataaaatcacccctttgttggaaaattgtgtaatatcttgatttcaatttagcatggcatgttggttagcagtaaatcttgctagtgtatgaacacaagcctgcaggcagtttggagaacattgatcaggtgtaaattgtatgtatttttctcgcttctaaaaattttatagcagaatgaaataaagagctagcattgagaacactttttcagttgttttttattttttatttttatttatttttattatactttaagttctagggaacatgtgcacaagtgcaagtttgttacatatatatacatgtgccatgctggtttgtaggttgttttttattttgacatgtatcttgtggaaagtgccttctctctcctgaaatccatgatttgtgtctctgaccacttaggttccccatttagtatgtgacacatagcaaaagcaaacaagcatagttaaaacgtgtatttgtgccttgtgaaatgtgcattataagcagttaatactagatttgaaggctgtacaaaaaacatgcaaaaagatattaatattaaatacttagtgcttattgtgtatattaagcatttaatatatacaatataattttgcatgaactctgaaagataagtactgttattaactgaattttacagatgaagaaacaggccaaataaggtgacttgcccaagagtacacaggaagtattggagctggtgtttcaatcctggtgcacaggcagagtgtagtgtagtcactttatcaccttctgcctctcatttcttcgggcgaaatcaacacatacctagtgaattcttgcaatatataaaacactgtattaggcacataatatggaagttaccacatatctaaatggtaataaaagtgatcagttgaggctaggcatggtggctcacgcctgtaaccccagcactttgggaggccaaggcaggaggatcacttgaggccaggagttcgagaccagcctgggaaacatgacaaaaccccatctgtaccaaaaatacaaaaattagctgggccaggcgcagtggctcacacctgtaatcctagcactttgggaggctgaggcgagtggatcacctgaggtcaggagttcgagaccagcctgaccaacatggagaaaccccgtctctactaaaaatgcaaaattagccgggcgtggtggcacatgcctgtaatcccagctactcgggaggctgaggcgggagaatcacttgaacccgggaggtggaggttgcgggagctgagatcgtgccattgcactccatcctgggcaacaagagtgaacctccgtctcaaaaaaaaaaaaaacattagccgggtgtggtgacacacacctgtaatcccaactcctcaggaggctgaggcaggagaatcacttgaatgccggaggccgaaggtgcagtgagcagagatcacaccactgcattccagcttgggtgacagagcgagactctgtctcaaaggtaaaaaaaaagaaacatgctaatacatacagctgttattccttttcaaacgatcattggagtgatcatcacttttagagcaattgaaattttaagaatgaataataacaaccaacatttataaaatgctttactatgaggcaggcactacttcaagtgctttgtgtataacctgtttgtaaggtaggactattcattcttcgtttacaaaggaagaagctgaggcatgtcaggtgaaaggacttgcccaagattacctagctattaatgtggtagagctggagccaggatttagacccaggcatccaagctccttgatctgtacatgtaaccattatactacattacctctcattttcctgatgaagaaaacttcttttaatgagaaggtattgaaaatagtttcatattaggttcttataaacatgagcctttaagtgcctttttactgtttataatagacgtcactgagaagattgttaaaatttataatatgatatcattaaagtagcttttcccaaatgatgttctgaggaagaaggaagtactctacaagaaattaatgatgctaataatagtctgagatttacagtacctgagtagttctaaaatttaccttgcctaacccaagatgatttgacgatgggcctctctcctctttgtcttcatagcagccattcacttgtctagaaatctttgcatttggttaagcagtttggatagtgctgatgtaaggttatagtgctaattcctttgcttatttcttctaaatacacatcccaagggaaaccattgattaattaaacttggagtttgtccttcagaatagaaaaccaaaaatcatcaaattcaccccttgtctctattaatgtattgatttagtaatatttatgtaattctttaaatgtagtataaaactttagagttgcaggagatctttgagatcaccaagtccagggttttaaggctaaggttcaaggagcccttttttctggggtttgtagacctctgaaattatatgcaaaaagagtatttttctggagcttcttgcccctcctctccttcagcaggtcatttgacctaggccagtggttcccaaactttgctgcacattagaattactggaggagcttttaaacgttagatgcccagatcacacctccatgctgcttaaataaaaatgttggagtgggagtcaggcattagaactttttgaagtttccttgtgatgccagcatgcatcacatgctttcttctttaatagatgaacaagtaggatctacttatgtggctgaggaagcaatctagagatgttaattggtcagggctctgcttcctgctaaaagagattttagagatcgttctgaaggagtcttgtggggaagtggctctggagctagaatgcttaggttcaaatcccaagttttcctcagctgactaatagggatgataatatagcactgaccacactgggatagtcgctgcctgagctacagaggtggtgagcttgtcctcagcctcaacagaaaggtcagctgaacagactccaaggcagtggagggacggcagcccccagcactccactctgccatactgtttgggaaggaaaagctgtaaaccgatgtcctcattaccttctaacgaagacctcctctcctcttgctctcttacgccaagaatggctagaatccgtttctctttgtggctccttccaccccacctcatgttatttaagtaatcagaaaaggagtctattattttcagagtaacacatgctccttgtacagactttgaaaaacagaaagatttggagatgatacattatcactgcaaatttgactataaagataactactgttgaaagtgtgtattttcttccagtcttttttccttttttcctacatgtaaatatgtatgctatatttaaataaaaagaagactgtgtgagctatataattttgtatcttcctttctaaatttaaaatctgttgtgagccttttcccatattcttgattattctttgaagctgactaaatagctgcatagtatttatgtctttatccttcaaaatttaaggtgctcctaaatcttctgctattacaaataataccgctactaaaaatttgtgcatgtgtggataattatttcccatagaatagattactaaaggaggtaatactgaggcatgactatgaattctttttctaaagctttggaagcatattatcaaaaactgttccaaaaagatagtaccaatttatacttatgggcagagtataagggagtgtgggcatctaattgattcttaatgcttaccttttgtcatgttaatgtagtagagggaagaatggatccttaggagttactttgcatttctttgattactaatgacttggacattttaaaatgattaatggccattgctaaataacagtgttgtggttatttccccatccttattcctatgccctgcagataagcatcttcaactctttcaaccacatttagtctggcttcttagggaagttggaggtctgtaatattcttacgctgttgtttcttatttttaaattgtagacattatctgttgacttcttgcgagtgtagataaggataaaggtccctcatacacatacacttttctctttccctttgcccctcttatctcaatatacactacttttatgtaggtaagtatatgtattcagtgcttatatttttatgagtttgtaaatattattcacacttgagccatcaaaattttttgttgttgtttttttgagacagggtctctctctttcagccaggctggagtgcagtggcgcgatctcagcccactgcaacctccacctcctgggttcaagtgattctcttgcctcagcctccaaagtagctaggactacaggtgcacaccaccatgcccagctaatttttgtattttttgtatttttttgagatggagtctcactgtcgcctaggttggagtgcagtggcgcgatctcggctcactgcaacgctccatctcccaggttcaggcgattctcctgcctcagcctcctgaatagctgggattacaggcgtgctccactacgcccggctaattttgtgttttttagtagagacggggtttcaccatgttggccaggctggtctcgaactcctgacctcaagtctgtataaaaaagcctgtatatgttctgtaaagacgcaaccatccacttttttcccctcaggtattttatttatatatttggagacagggtctttctctgttgcccaggctggtgtgcagtagtgtgatttcagctcactgcaacttccgcctcctgggttcaagtgattcttccccctcagcctcctgagtagctgggattataggcatgggcaccaccccaaccctcgactaccccaggtgttttgaattgaggttagttgactccacacatacagaggtccaactgtatataaagtaaagagtaaaagttttacctcattggccctgtgtgttcttctctgaaaacagctttccaaaggcagccacacttggtggtttgtatgtattcttacagggctttttaaagcacttgtaagctaatattatacctacgtttatgtatttcttgtaacagaaattgggatcggactttggtattttttcttttgaaaagtttttagatatataagacatatatgagtacattcttcttgaaaaagttctaatagcagaaagaaagtgtcacacaaactccctgagtctcacttaccttatctgtaaaatgggaaggattatatattcttcatagggttgttaattagaatttaatgaaattatgcatttaggtggcctaacacagtgcctattcaataacaaaaatgagctagttattttgaacatgtatcagctttggaatttttaatgaagagcattttggcatattactgtatagtttgacagtggtcttttgatttgctcagtcctttttcagggtcttacagaagaaaaggagagtcttacatgttttccttcatagctttgtatgctgtaaatatgagtttagtttaatagcagagtttttctttcttttttgaattaattatttggattgcttcctctctactgccttcaagccaaaagctcagagtttcccaaaccaaagtgtgcctcaatcacaatttttaccagttttatacaatctgtattaattattttatcttttttttttttttgagatggagtcttactctgtcacccaggctggagtgcagtggcacaatctcagcttactgtaatctccacctcccaggctcaagcgattctcctggctcagtctcccaagtagctgagattacaggcgtgcaccaccacgcctggctaatttttatatttttagtagagagggagtttcactgtgttgcccaggctggtcttgaactgctgaccttaagtgatcctcgtgccttggcctcccacaagtgctgggtttacaggcatgagccactgcacccagcccctgtattattttcttaatacttgctttcacattaccgcactaaagaggcataataaccaaatgccgtgcatggaaaacagtacagttgacccttgaacaacacaggtttgtgctgcgctggtcaacttacgtgctgatttttttcaaccaaatctaatacagtattcatggatgcaaaatgcacacatacagagggctgattttttgtctctgtgggttcttcagggccagctgcaggacttgagtatgtgtggattttgttatagtctgaggtcttggaactgatccctcatgtataacaagggatgacaatattaaaaaattacttatttgggggataattggatacatttgaatttggattacatattaagggaacttaatggcattaatgttattgttcttcaatatgataatggcattttgattatctaggatgtctttatgagttgggagatgccttcggaagtatttaatggtgaagtgtcttgatgtttgcagcttactttcaaatggttcagcaaaaatcatactaaaatatgtatgtataaatatatgtgtgaatatagacagatatagataaagatatgaggcaaaagataggacccctaattgttgaatctaggtgaagggcataccagtgttcattatgctacttcaacttttctgtagggctgaaagtttttcaaagtgtaaacttggaaaaataaatgtaattagaatatttacttaaaattaaattgcctcattttctttatcttagtagatttactaaaaaaaaggagtctatatcattattgtaagtggaaaacaagcattccttgccataaatagaagataactgtaaaagttattattttaaaaagtttcagctggatattgttgtctgccaaggctctgagcctgaggcctgctctctcaaaagaagattaacaagcattagaggcgttaaacacaatattagcaccaaaatgagactttcttcttgacttaatgggaaggtatgaaagaaaattgaaaagggaacaagtttctcattctgtgtgattcagctcacctcataacatctcaagtctcacctcaaggcatcttgagtaccactagtgatagaatcccacacttggggaaatactgtatcaggtgatttcagtgtaatgtgttagaatgaaagtaaatttttatattaaatactgtttatagtgcccattatgtcttttttaaaccttgtatgttggtttatcatcatcattattattatttggtagtctcgataactagagctagctgcatggttagctgcgtgatgtcctggcttagggcagatgtcagatattgcagtctaaattattattggggtatacttattctattttatgatatgcagtgttgcctgactctcgaagcataataaagccaattgagatctttaaaaaattaattattattgatttcttactctgaagttgctcttgtagtgggtttttgctatatatattttttctttccttctttttttcttgctacattgttcctgctgttatttggaaggcactaggacattttgcctcttgaacaatgaaaggatccagatcgtgtctgtctcacattttgttatcccagtacaagactcaattgaataaaacatattacccatctggcctggaaatctcagtggcactcaaaataacttactaacaagttgttggatcatgatatcttgagattttctgaaagttcagcttctttttagctgttgctaagagagaaatttcattgacatgagggacacgaggacatgtctgcacactgccagttgttttagaggcatttggctctgccgccttgcagatggttagactctgggtggtgggtgaatgtatgctgattatcttattgaattaaggtaaccttttgtcattcattgaattctgcagaccagttggtcagtgagcagctgctccatgtggcttggtttgggttttgaagtacacaaaaactatcttaaagggtggtcagtctaatccaggtattcaacaaagcaatattgaaagccttcttccccttttgacactgttttctgttctgatggaagtgaatgagcaaaaatatttttactttttgctcaattaactaaatgattgaagcaaaggtttatggaatggccgaataagaattttttaacctagtgctttaagttgaagaaaatacactttcataatatttggtgtcagaaacattctacttttatggcatggtcttatgtttgaagatacgtggtagagtttttaaagtttatttttacaaatatctagaaactaaaaagcattcttttttatcatgcatgcttaataacatcatcttgacaaatactagctgcataacttttggtttgtagggttgttttaagatcagttttttgtttgtttattatattttaagagacggtgtccctgtcttgcccaggctcgtcttgaactcctgagctcaagcaatcctcctgcttcagcttcccaaataactggaataaatctgccatattttttctatatggcttccatttcagtttctagaaactctttcaggaggcttcattttaaataaagaggttcttaattgtttttagtaaattgctgaaattgtatggctcatttctcttctcagagatttttatcttgagctgatccttttggttttactgaaggtgcaatataggtaacctcagagaaagtgactttagccactagttgatttgcttattgtcagagagaaatcatttaacagtgattgatgaggaactgtttaatttctccagtttagtcacctgttgggccctagagcctttcgattcagagctcactgtttcatttgcatttatatcctagtaactatcataatgtctaccagtatttattaagcacatattctgtgctgggtgtcgccgtttatatatgctctttcattttgtcctcaccacaactttatgaggcaggtcttgttagctccatgttagagatgatacagcagcctcccagggatgttcattcacttgtctggtatcatgcagatagttaatggctgggccatattggagtccagggccttcagactctcaggctcatgctcccttctgccctgctgctgttttaatgaaaatcagccttgttctgaaccacagttttacaatgaagcttaagattaaactgaaaatgctcaagttctctgttagggcttcagattctatgtctatacttgtcttattaatggtaaaaataatgtaacaacattaaagaaaaattttgaagggtgaaacactgtttagactcttgccaccttaatacaaccgttttgtttttgcttatttccttccagatttgtttatgcgcgtgtcctttcacacaactataatcaaagcatatatacagctatgcagttttttttttaaacatagtgttattttatacatattttctttttaaatgttcttttttgtttttgagatggagtctcactctgttgcccacccagactggagtgcagcggtgcgatctcccctcagtgcaacctctgtctcctgagttcaggtgattctcctgcttcagcctcccttgtagctgggattggccatgcctggctaatttttgtatttttagtagatacagggtttcgccatgttggccaggctggtctcgaactcctggcctcaagcaatctgcctgcctgggcctcccaaagtgctgagattacaggcgtgagccaccacgcctggctttaaatgttgttctttaaaaagacttttcccacctctttgaatttcccaatctcaacgaggtcccttttataattcgaacaaaggaccatatgctttttcttattagcctttattatagtctaattatgtatttatttgtctggctattttgtaacttaagttgtcccctctaaatggaaaagcttcatgaagacagggaccttatttctgctgtatggatgcaagcagttatttattaactaagattaagcttctgtttatctgttacctcatctgtcagaaacagttggacagattttcaccaaacttagaaggtttttgaagggcatctgtggtgatcaggagacacatgacatatattttctgatcctgtgtctgagataacatacagagatttcaaacatgagacctggctgggtgcagtggctcatgcctataatcacagcaatttgggaggctgaggcaggaggatcagttgagtccgggagtttgagaacagcttgggcaacttagcgagaccccacctctacaaaaatacaaaaattagacaggtgtgatggcatgcccctgtagtcccagcgacttgggggtgctgaggcaggaggatcaatcacttgagcctgggaggttgagtctgttgagtctgcagtgagccatgatcacaccactgcattccagcctgggagacagaacaagactctgtctcaaaagacaaaaaaccccacgaaaaaccaaatatgagaccatgagacctatattgaagggcccaagggcagattgtcaagatggcagaccttggtttgcactttagagttgggtagcttcttaacttgggctgttccacatcttaatctaggatgagcagcaacaaggatgtctttatttaataatgaccaacaagtctcccagtcacatactgactaatttcaaataaatgcatttgatcttttcattttcattttgcttgtttaaatataaattgtctattgaaagagtttttttttctttttgagacagagttttgctcttgctgtccaggctggagtgcaatggtggatcttggctcattgcagcctccgcctcctgggttcaggcgattctcctgcctcagcctcctgagtagctgggattacaggcatgcgccaccacgcccagctaattttgtatttttagtagagacggggttttccatgttggtcaggctggcctcaaactcctcacctcaggtgatctgcctgcctcggcctcccaaattgctgggatgacagatgtgagccaccatgcctggcgtttttttgtttttttttttgatatggagtcttactctgtcacccaggctggagtgctatggcacgatctcggctcactgcaacctctgcctcccgggttcaagtaattctcctgcctcagcctcccaagtagctgggattacaggtgcccagcaccacgcccaactaatttttttgtgtgtttttagtagagacggggttccaccatgttggccgggctggtctcaaactcctgacctcacgtgatccacctgcctgcctcagcctcccaaagtgctgggatgacaggtgtgagccaccaagcctggcctttttttttttttttttttttttttgatatggagtcttactctgtcacccaggctggagtgctatggtgccatctcagctcactgcaagccctgccttctgggtccaagtgattctcctgcctcaacctcccaagtaactgggattacaggcacacaccgtcatacccggctgatttttgtatttttagtagagatggggtttcaccatgttggccagactggtctcgaactcctgacctcaagtgatccacctgccttggcttcccaaagtgttgggattacaggcgtgagccaccatgcctagccctcatatggtttatgagtacttaagacatgtttgattcaatttaaaaaataattacaagctgggcatggtggctaatgcctataatcccagcacttagggaggctaagacaggaggattgcttgagcccaggagtttgaaagcagcctgagcaatatagagatactctgtctctacaagaaatttaagaataggctgcaacactcactctaaggggagcattgtgaggtataccaagatgagtaagaacaatatggtttagcatgccagaacaaggaagtttcaggtgctagaaacacagacatcctcagctcaaacaggaacgcccagaacagtatacaagaaagcctggagctggagtcagaagactggctcccatgtgtggtgtcctaactctctctagacctcaatttcctcatatgtttaataaggataacaacctactcttcagcccacctgagaggacaggatgcttcaagaaagacagtgagcagcaggtcctttaaaaatcaaaggaaaacaggctcctggataggtgtgagatagaagtgaattatggcacatacgagagcaacaataaattatcctttactaacagtaacctaagggaaatgcccggcattgtgtctggcacagactagatactcagtagttcccttctcacacttgctcagccctgtttgaacccagacagagagcagctcaaaatatgcaagtattacatactcacagaacctggagacaagagaagcggcttctaggcacatgggctcccatccttgcagcagctggtatagaggttgcatgacaacttgtgaggattctgcagtagcgtgggctcagctacatgacctaaataaaggtctctttcaaccctgagattctgtaagtttctttttctttagacagagtctcactctgtcacccaggctggagtgcagtgacacgatctcggctcagcgcaacctctgcctccaaggctcaagtgatccttccacctcagcctcccgagtaggtgggactacagttgtgtaccaccatggctggcaaagttttaaagtttttttgtagtgacagggtctcactatgttacccaggctgattttgaactcctaagctcaagcgatcctcccacctcaggctcctgagtagctgggactacagtcttgtgccaccactcctggctaattaattttttttttttttgtagagagggggttctgctatgttgcccaggctgggtgaactcctgggttcaagtgatcctcccactttggtcttccaaagtgttggggttacaggcatgagccactgtacctgtcttagtttatgttttaaagtcatcgagagacatgaaaactaaatggtcctaggttggaggaagaaaacttactgtaaaggacagtattggggaaaactggcaaatttggaatatgtactgactgttagatgatactcttatatcaatgttaagtgtcctaagtctgataatacattatggaaatgaagagaatgaccttgttcttaagcggggtgaatgatcatggtctttacaacttattctcaaatgattcacaaaagagagataaagcaaaagtggccagttttaaagggcatatgggtgtttattgaattattcctgcaacttttctataggtttgaaattttttcaaaataaaacttttttgcccaggcatggtggctcacggctataatttcagtgctttgggaggctgaggtggaagtatcgcttgaggccaggaattggagaccagcctgggcaacatagagagatcccatctctacaaaaaatgaaaaaaaaaaaaagccagatgtgatggcatgtgcctgtggttccagctgctcaggaggctgaggcaggaggatcgcttgagcccaggaatacaaggctgcagtgagctatgatcatgccactgcactttagtctgagcagcagcaaaataaataaataaataaataaataaataaaataaaactttttaaaggtcaccgaggctgctgtgtggccaggggagctatagaggagcaagggtagaggagggcaagcctgggaggaggcctttgtgaggatggaggcatagactggggttttgacagtggggatggagagatgaggacagatctgaaatatgttttgaagaacatatttaacagaacttgctcatggattggaagagattttaggggagagagagggaggtagatgttccccacttggtgcaccctgatggttgcagactgaattccaatagaatcttctccccaaggtctttttattccctctctcttttcctcaattcagccactctatgagtagttaatacaggtatttatttcacagatgaggtgagactcagggagatgaaatgactcatttagagttatcaggtgcagacagaaattttactctacccagaaaaccaaaatataggcatgaaatcagtgttcttcaaactgaattgtctctcattaattgattgtgaaatcaacataatgagttcctatcagcattaaagaaaaaaaaaagagaaacagaataaaaatatagcatgccttgtgtaaaagggtaagtaatgtttcatgaaacttctattttagtttaatattcacatatgtgtatagtaggtcatgatgtgaacgtatttcttacttgaagttatgaaaaattggaaaggcacatacaggatcattgtagaaggaacttatgttatcacagaggtcctgtagtccccatgggaataagaaagcaaaagacaaattcacttgggtggttactgtaggttgtcatatgttgtttatttcttcagtgactgataggctgtaagtctgtcagtttcttagttgttttcttagttgatttttcttttcttttcttttctttttccgagacagagtcttgctctgtcgctcaggctggagtgcagtggcgcaatctcggcacactgcaacctctgcctcctagttcaagggattctcctgcctcagtctcccgagtagccaggattacagccatgcgccaccacacccagctaattttttgtagttttagtagagacagggtttctaccatgttggccaggctggtctcaaactcctgacctcaagtgatccacctgcctcggcctcccaaagtgctgggattataagcgtgagccaccatgcccagcctttcttagttgatttcatagtcatcctgtacttccagtcttgccattagcaaatattgagtacttgctgtgtgcagggttagaagttacttctttgtgtgagatctatgttttgtgtgtgggtggtgtgtgtggggtgtgtgtgtgtgtgtatgtgtgtgtgtgtttgtgtgtttaaaagtagacttttttttgaagagcaattttagatttacagcaaaattgagtggaaggggcagagatttctcatgtactccctacccctacacatgcacaattttccccattatcaacctcccccaccagaatggttgttacatctgatgacacattgtaattgcacagccttatcacccaaagcccatagtttacattagggtttactcctggtgttgtatattctatgggtgtgagatacatgtttaaaaatattttgtattagataaattggggataatagtcatttcaagaacaaaatgttggataaattaaattagctaataaacacagagtgctttaaacattcctagtgcaaaataagatcttgttgtttgtggtggtggtggctattcaggcttaaggtctagattccacttagtatgtaagtaaataatagcaatcctggctgtcatctgtatgtgtaatgtagtaatcagttttgtttagctagttcttatgtgtagcacattaaagcaatcttgaatagtgaggggacctcattactagattaccattaaatggtaatgttaagtgaccctgaaaccaaagtaatggaaaattgtcttcctttttttctttttttttttttttcccttgagatggagtcttgcactgtcacccaggctggagtgcagtggctcatggcaacctccacttcttgggttcacgagattctcctgcctcagccacccaagtagctgggattacagatgtacgccaccacacccggctaatttttgtatttttagtagagatgaggtttcaccatgccggccaggctgatctcgaactcctgagctcaagtgacctgcccacctcagcctcccagagtgctgggattacaggcatgagccactgtgcccagcctgtcttcctttttctcaaacatttaatttgctgtttcttgatcacatatcatccttctttcctttcaaggtcaggggagataattttttactgtatgtactgctgcatcttcacacaaattatcatctgaaaagccttctcagatttgacaaatgaagtctcttttcattcccaggaggaacttgttaaaccaatgaagttcaaaattctaattcctgttcctttctagtgtgcaccactttattcatcttgaataaacatacaacctcaagcatcctacaaggcaaatagattcctttttaattagtggctctatacacagagttttatcatcatgaaatttataaaccaggaagggaacaaatatttacacttgcaacttcatgtcaacattgcctactatttgaagagctctgaaattgtaaatgtatcaccccctccttcttcccccactccccacccctgccggcttttaaactatggcagtagaaaaataggtttcaactttctaggagcacatctctcctatgtggggaatgtggcagattctttatataagtgctctttctttgtgactggcattacttttttttctcacaaagatttgtttcagaagctaatcttcatttttttggttgttgctttttgtagtactatttctaaggcatctccaagtagaaaggcaaaattttattttgagaagttactgctttcatagttacacagaattatttctcaatttaagtaggccttttattccaggacaaaattaagccagtcagaaggtttctgggagaaaaataatgaagagctgaggttttgtatgttaatgtgggcagtctaatgcttgataaaagaaaacttttggctgggtgtggtggctcatgcctgtaatcccagcactttgggaggccgaggtggtcggatcacctgaggtcaggagtttgacaccagcctggccaacatggtgaaactccatctctactaaaaatacaaaattagctgggcatggtggcgcatgcgtgtagtctcagctactcgggaggctgaggcaggagaatcgcttgaacctgggagactgaggctgcagtgagctcagatcgcaccattgcactccagcctgagtgacagagtgagactccatctcaaaaataaaataaataaaataaagaaaactttttttttgtttgtttggcccttgtcagggacagattccgtctcagaaaagtctcgctctgttgctcaggctggagcgcaatggtgcaatctcggctcactgcaacctctacctgccggttcaagcgattctcctgcctcagccttcccagtagctgggattacaggcatgcgccaccacgcctggctaatttttgtatttttagtggagacagggtttcaccatgttggccaggctggtgtcaaactcctgacctcagataatctgcccacctccgtctcccaaagtgctgggattacaggcatgagccaccacacccagccaagaaaacttttaaagatgtgtaaatatgcagtgatttaaaaatctcagttgaagcttgttaaaatgtatcaaaataatttaggaaaaggggggctgattttgccaaaatttgggagatgcatactttttttcaaggctttactgcagttttaaaaaatattttattgttttgtaggcagcttctgaaccagagtaggctcagagactccctttattgcagttttgatgctgcagaaagtgactgcttaatttcagctgttgaggatgttggttatactatgcctggatcaaaaaaatgattttacattgcttagtttgttaaaatatgtttaataggttaatctttttttcaaagcatcaaaaataattaagatgaaatatcagataaaccctatgtctagaatgaataatttagttctaaacatcctggatgctaaggagaaaagaacaagatgttggtttataaaattcttattgtcaaataaagaagcatagaagtttgaagaaagataatttttttgtttttattttttctctctgaatttaggagtaatttatgtttgggttctaatcctatgttatcatcaaagagtaataacattggcaatcttccctcccattctgcttcatcctccccactaaagggaaataccagattgtaaaagaaaaaaaaaaagcatgctggttgtataaaaagaaacattttaaacaaataagaaatatatatattgaaatgcagtctccctgaatgatgctaaacccctgtccaagtaggcatttctcagcccacagaaagggatggcattaaatcacagctcaatggagacatttttatgaggagctgtgatggtttgtgtttagcaaacatgtattgggcatctcagatttgcctgttagggatgcaacagtgagtgagatactatttgttcccttaagaaactcaaagaggaaaggggttgacttgttcagtcagtgacttatgaaatatttcatactcattcatttacagagtactttttgtaggtatagtacagcgtggtcagccagggagactatagtgggtgcattagtaactaaccatacaactaatgctaatgttgcgggctgactgggtttggggtgaacaaatgacccctaaagctcaggagttctagaccagcctgggcaacacagtgaaaccctgtctctactaaaatacaaaaaattagccgggtatggtagcatgtgcctgtaatcccagctactcgggaggctgaggcaggagaatcacttgaacccgggaggtggaggttgcagtgagccaagatggtgccgctgcactccagtctgggtgacagagcaagactccatctcaaaaaaaaaaaaaaaaaaaagacatttgttttggctggggaaggctttgcagagggaggtaacttctagattgagatttgaagtcagagtccatccagaaagtagggaagacattttatgtagagaagtaacaagctacagggatcagaggtatgaaccagggtgcatgtttgggttatggtgagtggtgtctggccaaactgtgtggctcagggtctttctgcttcaccatctttagcatagaagccttccttgtgctcacttgctcatctcattctcacaaaatagctgcttcatatctaggcaccatctctctattcccacaggggaaagagggaaagtgccaagggtaacagcggaaacgtcttcctttttattcaggaaatgagggactccccaaggcttctgcttatatttcattggcttgagctgagccgtacaaccatcactagtggcaggtagtctgggatgtcaagaaagtagcttcccagtctctttggttagaaggcaaaggagaagatggtgggaatcggtttgcatcagtcactctacacattatctgctttgttagggcagcattatcttagtattgttaccaagttcagggtcttttctggggtgatcaagcatcctgggtcgcctgggaccaagtggttttctgggttgtaggactttgagtgctatagcctggaaagccctaggaaaaccaggatggttggccatcctagtctttccccatatcctctgttgtccaaaaatatggaagcaggtcatttcttgacataggagctgccttgactgggcttaaaaaggcctgaaaggcagcttaataatttacaatgagaaataaatgatattggatcaggggaggatactggaagaagagctccatgggatttgcttggtgctcgtgagattttgactgacaagagatcttagggctactatattacccaaattcaggggactctgttcactttgccagcagcctgggattaattctgtagtgctaatgccattctgagaagcctttcaatgaatctgagctcagggttcttagtccccctgttactgaagcttctccccagacagtgtcgtttttgttttttccttcctttctaagcttctggtgctgactagtctccccttctaatggacagtgtttagatacgttattgtctaaaggtagatctggccaggcatggtggctcacacctgtaatcccagcactttgggaggccaaagctggcagatcacctgaggtcaggagtttgagaccagcctggccaacacggtgaaaccccgtctctactaaaaatacaaaaattagctggacatggtgacaggcacctatagctgagatccattgtgagtgccattgcactctagcctgggcgacagagtgagactccatctcaaaaaataataataaaaataaaggtagattaaaaaaaaagagacataatttgcgttatcgtaaaatttacttttttaaagtgtgtaattcagtggtttttagtatgttcacaaagtcattcaccactgtctaattccagaacatttttcttaccccaaaatgaaatcctatacccattagcatcactgcccatttcctgcttcctttagactgtggcaaccactcatctattttctgtctctataactttgcgtattttagacatgtcatataaatggaatcctatggtatgtggccttttttaaaaatcactggcttctttcactgagcataatttttcaagttcttttaagctgtagtatgtatcagtacttcattctttataactgccaaataatagttctttgtatggatataccacattttatttcattcattcattagacattgatggttctactttctggctattatgagtagtagtactatgaacatttgtgtacatatttttgtgtggacacgtttttacttctcttggctgtatacctagcagtggaattgctggtcttcaggtgtgtcttactgatgtttttttttgagatggagttttggtctgtcgcctgggctgaagtgcagtggcgcaatctcggctcactgcaacctccacctcccaggctcaagcaattctcctgcctcagcctcccaagtaactgggattacaggcgcacgccaccatgcccagctaattgttgtatttttagtagagacggggtttcaccatgttggccaggctggtctcgaactcctgggctcaagcaatcctcctgccttggcctcccaaagtgttgggattacaggcgtgagccactgttcctggccttatcttactctctctttttttttttgagacggactctcactctgtcttccatgctggagtgcagtggtgcagtcttggctcactgcaacctccacctcccaggttcaagccattatcctacctcagcctctggagtagctgggactacaggtgcagctaatttttgtcattttagtagagatggggtttcaccatattggtcaggctggtctccatctcctgacctcaggggatccgcctgcctcggcctcccaaagtgctgggattataggtgtgagccactgtgcccaaccatctttaagcctccttaaggaggctgtgtctctaacatgccctgttggttttatagttggactctcactggacagcctcgtttttctaagatttgggggttataaggatcagagttgtccccagttggctcctttcacctcgtccataaggttgttgtgaggcttcactgaggtaatctgtataaagtaaggtgctggcctgtaccctgtacatcactcagtagtggtgatttcactgccctttgcctcctgcctttggcttctggctatctccaaacaccccatgccttctgtgctccaccctctgttgaaacacaggaatctaaaaccattcattgatactttttgagtgattatactgaaaacaattgcatgttgtctcatgcagaattttcgtgttaaaccctgtgttgcaaggatgccattaaccagcacacagatggcggtggagattgattgattgagatggggtttcgctgtgttgcccaggctggagtgcagtggtgtaatcgtagttcactgtaactttgaactcctggactccagtgatcctcctgtgtcagttttccaagtaactgggactacagtctcatgtcactgtgcctggctaatttttaaaattattttatagagctggggtctcgctatgttgcctaggctcttctcaaactcctggcctcaaagcgatcctcctgcctcagcctcccaaagtgttgggattaccagcgtgaaccaccacacttggctggggatggagttttagacaccagaggcttccttccgaggttgacctagaaagcacccttggtgggtgccatgggatgggggaatacagtcaaaaggaacctgctcttcccgctgcgcctccacctgaggtggatgtgtctgctggggctgctggagtctccatcttccactttaacttcacttaagagctgaaagctctgccccttcttcaagattttccctgctgtctccccttccctgctcaaccagagattcctcttattcttcctcttgctattagtattaatctggctcactgactcttttccttaacctcatcctaaaactgtctgatgcatattttatattttcttgcatgtttgacttttagttagtattttacagtaatttcgttctgcagccatcctcttatctgataccctggaactcattcctgtgcctatcagttctcacctctggtaattaaactttgtaaaaaagaaatgtgacatttggacatattctcttattagtaaaggtattattgtgtatgagactaatgctgtgcatctataataagttgtttcaccttgtgaatactaatgtaatttggaaataaacctttctttgttaaagactttttctacatgggccacgtttttccagacctatttcctaataatttgtggtttttaaaggtatgtcaatagagatgctgtagccagcatggctggattctgttagataaacattttgtgagattgcttaccttaaacaattgtctttaaaagttaatttcttccctaatgtgtcagtaaggaaattctatagtatttaagaagcctgataaagtccagttaaaacattttgcattgctctttaaacatcttttctgagggttgatgtgttcgtgtttgtttggttcacatagtttcttctgaattttaagaaagctttgtcagaatcagtaacttgcctatagtgtatttttcatgaccatatggctttcttcatcaaaaacagctaagtaaaaatttcagtgaataatagtatatatatatgggaatgtattcctcatcatttgtatgctcttgagagagtgactcatgtactgttttctattgagttcccgaaagtttataaagagatgacaaacaattggctatgggattgaaataatgcacatgtaaaatggaagggaaaacatggaaacagtttcttcctttgttcttcccttaccttgatgaaatttttaccacttaacgtttttcagtaaagtcaaggtcagtatcagagcctagtacggttctgcttgccgctgtctgaggattacctgtcttattacagaatgtacatgctcccagaggagaagatacagtttgatttcaggatgacaaacagctcttctgggacaatagtgtcaagtataaaaggattataaaggttttaggaccatgggatggtttgaaggggaaagggtgaaatgacagttaaggttggcatcaccgaggtcccagttgttggctgccccctacttctcctgttcccctctggcagtattttacagatgtatttcctttgacctttcctttagtaggaagttgtaggctttaagatccagcagaaaaaaattatgagccatttgtgaccctcttgagcagtccttcaggtagaacacatttcataagagctagtgaatggtcttgggtaattaaagctcactttatgattatacagtgtggtggccagcccagagggaacatcacaaatacacattatgaatgtatagaattgagactttatacctggagactgttggatgacctggtcctctgcccccaggcctacccttctgcccatcctcatccaattctgttttgatttttaaaaagtatgtgcttcttagccctctcattgcttcactgtgaggggaaaaacttttctattgaggtgctgaagctgtgctttccaggactcatacttatgtgctgttgaatgagtctcagtgctcctaggagtctataaaaggaatagaagacttcttttctctaactcccttatggtttgtattttatctgctaagagacactggcatttcatggagatgggagagaaaaagacacagcctacttagacagttcctttattccaacatatatactcacttcacatattcatagacaccttccacctagcatcaaattctgaactcatagaagacttaggtgtttttggttttgtatgcatagcttttgaaatccctgggttgaaaattttctaggtgttgtttgtatgctctagtcaagcccaggacataaagggttatgttaaaattactttccttagtgactattaaccagaaattttatctgtcaggagaaaggattcatgcaactctaagaatgcattgccctctgcataggctattagctttggcaaccgaagatagatgagacttaggctgtgtttaaatttttcattgtgatgagacaaatctattattataaaagccctactttatcagtgagagtgtttccttatgttgttttaattaaaggagcagtgtgtttttaaatttaattatggtaccttgaagatctgatactagctgtaagctaaggattctttgggttttcaagattttttttttggagacggagtttcactctgttgcccaggctggagtgcagtggcgtgatctgggctcactgcaacacctgcttcctggtttcaagtgattcttctgcctcagcctcccaggtagctgggattacaggtgcgggccaccatgcccggctgattttttgtatttttagtagagacaggtttcaccatgttggtcaggctggtctcgaattcctgacctcaaatgatctgccatcttcagcctcccaaaatgctgggattacaggcgtgagctacagtgcccagccagttttcaagatttttaatgcatttggagcagcgctatcctaaagaaccttctttgatgatggaaattttctctatctgcaccatccaatatggtctggtaaccaccagccacatgtggctattgagcacttaaaatgtggctgagactgagaaactaaaattttaattttcttgaaaatgtaaattaattaattaattaatttatttatttatttagagacaaggtcttgctctgttacccaggccggagtgcagtggtgcaatcatagttcactgcagcctcgacctcctgggctcaagtgattctcctgccttagccttctgagtagctgggattacaggcatgtaccaccatacctggctaattaaaaaaaaaaaattttgtagatatggggtctctctatgttgcccaagctggtctggactccaggcctcagcctcccaaaggagaaaatgtaaatttatatagtcgcatgtgattagtggttattgtgttggacagcacagatttagaatctgaggaaactctccatttagtataatgccatctgaagctcttaaccagttgaggctggttaaatctgaagttgatattggataatattgctattaggccaatgagagatttctttaataaagatgcaagtttatcaaacttaaatatgctagatatgaactttgggaaggcaaaaattaaattccagaaataattccaatataattaattgaacaaatatttagaaaatgttatctaggataaagaagtgtagtaaatattgtggaggactcagaggtgagtgggacttaggtgaggctgcctattttgagtcctgctggggaggccttgaaaggtcaaggagaagttcttttttttttttttttgagatggagtcttgctctgtcaccaggctggagtgcagtggcacgatctcagctcactgcaacctctgcctcccaggttcaagcgattctactgcctcagcctcccgagtagctgggactacaggtgcacgccaccacatccagctaattttttgtatttttagtggagacagggtttcaccatgttggccaggatggtcttgatctcttgaccttgtgatcctcccaccttggcctcccaatgtcctgggattacaggtgtgagccactgcgcccggccaggggaagctctttctaagggagtagcttagagcacagaatgccaactgggttatcatcaggctgtaaacagtaggatttcagtttgtgcaagcacgatggttggggctgtaacaggagaagggggagctgtttacatcaggggaacattaggttacatttggctctgacaggcaagattaattttgtctgagagaaggttgaggtgggattggaattttcccaggtatgccctgcgatgttctgctgagtttcatgtgtgttggagcaggcctctcaggccatcacagttctgggagatggactttccaaagattgggaagctggaggcagggacacctggacacagagccttcttcacccccacctgcatcccaggtgaggaggaattcttgaaaatgccgagtttgactcaccaaccaggagtatctaatgtatataaatattcctttaaacgtaagtatagtgatgagtagataagccagagtatttaaaagccacagcaaagattcagcttcctctccgctcccccgtgccccacatctgggaggaccccacctgagcttggtgttatagttggctgatgctcttaggtggaaacccaggggcaaaggacaagccacagaaacataggctgcatctgctcctactctgtacttccaccttacctgcccattaagtgctatgttcttgactaaataattcatgtatcgcagagagggaaggtatgtgttcccaccaacctctgacccatccataacccagtgtattacactgacccaggaaccagagctcacttcaccctgcttggagtcagggaactcggaacctaactgtcctgggccctctttctggtagttgggtgagtcctgagggcctgatacgtgaggtttggacaggctgggcagtaggttatggcatatcttgtaagggagaccatgtcagcagtggggagcagaatgcagaggaatcaaagacctgatctcatagtgcaggtgtgaagggagaagagccagcctttctccaccgtctctctggggacaggggactgtctcgcagggactacaccttggcatttgggcatgtcagaccaggatctagtcatcagagttacccaatgccctggggttggtttctaccaggtcaggggatgcagttctgcaggcagtatgttacatctgagactacaggagagaggggtggggtgacagtctttccatagggtgtccagacactcctggcccagggactgagccatggatagtgggatgcttgcctctctgtgtggcagggctttcgtctctgttttttgtttttgagatggagtcttgctctgttgctcaggctggagtgtagtggcgcaatcttggctcactgcaacctctgcctcctgggttcaagcaattctgcctcagcctcctgagtagctgagattacaggcacatgccaccatgcccagctaatttttgtatttttagtagagatggggttttaccatgttggccaggctggtcctgaactcctgacctcaggtgatccacctgcctcagcctcccaaagtgctgagattacaagtgtgagccaccatgcccagcctggtctctggttttgagccatgatgtcaggctgaccaggctggcacatttagcctggaatgggttaggcttctggctttgatgttaagaaaggaaactagtgccaagtgcagtggctcctgcccataatctcaagactttgggaggctaagccaggaggattgcttgagcctaggagtttgagaccagcctgggcaacatagcaagaccccacctcaaaaaaaaaaaaggtagtttggtgtggggcatgcgcctataattccagtgctttgggctgaggcactttggggagattgagactgcagtaagctatgattgtgccactgcagcccagcctggttgacagagtgagatcctgtctggaaaaaaaaagagaactggctggtccttcctgaaatagtgcccacaggctggcagagcactgactgacacctgcctctttcagaggtggggtcaggatagctgtatggaaattctccaatgtgtgggttgtaggagtgtatctcatatcccttcaagcactgccaggccagaacccagtggagtttgcaaagaatgggtttcttgttagaagaaagtattacgtacatgtaagtaatcttgggtatagctgggaagtgatgaataaatttgaccattaaaagattgtaatgtctgtatcaccaaagacaaaatcacaaatataattaaaaaacaaataacagactaggagaaaatagaccatgtgcaatacacaaaggataaatacagagtatataaagaagcttctgcatattaataagaaaacactagaataaatgggcaaaagatataaaaaggcattgacagaaagggaacaaatggccaataaatacaaagagatgcttaacttcattaataattagtgaattacacattaaagcaactagatatgattttatcccatcagattggcagaaattaaagagaataatattctttggcggcaatgagaaaaaatgggtgtactttcatattctgagcatataaattgttcagacctttttggagaaggtagtttggctgtatctttgaaaataaaatcacatacttttaatttggtaattttgtgtctagtgaaatacacctgaacacatgctcattccagcactggaatggtgaaatattggaatgattaaatgtacagtggtacagccagcatatagaatgcgatacctaaaaagtgtgtaagagtgtggtatagatctttatgcagctgatgtgggaggctctctcagatacgtttttagtgagaaaaaatataaaattattacatttatatttgtaaacctcaaaatttatatgtatttgtaaattctaaaacatgcttttcagattttttaacatttctgaaatcagcgtatctaacaattggtgacatagtttactaatttaaactcttggtgaagcatagtgcacattacaagtgataagatcttagatttgatgaaggatgatatgtaaatacgtggataaaggactctaagacagacatgggacgagattgaggaagtgtcagtggagactttgtctgtgtcatctatgttgtcaaattttttttacagtgaaattatattccattattgtgtaacgaaaaattttaaaaatacatatttatattttttagacaagatataattttagacaagataaggttgcctggatgtctctgatgtctgatccatttctctacttgggtgattatgcttgatattcagctttgagaactttaaggcctggatggttgatagagcgttcagcttcattaagaagttaagtagctgtgaagattcagtgggagagaattgagaactgaggtccaagagaagggaggagccgaactccagaattcagggccagttgcctcatggggacctttgcatctgtgtaaagaggttgaaattctctccccacaaggtggtgccaggctttttatactggactgggcataccctggagcaaggctcagtggatgggaggcagaaaatagatcaaatcaaggagccttatccaatgtcattgaaaggaaaattcattgttttgggagagagctaagccctagtgggaaagagccaaaggaataaatgggcttttaaatctgaggaatttacacaaggcaggcaggagatgacctgccataggttggaggcaggctctgcttggatcctgtgtaaacagggcatagtgtgagtgtctccccataagtaaaagctgtgttgtgaagatgaactcacagtttagtagtgactttttgaccaaagatgactcttcaagaagggataaggtgtatggagtatagctcattgccaggactgtgggaggcagaggaaggagaggacacttggccaagatgccatttgagctggtcactgtaggaaagggagaatttggacatgtaattttttttttttttttaagacagagtctcactctgtcacccaggctggagtgcagtggtgtagtcttggctcaccacaacctctgcctcctgagttcaagtgattctcctgcctcagcctccccagtagctgggactacaggcacatgccagctgcctggctcattttgtatttttagtagagatggggtttcgccatgttgcccaggctagtcttgaactcctgacctcaagtgatctggcctggacatgtaatttttaaggagatattcagaagaaaagggaggtgagcccaccatttacaaatgcacacaggaggccgggtgtggtggctcacacttgtaatcccattactttgggaggctgaggcaggcagattgcttgaggctaggagtttgagaccagcctggccaacaatgcaaaatcccgtccgtactaataatataaaaaattagccgggccactgcactccagcctgagtgacagagcaagactccgtctcaaaacaaacaaacaaacaaacaaaaatacacacaggagaatgtgaggagctgagtagtacagttttctcggagtacacgtctattaaagggaagcagtaggaagtaaaatagaaaaaggtaggctagggccggaccatgaagagctgagaatgccaagtttagaaatttgaccttgagtcagtgaactcatgttttacatttaatcttttggttaccaatttttttttgtaccatcattggtttgatttttaaaatacagtcactttgttttctaaggattttatgatatatgttcaaatcttgagttaaaggtaaatagaacacagtttgggtttttttttggcatataaatggttgaatttcaaaattatatttgtgttacaaactttgtttttactctctgccttccagcatttgcaaataaccatttctctttcaaaggaaattctagtatgtattcccattcaataaaagcaaagagctgagctctatatgaataagaggtaaaattgaacatgaaaattactgagcaagattagtgggggatgaaatggatgaacattggggaaagctgtgatccttgttacctttgctatagtgcaatttggaatggcttctttattcctggcaattcctgacagcatttcttttaaacctggccacctttccattgccagctcgaccttgatgttagctggtgctgctactgcaagggctgcctttggcaggaagccttcagtcaactttctgggctctggttttggctctgcacatgccttgctgagaagaccttaagaatctgaaatgtggagggtcattttggggtagggaaatgtggtggcaactcttgagttttctgccacgatgtaacttaacagatcctcttgtttttccttaaatggtacaagggtttgcaccgaaatggtaattcatctgtgtctgtgatgctttaaaaaataacagtttcactaatgtgtcacaacatgtattatttatcattttagtaaatggatattttaacaagcaacaatttgcaaatttaagcatggcagttaacatgatctgacattaaaaaattaaataatctcctgccatctttgttatcagccttgcattaaggattttagcccttctgggagcttttatttttttgttgactctgactgatgatggcagattgtggtagtgatcagagctatgcttttataaattattttttagttggaacaatattggcatgtaacgtggactggcagaattaacattgtttatcattaccagtgttgttttgacagatattctcagttctttaaggaagcagatagggaatgtctgtaatggacatctgctgtccactataggttgcccaataatgagtcctggtaggttctaccttctgctgtggaagccagcagagttcaaatgggcattttctgttcttgcctcctaggaactgcaggggtggacatgcttcttaggcttagcctgttgactgcttccacctggagtttgaatctgaacagtgttagaaaatgcagggacaggctgagtgtggtggctcacgcctgtaatcccagcactttgggaggacaaggaaggaggatcacttgagcccaggagttcgagaccagcctgggcaaaaaagcaagacccagtctctacacaaagtaaacaaattagccaggcatggtggtgtgcacctgtagtcccagctacttgggaggctgtggtgggaagatcctttgagcctagaagtttggggttgcaatgagctatatttgccccactgcactgcagcctgggggacaaagagagaccctgtctcctataaaggcagcgacagttagtagtggcactagagttactaaaattatcaagattttcttcctggatagtcctggttgcacacatcagtgttactataggtggacttagcctttacttttgtacatttcgcactgatacctctaaccaccttttgtgcacatagcagctattataccccccatagcataaccaacctgtgtaagagaagagtataagtcagttgcttgcaaggaactcttaggggtagggagctcttgcctgggggaggtgggggtttctcctctttctgtcctcccctagtcattagagaaaggcctcaagagaataactcagagattacggttgaattcaagagggtagattgacatctcattgagctgcacagaggtaccagccaggtgctgctgtgggattagaatggactcctgagaaagcgttcttgagtgagtgtggtgtggctttcctggagtttggggatgtctgtgaatacagaggcaagtatcttcctctcatctgaaagccccccatgtggctggagctgcccctggggacagtgtatggagagaggacagcaaaaacgcttgacatttcctgtgggcctggtggtctacatggaggacagctggcctgagtctttttgaaagacttgtcctgcctgcgaaggctgcctgccagggctaggcccgcagcagaaagaggttgtgggtgaaccacagaggcaggagctgagaggagactgagagctgagtcaaagggcacccgttgcctgcatcaggcagcatggaggtcccagcaaaggggtctcactagagagagctggcatgtggactcctgcaaatggtggaagatattttacaggctgcaggactggaccacagaaaagtgggcagacctttccctttcctcacacttgccgcctttcattccttggacccctctctttttcctcactgctgttcttaggggaaaagcttgacattggataaaatgaatttggatttagactaaatagactttttaataactgaaagtttggctttatttaagataatattttctttttaaaacactgtctagaaatcagtgggtttttttttttgttttttgtttttttttaaagacagagtttcgttcttgttgcctaggctggagtgtgatgacgcaatctcagctcactgcaacctccatctctggggttcaagcgattctcctggctcagcctcccgagtagctgggattacaggcatgcaccaccacgcccagctaatttttgtatttttaatagagatggggtttcaccatattggccaggctagtcttgaactcccgatctcaggtgatctgcccacctcagcctcccaaagtgctgggattataggcatgagccaccacgcccagccaaaattagtggttttaatgttactaaatcctgaaatagctttccatgatgacaaaatcaatcaacaatctcaaccccagtagactggagtggattttagaatttagcacactttcccttatttatactctgcaggtttcaagcatacaacttgccagcaattactgtgttggctgagaaatttgaaattttactagcttgaacactaaatttgttgatgtaacatacagctaataataaaggtcacgtccccatattggcatgagggaccccttatgaattagcctgaaactttgcagcctttaatcatatttttctctcttttttcccttgagacggagtctccctctgtcgcccaggctggagtgcaatggcacgatctcggctcgctgcaacttcgcttgccgggttcaagccattctcctgcctcagcctcccaagtagctggaactataggcatgagccaccacgcccagctaattttcgtacttttagtagagacggggtttcaccatgttcaccaggctggtctcgaactcctgacctcaagtgatccacccacctcggcctccccaagtgctaggattataggcatgagccaccgtgctcggccatgttgttatttttggtttgtttgttgattatggtttaaaaaaaccacataacattaaatttaccatctttgccatttttaagtgtgtagtatggtagtgttaactgtatgcaacagttagtgcaacagatctttagagtttttttatcttgtaaaaccgaaactctgtacccaggaagcaattcctgattccctgcttctgccagcctctaccaaccaccattctactttttgttgctaagagtttgattactttcgataactcacatcagtggaataatgcagtatttgtttttttcttactggtttatttcacttagcttaatgtcctcaaggttcatccatgttgtagcatgtgacaagatttccttctttttaaggatgaataatattccattgtatggatagaccacatttgctttatctagttgtctgttggtgaacatttagggtacttctacctttcggctcctgtgaacactactgcagtgaacatgggtaagcaaaaatctctttgagatccttttggctatatacccagaaggggattgctggatcatcattctgtttttaattctttgaggagccgccaaactgttctttatagcagctacgccattttacattcccaccagcagtgcacagagattaccattgcttcatatccttatcaacacttggtttttttttttttgccattttaatgggtctgaggtgatatttcattatggttttgatttgcatttctctaatgattagtgatgttgaacatctttttatatgcttcttgcccatttgtatatcttctttggagaaatgtcttttgaagtgctttgcccattttttaattgcattagtttgttgtttttttgatttgtaggagttatttatatattccgggtattaatgccttatcagatatttggttgaaaatattttctcccattcataagttgccttttcactttgccctttaatcatattattattattattattattatggttaaaacattaattgtgtaatactgaaaagtttaggaaataatatgacagattttgatcaggtcttaaatatcttcccaataggccctatgagtaaggcataaaaagcttgaattaattccatagtttcaccaaaacgctcttcttcttaatcttattccttatttttttgaggcagagtctttctggcccaggcagcctggagtgcagtggtgcaatctcagctcactacaaccttcacttcccgggttcaagcgattctcgtgccccagccacctgcgtagctgggactacaggtgtgagctaccatgcctagctaatttttgtatttttaataaagatgaagtttcaccgtgttggccaggctggtctcgaactcttgggattcgagtgctgggattataggcatgagccaccatgcctggcccttaatcttgttcctatcaatctttccagctttaccttccccagcatgacttcctcttatccccttcctatgtccaaagattccctaaaaatattctagctctgtaccattccacacactgcttttttgttgttgttgttgttgttgtttttttttgcctgaaatatgggatatgtacctttccctcttgtttaaccttgtttttcagactccttctttttcttttcctttaaagactcagcccagatgtgaaaatgttccagtcagccagtcagctgcttttctctcctatagcctcttaggtacagcccaggttagcacacttgtctgaaagtattgtgaggacttttataaaccccctctctccaggaccatatgctgctagatcacctagcttagctttgcctttttattcctctttgtcatgggcctaccataatatctagtccataatatttgtgtactttagttttttatttatttatttatttttgagatggtggtcttactccatcacccaggctggagtacagtggcacgggatctcggctcactgcaacccccgcctcctgggttcaagctattctcctgccttagcctctgagtagccgggactacaggacacgccaccacgcccagctaatttttgtatttttagtagagatggggtttcactattttggccaggctggtctcaaactcctgacctcaagtgatccacctgccttggcctcccaaagtgctgggattacaggcatgagccacaacacccggcctatttgtgtactttaaacgattatgggtagaaagaaagagcaaatgcctttttagaaataagataacagaactttttaccaattgtgcttccaaatatgctttctcttctaattttatctgctaagattttggcagctaattgtagattttatgaacttacattgggttgcctttgtcttctgttataaaagcaataattagaggaaatgatccttttgagaggttgtttaatgaattctgcttgttttaaatgtgctgctttaaatcttatttcacgtaaactgtactaatgcccaaattatctcaccctagatcagcattgaaccaaagtattatgatgattaatttccttctgttaaatcccttatagtcttttctttggtgtgtgtgtggggtcaacaatcaaagaaagaatttattgactttacatttaatatggtttactctacttgattatattgttcaagtgtgaatttgtgtatggtataagattatgccatactgggattctattttctgttaaacaaatagctttgtgttttattaactgccagtgtttaaatttaatggtttaagatttcagagagccctttttgtaagtatttgaaagtttttattataatcctgagcctaaccttcttctggtttcactgcatccttctccagccttgaaacaagccctggcacagacgcaaatcctggcgtgcaccacctcttcctctcccccgctccccactctaacatgacaagaagtgtctgtcccagaagtaatctgattgtgcacctagagtacctgttttctgcctggggaagaatgcacactgctggacctagagcggtggcaaaagtgccctctccactgtgggggccacagtggtaggcacaacccttatccctcagccccattagttaattaagtcattttacctgcattaaactttacgggcagagaaaattcagtaagtcaccactaccaggtgactttcttttttatgttaccccctagcaaggcatgtagtttgcatcctacagaatataaaagatggggccagcatctattctgtgtcttagcagtgaacttcatccaatagatacttgatttttaaatactttcaccttgtgtcatgattaaatcactaaacaggaagtttcagcttttctttaaagaagtacatcctattaaaaatttaaatgtcttcataactgcttacgctcagtaaatgaacactaggaatctataaacaggaatctatggctctaaaaattgaaattttgggggctgtttcattctttagaacttgaaaacgccataggcaattagctataattcatttgcagattatttttgccatgttaaattaggaattttagccatagcaagcataacagacaagcacacttttaaattattttgttcagcaaaacaccataggcccttatatgtgtttgctggaatttttctttgtcaacaataaatctatatgtttctttagttaaaaaaaaaacagcaacaaagtgtttattgtagaatgtttactttttaaacaaacgtgaaaggcattggtacaaaaagggaaaagcacctaggatttggatcctcagtgggtccaggagtacagcttccttgttctgcagttactggaggcagtgtggtgaggggaaggatgtgggctttggactgagctgctgcttctacctgtgctatgactttgcacaagttaggagtagcctttttgagctttgttttctccttagaagatgactaagatcatgtttgcacatagcacatgacacaaactcatgatactggttttgttttttctaacattgtctcagtgggtcttcactgccttctttctacaattttttttttttaagggaatagggtcttactctgttgctcaaggctggagcgcagtggctgatcattgctcaccatagcctcaaattcctattcactgccctcttatatagtggataatgtgggcgttagtctcatgcagttaagagaacaggttcaaaagaagttttgaactgtctgttttattttcacaaggccagtcagtgacagagaaagaacttccacttgggtgtcctggctctgtgtcccatggttttcctactgaaatactattactgtgctatagcagaagaaagaaggctaagacagttctgtgcttacagtcaccttcagtttcaaatgtaatcatatcctgggggaggggaaatgaaactttgagtttcatctcccaaatcattcctttatttagaatcaaccggctgggcacggtggctcattcctgtaatcctagcactctgggaggctgaggtgggtggatcacttgaggtcaggagttcaaaaccagcctggccaacatggtgaaacccccgtctgtactaaaaatacaaaaaaaaaaaaaaatagccgagcatggtggcaggcacctgtaatctcagctacttgggaggctgaggcaagaaagttgcttgaacccaagaggcggaggttgcagtgagctgagattgcgccactgcactccagcctgggtgacagagcagtactccatctcaaaaaaaaaaaatagtatcaatgaattcaaagaaataaaatgtttttcatgtactcatggaaacaactatttctaaaattctaaatgaattattattattattattattattattattattattattatttgagacggagtttctttcttgtcagtcaggctagaatgcaatggcgcgatctcggctcatgcaacttctgcctcttgggttcaagggattctcctgcctcaccctccccagtagctgggattacaggcgcctgccaccatgcctggctaattttgtatatttttagtagagatggggtttcaccacgttggccaggctggtctcgaactcctgacctctggtgatccacccacnnnnnnnnnnnnnnnnnnnnaataacgtccactacatcagtgcataacgtccgtgccacacgggggaatagccaatgcgtatagttatctcctacgaatcggaccataagaatcttcagtgctcgggagtaacgtcactaacatcccgacattgtcagcaacgaccataaaagacgggacccaaactgctgtctagcacaatacgagatgccccccgccaaatacacaccgcctcaggctacgttcaaaataagggttagatgggtaatctcagatccaccgaaggcaatagagcattatattcccgcgagaggaaataacagttagaacgcgcaccgcctccaaccataattaaatcctcggcacaagggggtggtacaaaaaagggcttcggacccgtaaaaaaacaggacaaaaatggacttctaggccgccctaagcaaccaaccctcctggcgggggcaccaattcaacaagctcgtttgtcggcaacaatgtcaataaccttctttagcaaaatgaaagccttcctcatagggagaattttgccggagaagttaggtaacggggtaagtcccgatctacacccccatccacctgggttgttcgtgtctgcaagaatatatcgaccgagagccaatcaaaaaagccggacataccgtttctcacaatgctgtcatcaggggcatattcttttgaaacaggaggcatgatcaagatggccagagtcagtctccaaaacctttctcatggtagtgctagcaccttagctagtcaaagtattaggatgcaaggtatgagccaccgcgcccgacctctaaatgaatttttaaaactccagcatctcacaaatggttcttgaataatttttccttagcctgcagtgtttaagttgggttttgaaggttttgttactcaatagtcacccttttttgggtgtaagtttgtcctctactcctgagtaagtaagtgaccttagggcagtattaccatgaaacagatctcacaaataacattgataccaacatcattatttttggtcaaatgttaaatagttaaaatttgtcatcctagtctatattgaactaatttgaaataccttatatttaagcaaactttattgtttttaacatagcaaaacaattaataaaactttaaatcaattacacatgaaacagtaagaaagcagtgcaagattaaaatctctaggtaagtgttctatagtgtataagtaagttctgtagaacttcagaaaaaagagaggtcagtaggattcttagagcaaagtgtgattttatctgtactttgggtcagaataacttttctgattttttttattactaacatacctaaacacagataatgttaacattaattaagtgaccttagggcagtatcacaatgaaacatctcacaagtaacattgatactaacacaattatttttagtcaaatgttaaatatttaaaatttgtcatccttgtctatattgaactaatttaaaatatcttattgaaatatattattaattaattcatatcagacttagctagagacacctaatgttcaaaacagaaagtagaggtggattgggcccagttggctccagttgctcagaggatgtggtcagtgctgtttttgtacatcttgagctctgctcactctgtctgcgagtaggttttgcgttttgcttgttggctgtcttgttgggggtgggaaaatggctgcccataccttctgccaggtgggcaaccccaaagacttttcttttccagcgcacgtgtaggagcagcctgttggaggcatgtgcccatgctttagactgtcacccaggtcatgaggactgtggtttgaagagtgtgctcactcaactggctagggggtgagggcactgtgtttgacaactgtcaaggactagcgaggttcccagatgaaagggggtgatataccagaagaagaggcatgggtgggaaatgtgcatagcagtcccagccaatagctatcactgcctaccacatagtgctacaaaacagcgtaagaattattcattgagtgcaaatgttgggggagtgggggttaaacagagacctattctaagtgattcttgactgtttgtccaggtgtcattccttgttataggagttttaaaagcagaaaattctcaactgctcattcacctaatactccatgaaagtatatattcttgagtgtcctaagtgtgtgtcctttgaaatgtttatatatataaaagatattttaagtataaaatcttaaatatcttttacacttaaaatatcttttatattttatatttgtgcttttataagttaaaaaatgtgatcaccatgaccctctacttggatgtgacaaccctccattttataaaataattaccgttgaatcaaaatttttgctcaacgtatgctatccagttacctgtcaaagccaactgaatgaatgatgaaaaggttcagatcaaaagcaactggcttaacttcacggaggttttcatgctttaatttaaaatgtgtctatgtctaactgattatctctcacattttataaagaaatattgacgttctgtaaagtatgtagtgacctcacttctggctgtgtgggcaggtttcactgcaggcctctgaagcattgatattcctgtaacctttgaggcaagatgtgtgtgtagtgtattaatgagctgattgaagtgatgtacagtaatttcatccttgggtaaaaacagatgtgaaagattctgttttaatatttaatcagcctccaagcctctgttggcttgtttaagttgacctgacagcattatacctggaaacactttgaattaaactctgagtgcttgaccttgttcaaacagttgtaatttaataaggctgctgtcttggtggagatagtgtcgctaataggcaaatcctcttctgactgggattgttctgtttgtgagtgctggggttggagagattcagagattctcatcagtttgtggggaggaactgggatttgaagaagtaaaaacaaatctaaattaagaaagtgtcttttagaagatctttaaaaacttttattttaatttttagacatatagaagtaatgtttttaatgtcattttgattaggctcattttggttgaaaggaatggaaaatcatttgttaaaaagagagctggaaacttgtcagaaatcaaagaagtgctaggaggactgcatactcactctggctctccttgtcctcctgtccacccatccctccacccacccatccgtccctgcttttctctgtctctgtcttgggcgtcctctgcacgatagcctgtctgctctctcctttcttctgttggctccctcaatctctgtttcgtgtacttctctctagcccatagctcctctttactaatcatttctgttctctcatgccatcagtttgcaggggctcttggtagtttcagctctcttgtatcctttcagctctaagtcttgctgtcaacaagtttgtttccttgttcacgttccagttagctgggtctgaatggctctcctgatcttttttgtgccatatccaaattgcccatgctttccaaagcagggggagctgtggacaagacagtttttggcttgaaggaaagattagttggggcaaataccatgatttgcccaatataaatgcgtgtagatatatattttctggttctaagagtaccatatgcttactggggaaaaatgagaaaatttaaaaaactaataaaaatacagttaaaatctcctgtaaaccgactattcaaatagctaaactactttggtgtatttcctctgattttttttgcttgtttatacataaacataatatacacagtaaacatcccaaaattttagaatcatagtggtaacattttaaagatcttcatatctacttgttaccagtggcatctgtaggaatactctggctgtcaggcctacgttaaaaactgtggtaatttggtgtgaatcttttattaattctttccttttgactaatattaagtgtggcatcattaatcatgttatattatcttcactttggcttgcattacttatcaactcctttgagaagagttaatattattttcatatttcacagtacttgacatattgtctcatacttagtagatgttcagtatttggtctatagtttctgcttaatttttatgaaacttgatttctgtgagtgggcaaaatacattcataaggttccagctcagaagaaggaaaaagtaacaatgtatagcactaagaatattggaaaacaacggggaaatatgctaattgcttttaaacgaacagggattttggcagtattgtggtatatgaagggtctcctgtaggaagctgactggctcttctcttttaggagccctcccagggtggcattcattaccttgtcggattgccatggtccagtgtgggtagcagaatcctgagagacccccagtgaccctgccctttgtattatatcttcccctttgagtataggtggaacctatgcatgtttgagatatcacccatgattctactaccttgcttggcagagggagactatccaggtgggctgatctaatcacacaagccccttagaaaccatattctccagcaggtgggaagaaagagtgatctgaagcatgaataggatttgatgttgactgcgaagatgaaagggaccatgtgccaagcaatgtgggtagcttctagaaactgagcatggtccccagctggcagccagcaaagaaacagggacctcagtcctacaaccgctaggaaccgaattattctaacaacctaaacgagcttggaggtgaatttttcctaagagctcatggataagagcagagtctggctgacaccttgattttggctctgtgagaccctaagcagagaacccagctgagcctgactggatttctgacccactcagctgtgagctcatgaatgggtgttgttttaagccactgtttgtggcagtaagactaatatagtccagggtctggctaattcttagctttgtcagattttaacttgattttctgtggatatcaagggtggagctgtctctcaggggtagacttacaggagcctagctgaagaaactggtgtatggaatcaggaggccagcatatttatttgtttatttacctgaaaagtaaatgttccagggactgagatactccatgtggatggtcagtacattatctcccttaaggcagacctgtgtaggaggccaggtgtgtattagtgagcatggcatccaaaccatgagttagatgagcacagtttccatggcatcaaacacctgtctcacaacaaggatggccttctctatgtctggacaatgtttagatgggtactgccagcttctctggagactcactgtattagttttcaattacagtgtaacacataaccacaagttagcagcttaaaacaatgaaagtatattatctcacagtttctatgagtccaggcacaggtaactgggtcccctgctcaaggactcaccaggctgaaatcaaaatgtcagcagggatgtggtctcataagctcactggttgttggtggaattcagtgccttatggttgtaagactgaggtcctcttctcccagaggctgccctgccacatggccctctctacaatgtagcattttgcttcttcaaggtcagctggaaaatctcccacacacttttggtctttacaatctctgaccccctttaaaagcctagccctgtgtatgctcatagggagagattgtacaggggcccaaatcttgagggcattgtaaaattctgctcccacacttgctttcccctcagcatcccttgatgactggccagctttctgtttgacacctcctttctttagctgtgttaatatatccagtctttgggagtccaggcttggttggatatttcacatctctgaagtgactacatagttcttctcacattcagtatgtattgatttttaaaatttaaatttgtgaacttaatcacacctttatttctgtgatcctcccccctttagtaactggggaatgggatgaggaggaatttcttcatcttagtttcagaagtcttcacagcagtggcctctatttgtagtttgatggtctaaggagtttagattgttagagaacttctaccttcactagaattttgaagacgtaacttaaaattacacttactagatgtagaaactggggagacaaaatgagttatttgcacagttaaattattagctagtgaagaagggtttttatttcttatttatatcctgccttctctcaatatgatgatgtccagtaaaaggcatagatagtctaaaagtgaagcaattaaaaatttttctattatgggaatttgacagtacaaaaaaacacagatgtccttgcccattaaagtgaacaccaaggagtccaaaatattttcatgaggtagttttttgccattgcctgtcagttgtgagagatcattgcctcaggccacagcgactaggtgtgtggcagagttaacctgcctgctctctagggaaaccgtcaagaaatgggcaataaattaataagtagaaagtgttctctgagctccaggcagttgttgattgactgatggaaaaggtaggcggtaggctaatagacgatgacatccaaattcagctgttgcctctcagctgaacccaaccctgggcttctgctgccttttgctccttttccctgagtggtggtggcctgcaggttaaacaggtgggcttgggaattgggctgcctagggtaaatcctcattcccccatttaactcagtctgccagactctgttttcttgtctgtaaaatgagggttaaaagagagtctctgtaaagcatttaatacgttgttgggcactagcggtggattaaggagaagagggctgtgatgggagctgtcagccccagcaggcaggagttagaattgtctggaattgccggtgtagggtgataataaaaagcaaactgactcttggtcggtttattactatttttaaattccctactgacaaggccctccctattgcctgcactctgagtggaccactccttccatccatgccttgcaatgccactgtcttgcacataagggctcaaaagtgtatgctgttgttgcccttctcacatttcggctgaggtgtatattttcattaaagaggattatgtagaaaaattggtttaataaaaatgatgagactttttaatatggtttgtacaccattaagagtgaaatatggcaaaatctggtctgaaaaataggaaaaaatatagcaataactgattaatagaaaaccataggattggctgggcacagtatctcacacctgaaatcccagcactttgggaggccgaggcaggtggatcacctgaggtcaggagttcgagaccagcctgaccaacatggtaaaaccccgtctccactaaaaatacaaaaactagctggacgtggtggtgcactcctgtaatcccagctactcaggaggctgaggcaggataattgcttgaactcaggaggcaaaggttgtggtgagccaagatcgtgccactgcactccagcctgggtgatagggactccacctcaaaaaaaaaatcttttttttccctttttatatttttgtctggatcctaaatattgggacatttgaaagatgtgcatatttagtttaagcaaattctggtggatttggttggttctctctgtagtaagagtagagaagaatggtagatgtgaaaagaatatattctgaaaagaatatgggataagagaaaatcaagaaggcaagaaaataatcatttccacccttttatctactttgaaatcaccacttttcttactttggtcttctgtttcctctataaactatgcttaagagaccagagtgagcagacttcttcgtgaaaacctgagcttgggagttgggatggtttacagtcttggcttcagtccacttttctgacttaacacccagacccctttccggctaaatttattgtctcctgttcctgctgggcctttctggagcgtccgcctctggagtgccctctgctcttgaggtcccaaactgcccatcccacacctacctggtcacagctttgcagtttaagtccccacatgccagtgactgcttcctttctggacccctttactgcatttcagcagtgctgtcaatccttcctttaaatttatgtcactggtttgtagggctcattcttccagcctgcagacgtcagttgagattccactgtgatcaaagcaggatatttaagttctgcagcgggtgggctgcaagtggtagaaatagttattttcttgccttcctgaatttctcttgttccattctcttttcaggatacattcctttcactacagagagttgtctgctctcactacaaacagaaccagccaaacccaccacgatttgcttagacataatgggcaagaactttcagaacatttggaacttttcagaacattgggtggtcttagagactagccagtacagaaatctcttgagagggtgttactgtgttccttctggacacctccagtttctgatttggctgtcctgtttgtcagcagtacatccttcatattgagcccaaaacctccattcattctggtgttcttcagtgcagtcacactgcttcgtgatggcttttcttcagtgcagtcatttgcttcatgtgacttttcttttttctttttctttttctttttctttttttctgaggcagagtttcactgttgttgcccaggctggagtgcaatggcatggtctcggctcactgcaacctcctctgcctcctgggttcaagcaattctcctacctcagcttcccaagtagctgggattacaagtgcccaccactatgcccgcctaatttttgtatttttagtagagacagggtttcacaatgttggccaggctggtctcaaactcttgacctcaggtgatgcatctgtcttggcctcccaaagtgctgggattacaggcgtgagccactgcacccagccatgatggcttttccaatgcaaaacattgcaatagttattcctttgaaccttataaaattactgattgttatgttttgaatatttgtcccctccaaaacttacattgaaatgtaatccccaatgtggcagtattgagaggtggagtctttaagaggtgattggatcaccagggctttgccttcatgaatggactaatccattcatggattactagattaatgagttaattcatgaattaatggactgatgggttatcatgggagtggacctggtggctttataagaagagtatgagagacctgaaccagcacattcagcttcttgccatgtgatgccctgcactaccatgagattctgcagattcttccccaccagtgggaaggtcccaccagatgtgaggcccctcgaacttggacttctcagtcttcataactataagaaataagttcctggccaggcacagtggctcatgcctgtaatcgcggcactttgggaggccgaggcgggcagatcacgaggtcaagagattgaaaccatcctggccaaagtggtgaaactccatctctactgaaaatgcaaaaattagctgggcatggtgctgcgtgcctgtagtcccagctactcgggaggctgatgcagaatcgcttgaacctgggaggcggaggttgcagtgagccgaaattgcactccagcctgggcaacagagccagaccccgtctcaaaaaaaaaaaaaaaaaagaaagagaaataaactccttttctttataagttgcctagtttcaggcattctgttataagcaatagaaaatgaactaagacactgatattcaattgttttagcctataaaaatgggaattttatgtgggtcaacctagtatattccccctgattctctgcttttccagctcatatacttttgtagtttagataacctcctgtcagttaaatcatgatataagttcttcgttccttttttttcctttatagtttaaaaattattttatgtgtatctttcctctggtagccccctgagacttgcttactgcaagcccacatgctgccttgactccttttccctgaatcaactgtgaattgttccgcagcttctctcctttttggtctctgaaccaaggtttcttaattagagtatccacaagtctatatgtgaagaggttgagggaaaagtaaccactggggacatgagaaatctgaaaagtaatagttagaaatggccatcttagccttattaaaatgtaagtaaggccgtgtatggtggctcacacctgtaatcccagcacgagaggccaaggtgggcagatcaccttaggtcaggagttcgagactagccttgccacaatggcgaaaccccatctctactaaaaatacaaaaattagctgggcgtggtggcatttgcctgtaatcccagctacttgggaggctgaggcaggagactcgcttgaacctgggaggtgaaggttgcagtgagctgagatcgcatcattgtactccagcctgggagacagagcaagacaacatctctaaataaataaataaatataatgtaaggcaaggccttttcccttatatctattttagggtttacccttgtgtatacagaaaaattgttccctgtccagcttattatgggctggatagcaggcagaactcctcagtttgggttagcattgcattaacagaactgccacatctttctggataatcttcctttgtgcataagctccaggctcaccttctctgcctcacagctgtgcgctggtttcccttagctttcttgggttctggatggatactggccttctgggtgagaagggggttctttggcaaaaggtgtttttgacataatttaggaccttcttaagttctacagcagacctaaatttcttcccccaagttctttgtctatatagagtactcagcactcattacccattctcagttctgaaggaaatcttatggagcagttgtagtatttatagggtaagcagagtgcccagtttccatgccccaccccaaaccatttagatttcagtcatgtatgtcaagggaggagtgagtacatttttgtggtcagctgcctcttcttttccctaacattctcactttttcatctttcctgctttcttgaggtcatttatctattgaataggatgtctattgaaaggaaaaacctcccctaatcgcctttaaactaatatttcttactgggcatggtggatcacctgaggttgacagtttgagaccagcctggccaacatggagaagccccatctctactaaaaaaaaaaaaaaaaaaatattagccaggcgtggtggcgcatgcctgtaatcccagctatttgggaggctaaggcaggagagtcgcttgaacccaggaggcggaggttgcggtgagccaagatcgtgccattgccctccagcctgggcaacaagagcgaaactccatctcaaaaaataactaaactaatatttctcttttctcaataataatggcatgaaaagaattttttctgtgccttttcaaaatcccaataccccctcgtggcatttcctatgttgaagttttcaacagccttatcaggaggagaaatgagcttaatttttgagttttagtgcttagggactctgtcttggcttctagagataacttcactgtgggcacccacaaataatatgtttaattttttttctaaaccttttgctgatggtcattgcaatattttcttgattttaatttcctgagttttcttctttcacattttttcttttttttttggtgatatttttccatattccattatctgcatccttctcactctccctgatttttcaaacatcatggactacagatctgcaacctccctggtaattcctcttgggtttgagaggaagtttgtcaagtactggaaacttgaacttgtataaaacagatgtcaccactcattttaatggaagaaggcatggagtaaatacagatagcacataacagctatatgcattctcttaaatttctttcccgatcttgggcttgaggtatttttatctaatctagtctacccttgccattttcaagatctttttctttgatacttgatagagaagtgtcttctgtatttttcttccttcttggaagaatatattttaaaaaatgtattttgagattgagtattttgtgaaacatctttcctctaaaatcctcaaagtaactttgcctctctttgatttctatgggtagtccagcggagagtgatacacataaggatatttcataaacactgcttgcattcctctgggatttgtgctcctagatgacagcatatatatgcatgtgattctgtgtgtgtaaacatgctttaaaaaatttattgaacatagttttcagctgtcttcactcactttaaaccttagtctactttctttttcttttttttttttttttgagactaagtattgctctgtagcccaggctggagtgcagtggcgcagtctcaactcactgcaacctcctccaggttcaaacgattctcctgcctcagcttcctgagtagctgggattatagttgcccaccaccatgcctggctaattttttgtatttttagtagagacagggtttcaccatgttggccaggctggtctcaaactcctgacctcaagtgatccgcctgcttcagcctcccaaagtgctgggattacaggtgtgagccactgtgcccagcctttagtctactttctgtttttacaattccatgccatgtttattgaaagcatgttgttggtttcttttgatgcctcccctgtctttcttctcatcatgattttaaaaattaatactttgtaatatttgagatttttatatctatgtcaagttaacttttcctgaaaaatattttgatacattttctagaatgttagtgtattgtgtttataacatgggggaaaatgtactgtttcatttttaaatttatttttatttatttttgttattattattttttaagaaacagggtcttgctctgttgctcaggctggagagcagtggcatgatcctggactcaaacaatcttcccacctcagctttctgagtagctaggactacatgcgtatgccaccatgcccacctaatttttaatttttttgtagagacagagttttactatattgtccagactggttttgacctcctgggctcaagggatcttcccaccttggcctcctaaagtgttaggattataggtgtgagttatcacagccaggtgcaataagtgtttatgattaatttaaaagcagatgctgtgcttttcaaaaattatgctcaattttttttttaatattacaaaggacttttagactggcttcctcctaaacatttcttcaactcctatcaagttcagtctgcaaatatcctaatttctaggttgtttgggaatgttaattgattgtctcatgtatgtatgtatgtatgtatgtatggatagacagatagatgaaggttgaaggatggatggatagattaaatggatggatggatagatagatagatagatagatagatagatagatagaaagatagatgaaggttgaagggtagggctggaggaggaattccagctttccagtagattttctatcaagcagtcattcatatatataacttcctatattgttagccaaagttcatccatgtctcttgtatttagctctctgtctgtattgtagaaagcttatttattatgtgagcattttgctttctcctatccctccctctttctttaacatcagttataacagctgtgaatacagtttataatatgagcagccatattcagtttttaggctttcaaaatcacaaatacaaaggaggatataatacatagtcctatattttatacaaattgggacacttttcttcatttcttatttcgtggcattgcctaactatagtcaagctaatgacccatgtagatgtagtgttgtacctggtgtccgtgtccctgtgaatgtgtcatgttgtgctggcctgattccccaacatcagccccagggagccagcagctggagcagctgtcatcttgtgaaagcagagtgtccttgttgctattgattgggttgttcagtcaattgcaaaaaagtggatctaactgtcaatggtagttatatgataatcctggagataaataagtgtcaagtgaagtattacttgaatttaggacttgaagagagagaaaggggtatgagtagttggaggggaagatttgctatgacaagctattattcagtgtggttattttgtatgacaggtaagtctacaggtatcttttgttagataaatcagaaattaagcattccctttgtaaactccaaacaagattttgaaacaccatggtccccccttatccacctccaagatctccagtggatgtctgaaaccactgatagtactgaagtctctatatattatgtttttcccctgtatgtaatacatacctgtgataaagtttaatttataaattaggcacaggaagaaattaacaaaaataagtaagaatagaacagttataactatatgttctattaaaagttatgtgaatttgttttctctctctctcaaaatatcctgttgtgctgtgtgttcacccatttttgagctgccgttgactgtggataacaaaccacagaaagtgaaacttcacataaagggggactactgtattctcataatgttaattgcttctagaattcacaaggattgaattcaacttgaatcttgctaaagaagtactttattattcgatgttagtccagcaacaacttatagtgtagaaatttgcccttttgagggtgaatacacaaaggggaaagaaaacttgtgtgcccacggtccactaacagataagcttctggaggccaggagtaaaccgccctgcaggggagccatctcccagggtttccccagcagagagctgtgcccagtgccggggtctcatgcttacctatttctctgtgccagtatagtagacctgttttcaagcctagcatgagccttaagtattactggctgggagtggtggctcatgcctgtaatcctagcactttgggagggtgaggcaggcggattgcctgagctcaggagtttgagaccagcctgggcaacatggtgaaaccctgtctctactaaaatacaaaaaattagccgggcgtggtggcgggcacctgtagtcccagctacttgggaggctgaggtaggagaattgcttgaacccaggaggcagacattgcagtgggctgagatcacgccagtgcactccagcctgggtgacagagcgagactctgtctcccacaaaaaaaagaaaaaaaaaaaaagtattacttatttagtaagtccatagcattttgttcacacagtgtatcattgtgcttttctgtttcaaagtgtaattatttaatctagaaattttaagtcctgtgacagaaaacaaatgctgttctcacaaaatatgagaaatcaaattccatcttattatttaaattaattcttttttaactgaagaattgttatgtgggtagctttcaacataattttttcaatattagatgcttataactaatgtggatttagttaattcgatgtttatcacatttaattcttatttactacaaaggttaaagcaattttatttcttctggaaacttttaggatcttgtgagtgagggacgtcagccaaaattggcaactttttcaagcaactggctcaagaaattaggaatttctctaataatgagccatcgttttttgaattcaacaatttaaaagggctgcatagttaggatatgattccagtttcccctcagtgcaaattgatatttttttctgttgacacattctactttgttttcgaagactagtttatagtgttcttttaaaagcaaagaaaatatctttaaaaatcccagctttttggctgggtgcggtggcttcatgcctgtgatcctagcactttgggaggctggggtgggaggatcactggaggccaggagtttgagaccagtctgggcaacacaggcactccatctctttaaaataaaaaataaaaaaataaaaatagccaggcttggtggcccacacttgtagtcccagctactcgggatgctgaggcaggaggattgctggagctcagggattcaaggttgtagtgagctatgattgagccactgcactttagcttgggcaatggagcaaaaccttgtttcctttaaaaaaaaaatttattaaaacatgctcttactttggcaaaaatatatgtttcttcatagtgatgataatcataatgatacattattactatatgcagcttataagaatcagttgtctaatgtatccgtgtaagtttctctgtggttttaagaatcattccataggctgataaatgcatactctcttcaccccattgcacatccagcattctgaatttttctcacttccttgaatatgccatgttccatgcacttgtagatcttccatcacagaaggtgcctcatctgtccagaacccctgccatacctctgctccctttgtctagctaacgctcactcatcctttagatcccagtgaaatgtcacttgcatctgggaggactttctgactaggttctgagcttcctttgcattctgtttttcattgacataatgacatcacatttattagtattgtctcattgtaaaccccagtaaggcaggaactgtatctctctgtatccccaacactaccacagtgcctggtgcatgttaaattgcagttaatatttctagaatgaaagagtgcttccatccttcatcatccgtctttcagataaagaagtatctagttacctttgtcttaaattaaaacaatttcaaaaggttgcatgtgctggtggaccagttgaaatccacagctcccatattgctgctcattgccactgttattgatgccctggagatgatttaaaattcagttatgttgcttgtgatggtggtatttaaaaatctataattttggctgggcgtggtggctcatacctataatcccagctctttgggaggccaaggcaggtggatcacaaggtcaggagtttgagaatagcctggccaacagagaaaccccgcctctactaataatacaaaaattagccggtcgtggtggtgtgcacctgcaatcccagctactcaggaggctgaggcaggagaattgcttgaacccggaggcggaggttgcagtgagctgagattgtgacactgcactccagcctgggcgatagagcaagactctatcttgaagaaaataaaaaataaataaataaaatctataatttttatactcatgtgctattatagtgaccctgtgagacatcataatgccttaatgatagcttgtcttgtttttactttcacttacatctatagttccaaatgttttattgaattgtgctttatttgataattcatagttgtaaactgacctcatcccatatttgtatttttacaatctcaacagttttatcagggacatatttttatattctgtagcataatacagtgccttctgtagagcttagtttcatgtgcagtgatgtgtcagaatgaaatatctgcccagtggtattgaatttcatgtattatgatttacatattcttctgtgtatcaactggttttatattacccagagaatgcttatggtggtggttgagagttgtgtattgctattgactgtacgggccatagacatatttgtaggtatattaaatttgctttgtacttctcacacaattgatttggtgggcattcttcttaattatacttgatgggtgcatacataaattcattcttggttaaaaaaattcagatagtgtagatatggcagtggttcctttaatccctccaattatttatttaccttatatatctgggaactttgtataaaaactaaacactggcctggcacggtggctcatgcctgtcatcccagctctttgggaggcccaggcgggtggatgtcttgagctcaggagtttgagaacagcctgggcaaaatgtggcaaaaccctgtctctacaaaaaaatacaaaagtgacccaagtgtggtggtgcacacctgcagtcccaggtactcgggaggctgaggtgggaggattgcttgagcctgggaagtggaggctgcagtgaactgagatcacaccactgccctttggcctgggtgacaggccgagaccctgtctcaaaaaacctgaacacttctttgttatgtttctacaatttgacacaataattcaagtcagccaagcactttaaaaattattttgaaataattttagatttataggaaagttgtcaaaatagggtagagttaattatatataaccttatgcagtttccctgataaccacttatataaccatagcacagttataaaaaaattatcaggaaattcactggtataataccattaactaaactgtggccctttttgactttcaccggtttttcacctcctgtatttttctctgttccaggatcccatccaggatcccacattaccttcagttgttgtttctcctttatttcctgcaatctattaaagattctaatcctttctttgtctttcatgacttcagcaaacagttttagttggatgcttagtatataccagtcactgagattggtgcttgagggaagggagataaatgaatggatgagacatggcccttacctaatgaggtgagccaacacatagacaagtaatgctaaaacaatgtagtgcctttaaaaggcctttgtactatctccctagagaagagagagttgctgactcactgaataacagtgttgaggcagcattttcagaagaaatgacattgatctgggtcttaaagaatggggaaacttttccttgtggagaaatggagtggaagaggagttcatcatggacaggcaggggcatttggcatgaaagtgtgaaagactggcttgtttgcagactggcaaatcacttgataggaatggagcatagggtatgtgaagaacacagtgaggcatgaaactagaagagtagttacaaagctaccttttttcattactttttattaataaatatatcctcatatttgtagggtaagttttggcttaaattttttttaaatctcattattcatacttaatgagcatttaattgtaatcagtgtttctagttttaaactgcacaacattaagattgttactgtacttttggaaagaaaaagagaacaaataattatgcttagctgttgcaatagcatctaatagcatttaaattctgttaataaagaatatgaatttattctgtaatgcctattgggcacctattatatggcaggcactgtttgaggtgagagagatatagcagcaaagaaaagagaaaaactcctgctcttgttctaatatattctagtggtcctagttgcaatatgtttgaactaacatggtagttcagtcaacaagtcaaatgttaactgcctagcatgttatctagatgctcagcagatttttaaaaaatgaatagatatatgactgggtcttgaaggagtaaaagaatttcaggctgggcacggtggctcatgcctgtaatcacagcactttgggagaccaaggcaggcggataacctaaggtcaggagttcaggaccagcctggcccaacatggtgaaaccttgtcttttcaaaaaatacaaaaattagccaggtgtggtggtgggcccttgtaatcccagctacttgggaggctgaggcaggaaaattgcttgaacccgggaggcagaggttgcagtgagctgagattgtgctgttgcactccaacctgggtgacaagagtgaaactccatctcaaaaaagaaaagaatttcattgagtagaggtttgctggcatgagtaatttttgtttatttcatatgcattcttggagattattcttaggtagttagaacacattgaagatattatttcattgtcttttgacttcaattgtcaatctcaggtaattgtcttttccctggctgtctttaaaaatattttctctgggccgtgcatggtggctcacgcttgtaatcctagcactttgggaggctgaggcaggtggatcaccagaggtcaggagttcaagaccagcctggacaacatagcaaaaccccatctctactaaaaatatattaaaaaaatgggccaggcgtggtggcaggtgcctgtaatcccagctacttgggaggctaaagcaggagaattacctgaacctggggcatggaggttgcagtgagccaagatcgcaccacttcactccagcctgggcaaaagagcaaaactccatatctatctatctatatatatatatttttttcctctggttcttatttttgaagtttttgtacaatatatcaagatacagatttatttttatttattctgctaggtatctgaggattggtattttagttcaggaaaattcgcagccattatttcttcacatactgtttgtgcttcatcctctttttttgtttgtttttttgagatgaagtcttgctctgtcatccaggctggagtgcagtggcgtgatcatggctccactgcaacctctgcctcctgggttcaagctatcctcccacctcagcctcccgagcagctgggattacaggtgtgctccaccacgccctgctaatttttaaatttttttagtagagatgggatttcatcatgttggccaggctggtcttgaactcctgatctcaggcgatccgcccacctaggcctcccaaagtgctgggattaacaggcatgagccaccatacccagcctgcttcatcctcttttaatctcattttcagtctccaattaaacatatgttaaaatttctcactgtatgctctatgcctttaccctcttttgtgtttttcttctttttctgagctgtactcagtttactgattctctcttcaactatatctaatctgtcattagttatagaatttttatttagttatcaaatttgtcatcttttatagtttatagttccctgttaaaaccatttagtttggtttttatctctttgaatatagttaatgtcattgtttttaaatctttacctgtattttcaatatctgaagttcctgtgggtcttcttctgtagtttcttgtttctgctggttctgactcatggtgtttgttttttcctgtgcctgattacatcctggatgttgtttttgaaaaagtatttatagaaataatttgaggttgagaattttcatatgcttctgccttctgcctaggttgtacagtttaaggcctcctcaagccaagttcatgattcaggtattgtgagttgggctgcaaacctgtgtgcaggctggttacttacagttcactttccctctttgaagccccatttacaataggggttggtatccttgagaccccacctgcttaggctccagatgtcaccagaatttcacatcagctttatttcctggattggtaaatataaccccatgataaaagtggctctgagtgttgggtttacctcttggacttcctgtcctcaccaatttttgaccgaaaattcaaccctatgttgttagctctttgaattacctattctgtcctcattagaagagtgcctccagcatttattgcctaaacatgacagctgagtatttttagtttgattttttttttaacatttgctaataatacgttttcaaccagatcataaactttgtggataaggtccctgtctgctatttctttacccttctcatatagcatttaatacaatgataggtggataattggttctcttggccagttgactgatcaaggggcaattctccaaactctggtgatttctccttttcgttcgtaagactgcttttataccccaacaaagaaacttgttataatttaatagtggctgtgtccatttttcttttcttctctgctgttccatcccaaggtgggatggccccaattagactaaccactgaaaccctgggcataaaatggtgcccagggagcttttcttcatattaatttgtgtgtactctaaaaggaaagattatttggcttgctcataaatccaaaattttggtgatgaaaatatgtttataattatttcttttgagcttgatttgttgtggattttttcctttattttggtttaagatcaaatggtttcctaatgtgtatgggtcactgtagtctaaatttttttttttttttttttttttgagatggagttttgcccttgttgcccaggctggagttaaatggcgagatcttgcctcactgcaacctccacctcctggcttcaagtgattctcctgcctcatcctcctgagtagctgggattacagatgcctgccaccacgcccagctaattttgtatttttagtagagacaagattttatcatgttggccaggccggtctggaactcctgacctcaggtgatccgcctgccttgaactcccaaagtgctgggattataggcatgagccaccgtgcctggcctctaaatatttttaaagtatagatgtttttaaacttgtagctcctgagtgtgaactgtcccttgctgttttttgggcatctatcaaggcatttgttctaaccactgagtaagaaggacatcactaagggggttgtagctatacctttcttctttttatctttaattaacatgcattgactgcctggtatgttagaaacagacctgcctattacagtctcattcccttccatactcatccttgcttgtgtggctacctcccaagctaggactgcaagacccttatcactcctgcttactattggtttttgtgtccttttggcaattttctagtggctgcttgaactattggttgtcagattgacctgatttgtttcacttgtaaacaaaatgcttaagccactgttgatttttgtggcagctcagttgcttagagcaaggtgttaatgagacatcggtcataggtccaggctctgggttgactggtaagctttgctctggcccatggccacagaccctgactcccccttgccagctgtcttgcacatgtagctatggctcattatggggacacagcagggggtggagataagacaaggcaaatctgtcatctctgccagaaaagacaactcctactgataggtcagtaaccttttcattggaagaacagcacgttagtattagcttctgtagatgtgtctaactgagtctttttcttaaaataactcatgtgattgtatgggttgtctgcagcaagtttagaatactgctcacattttaaagcatgtttgaatataaggatggctttttagtttgtgaagattattgtccttaatcagggattcttaatatcattctctaaagtagaaaagtgagctttagaagtcaaatttgataaagctctagaaaacaactgcaaaattgctgttataaagaaacctgtcaaatttaggaagtgccctccaggagcccttcatcccaaccaatcctctcctaaaagaaaggaaaaaaagaagaaagatggctaggtagatggaatagtgatcagaaaaaaagaacttttctagaaaagcataccagtgtgctctttaccagagcattttagcaggtaatattttacaaaggacccagcagataattgggcaggttttttctttaggaacttagtgttgatggcctgaattaatctgactaggaatttagacatttcttcatgatatattttgagtccatagatgatctgattctaatgtgacttcagtttttaacttacatagcgttaagcaaaaggatgtgtgtgtatgtatgtgtgtttgttttacatcctaaaggtattacaggccccatggtaaactttttggctcaagtgaatccagagtttggtatatgtaacctccagtggtggttcatgaacaaacacttcatttctgtagtcatatttttttttaaagaataaaagtgagccaggtttaaaacttgttaagaaaataatagcacaggtgatacacagatgaagcaaaattgccgtggatggtctgggaatgcctgaggattgagaaacactggctgaattatacactgtggcagaagaaattataggcccttagaaacaggtagaggttattggaaagattcaagcacctaatgtttagttagaaggtaagtaagctggtttcttaagttcttgtttatttattgggtgtgggctcaggataagttagtttgaaatagatcttagagaagtaaatgcaagacaactttatcaatgagtcatgggcaaacaattctattattagaagtagtatagaaaaggagtaggagaagtagaagggaggaagtctagtattcattcatttatttattcattaattcagccactatttcttgagcacctggtgtatgtcaggcactgttgtaggcactggggacacagcagggagcaaaacagacaagtctctgccctcatgaaattcatttacatcctaatgggaagagacaaataatgtaagtgagtatatagcatgtcagctgtgagaaatgctatggagaaaaataaagcagagtaagggaattaaggagtgatgggatggggaggcattgcttttttaaatagtttgatgaggaaagacctctctaagaaagtgacatttaacttgacttctgagggaagtgagggagcattccaggcatggagaaggagtgttctagatggagggaacagcaagtgcaaagagcccttgacatgtctgagaaacagataagaggccagtgtggctggcgtggagagagaggggagagtcgtcaagtagtaagaggtgagagcagatgggaggaaggtctcagcacaggtcaggcctctggctttgctgagagtgatggatgcctttgcagggttttgaacagaggaggcacatgatttgacttaacgttttaacaagctgtttcctgctgctgtgttgagaataagctgtaggcggcaccaaggtggcagctgggagggtattgccacaaaacaagcaagagatatgatggtttaggccagtggtaatggtggagagtgtgagaagaggacagattctggatgtattttgaagtagagcccgcagaatttgttgatgaacttgatgcagagtgttagaaaaagagaagacttcaaggttattggcctgaataactggaaggatggagttatctatcactgagataaacagaggtaacagaagtaaaggggagagatggccatggtagaaggtggattacacctttaaatttttaaaacatatttttatttaaaatagccctcactccctggcccagtgcacacaaaggacctgatttgcttttaccctgagtttgtcactgtagatatcctggaatacttcgttaaaaactataaataaagtggccataatacggctcattttgttcagattctaaaaaaaaattccttcataagcagttggcttccaaatagcaatgcatgctgtcagtttggtgactaattgggttagaggttaatagcaaggcagtcctataaacatcaacgggagtggtgtatccaaatgaaagcttgcattaggcaacaattcaaagaatgagaatgactaaataccatgttacaagccaagtgaattatattaagagttttaactttgagagaaagggacgttacccctgaaataactatcttagttggatcttccctacttaatactcatagttgggttgtaaaaatgtaaaggttaccatcaaaacagcacttcttaaccatgaaattgactaactttgtaaaattagaaattctgttacttacttcctactatgctgattggacattccttcttttgccaaaagaacagaaagttggattttgtgccttctagccaagagaaccacacacctctctctctgtagaccagctaaatgcttcctactgctcggtgatgaaatcagatcatggaatcagtcagtttgctatactgaattttttttttttcagctgtgttctaattgaacctttggggaataaactaattcttaacatctgaaagtttaaaggtctgatactagaatttatggggtggtagaggagaccttttagtctctgtatccaaaccaaaatgtaaatttacttttatttattttttattttttgagaaggagtctcgcttaggctggagtgcagtgacatgatctcggctcactgcaacctctgcctcccgggttcaagcaattctccctacctcagcctcccaattagctgggattacaggtgctcttcaccacgtctggctaatttttgtattatttagtagagacagggttttgccatgttggccaggctggtcttgaactcctgacctcacgtgatccgcccacctcagcctccaaaagtgctgggattacaggcgtgagccactgagcctggccaatttctttttttattgtgggataatcattccatacttctccctcctctctagtccccacccccacccccctttttccccccacaagtgaagatgatttcctgtgctggtctaggattagttttgttacagtctgtctttataagaacatttcttttccataatccagaagcattttgtaaaacctatgcctggaaattgagtcactttttattgcttagattttcttcacagaaaaacataggttctgttggatgagtatttgttgtgaaagcaaattattaaggggtgaaaattgtctatacaagttgatgtataggaggatatctgaactggattagttgctcttttatctgtgttttcaaagctctttaatagtaactcttataacacttataacagtgttatcactattgtttgggcatcattccattctgctagactgggaattcttttataatacagtgcctgataggcatccattcattccttgaaataatgtattgagtgctcattatgtgcttgaaatagagtgtgtgcaggagccagagcagtcggcagaacagatgcagcttgtgtcgcatgtgcgtacagcccatggcagggtggggggcaggggacccagcaaacaagatacagataactgcgcagtacagtgccaatatgcacaggaacagtgactgtcccctacctacataaatgcatagacctcatatgtgtattgtgaatcctctataattgttgaatttgactttgaaattaaacacttgatattttagactagtcaaaaatgggatatgttattattttaataaaaacaccattgtatccagccgggcacagtggctcacgcctataatcctagcactttgggaagccgaggcgggcagatcacctgaggtcaggagttcaagaccagcttggccaacatggcaaaaccccgtctctactaaaaatacaaaaattagctgggtgtggtggcacacgcctgtaatcccagctacttgggaggctgaggcaggataatcacttgaaccctggaggcctaggttgcagtgagtcgagattgcaccactgcactccagcctgggcaacagactgagactctgtctcaaaaaacaacaacgacaacaaaaataacaccactgtatccatattgcctacaggagaaaatgcagatcacttattttatgtatgtgttgaatcattttaaataacctgacggaggtcctttcttgggcccatgcctctgcacatgttgggcatgttgtagttgtcgttactagcaagacacacctaccctttaagaccagtctaaatgccaccttgttccctccatgtaatctcagaacttctttaagggcaaggaccaaattacgtctgtgaaaccctagagtttgatctaccacttcacgtggaggcatgggacagaggttttgttaatgagtgaatgtatccatttaataagttccttcttcagtacactcttgagacctattctggctttcccaggaaacagctgaaggagtgacctccaatcaagtcagctctgtgtcaatccttcattttcggatgttttttcttccttttctcacagggtcataaggatcaaatgtaataatgatgtaagagttaagcgtattcaataaagggaggcagtggaatcatcacaatgttgatcatcacaatcaacattattattactgcaccactatagttccttgtaatacacagtccagaaatattatcacaaaatctcactgaggatgtcattgttctgggtttgacctagatgttgatgtaatgaacagttctctatcagttagtgtgttggcctagcacaggtgcttgacaaaggccctattcagacttctgtgcattacttcaaacccctccctttgctcccatagtatagtaatgaattaggagtcatatcttttgactggcaagggactgcctaaagcagatccctgcagattggggcctcactgtttctgtgggtataaagaacctctcgggagagcctgaatgatcaggagatctgaactggggagccatcggcccagcaggaggtgcctctgcttggccaaccagagcctgctgcaagaaaccttttttttttttttttttttggttctgacaggcttgttggggaaattgaaaatctcctgtttgaaagccagataatttaaaatcctttctgattcagaatctcagcaagtagtgaagggctaggttattgattgtgggaaatggggcagcctcaaagggctctgggctatctcagtaccccatctccctcacccctcacgcttcctcaggtttctctctcatgctagcttggaatggatggtgtatttcctacccagttgcctttgtttataagcatccaccaccgctgcagtagggtcaggaaactggcaatttcctcagtgatccttgcccttgaaccctatctcctccagcctaggaagtattcagaccaagtactcatgtgtgactctccagtgcttctggatagagaagaccctctgagctgccctaaactcgcaagagaatactccacaggcttatgtaagccaaaccagatcatgagtcagacatctgaactcatcaacaaaaagtgctccaggaaaaagaaatggtctacctggcatattattgtttgaaaatttattttaagtcaatcctctatttcattaagggtaataataatcagtctacaatgcaaaactcagggaaaagtaaatttcattttgtatagctgtaatataacattttttactctgctcaaaattcttgaaattgttaatccaactctataaattaggatatttgagtaaagtaagtatccattgtttgactgtgccagaagcaggagttaactttttctttctctggttaaaattatcacttacttgatagctaagtaattttttgaaagtctcttatatcctgatggtacactaaggccctgaagagagtataaaggtgcaagattcagtcccctctctcaagaaactagcagtatgattggatggataagatttatgcatgtgaaacagagaatgctagatattttgggtggtaatcaagtgtaatagtatgtgattttagttataagcgtgatgagtgcaggaagggagatgaaaaataaataatatttagtgaactccactactacagaataaatatttataatattttctatttcatcaggaagaacaatttgaatcactggcttaatcactggtggggggcctggtttttagtctgtgtcttaaaattcttagctcacttatgtcatttgtcatatgaactttttggagaaagaaatatttagtttttatacgtagtttttaagactttaaaggttttataaccctt

SEQ ID NO: 23 - DNA, 6537 bp, Homo sapiens
gataatctccatttttgtcatgggactgttaaaaacgtttggaagttccaattctggtcttgatttcccagttaaagatgttctttcacccgaatgcagtctttcctgttggtaaaataagacaaccatcaacattgcctgtttgtctgcttttgaatctcttaaggatggatgtttgtaagatgttgcttaatacagtctggaatactctgtccatttgttgaattgtaaatgactttcaaatgtgcaagttctgttaaatacaaagagaacctctatgggtaacttttgtgttgaagaagtcatttgtcaaccatggtaaaacttgcaaacccactttatacagagtggattcttgaagctatacagaaaataaaaaagcaaaagcaaaggccctctgaagagagaatctgccatgcggtcagtacttcccatgggttggataagaagacagtctctgaacagctggaactcagtgttcaggatggctcagttctcaaagtcaccaacaaaggccttgcctcctataaggacccagacaaccctgggcgcttttcatcagttaaaccaggcacttttcctaagtcagccaaggggtctagaggatcatgtaatgatctccgcaatgtggattggaataaacttttaaggagagcaattgaaggacttgaggagccgaatggctcctccctgaagaacatagagaagtatctcagaagtcaaagtgatctcacaagcaccaccaacaacccagcctttcagcagcggctgcgactgggggccaaacgcgctgtgaataatgggaggttactgaaagacggaccgcagtacagggtcaattatgggagcttagatggcaaaggggcacctcagtatcccagtgcattcccatcctcgctcccacctgtcagccttctaccccatgagaaagaccagccccgtgctgatcccattccaatatgtagcttctgtttggggactaaagaatcaaatcgtgaaaagaaaccagaagaactcctctcttgtgcagattgtggcagtagtggacacccatcctgtttgaaattttgtcctgaattaacaacaaatgtaaaggccttaaggtggcagtgcatcgaatgcaagacatgcagtgcctgtagagtccaaggcagaaatgctgataatatgcttttttgtgattcctgtgatagaggatttcatatggaatgctgtgacccaccactttccagaatgccaaaagggatgtggatttgccaagtctgcagaccaaagaaaaagggaagaaaactacttcatgagaaagctgcacaaataaaacgacgatatgcaaaacccattggacgaccgaaaaataaattaaagcaacgattgttgtctgtaaccagtgatgaaggatccatgaatgcattcacaggaagggggtcacctggtaggggtcaaaagactaaagtctgtaccacaccttcatctggtcatgctgcatctgggaaggactcaagcagcagattggctgttacagaccccactcggcctggtgccaccaccaaaatcaccaccacctccacctacatttctgcctctacacttaaagttaacaagaaaaccaaagggctcattgatggccttactaagttttttacaccatcacctgatggtcgcagatcacgaggtgaaattatagacttttcaaagcactatcgtccaaggaaaaaggtctctcagaaacagtcatgcacttctcatgtgttggctacaggtaccacacaaaagctaaaacctccaccttcttcacttccacccccaacccccatctccggtcagagccccagttcacaaaagtccagcacggccacttcttctccctctccccagagttcttccagccagtgcagtgtgccctccctgagcagccttaccactaacagccagctgaaggcactctttgatgggctttctcatactataccactcagggacagtctcgcaaaaagggacaccccgagttatgcaccacccaaacgtatgcgtcgtaaaactgaattatcttccacggcaaaatctaaagcccacttctttggcaaaagagatattagaagtcggtttatttctcactcctcctcctctagctgggggatggctagaggaagtatttttaaagcaattgctcacttcaagcgaacaactttccttaaaaagcacaggatgctaggcagattaaaatataaagtgacccctcagatggggaccccctcaccagggaaggggagcttgacagacggaaggattaaacctgatcaggatgatgatactgaaataaaaataaacatcaaacaagaaagtgcagatgtaaatgtgattggaaacaaggatgtcgttactgaagaggatttggatgtttttaagcaggcccaggaactttcttgggagaaaatagagtgtgagagtggggtggaagactgtggccggtacccttctgtgattgaatttggtaaatatgaaatccaaacctggtactcctcgccttacccacaggaatatgcaagattaccaaagctttacctgtgtgaattctgtcttaaatatatgaaaagtaaaaatattttgctaagacactccaagaagtgtggatggtttcatcctccagcaaatgaaatttaccgaaggaaagacctttcagtatttgaggttgatgggaatatgagcaaaatttattgccaaaacctttgcttgttagccaagctcttcctggaccacaaaacgttgtattatgatgtcgagccattccttttttatgtccttacaaaaaatgatgaaaagggctgtcatctggttggatacctctctaaggaaaagctttgccagcagaagtataatgtctcctgcataatgatcatgccccagcaccaaaggcaaggatttggacggtttctcattgatttcagctatttgctttctagaagagaaggccaagcagggtctcctgaaaagcctctctccgatctgggccgtctctcctacctggcatattggaagagcgtcatcttggagtatctctaccaccaccatgagaggcacatcagcatcaaggcaattagcagagcgacgggcatgtgcccacatgacattgccaccactctgcagcacctccacatgatcgacaagagagatggcagatttgtcatcattagacgggaaaagttgatattgagccacatggaaaagctgaaaacctgttccagagccaatgaacttgatccagacagtctgaggtggaccccaattttaatttctaatgctgcagtgtctgaagaagagcgagaagctgagaaagaggctgagcggctaatggaacaagctagctgctgggagaaggaggaacaagaaatcctgtcaactagagctaacagtaggcaatcacctgcaaaagtacaatcgaaaaataaatatttgcattccccggagagccggccagtcacaggggagcgagggcagctgctggagctgtctaaagagagcagtgaagaagaagaggaggaggaggacgaggaggaggaagaagaggaggaagaagaggaagaggatgaagaggaggaagaagaggaagaagaagaagaagaagaagaaaatattcaaagctctcccccaagattgacgaaaccacagtcagttgccataaagagaaagaggccttttgtactaaagaagaaaaggggtcgtaaacgcaggaggatcaacagcagtgtaacaacagagaccatttcagagacgacagaagtactgaatgagccctttgacaactcagatgaagagaggccaatgccacagctggagcctacctgtgagattgaagtggaggaagatggcaggaagccagtcctgagaaaagcattccagcatcagcctgggaagaaaagacaaacagaggaagaggaaggaaaagacaatcattgcttcaagaatgctgacccttgtagaaacaatatgaatgatgattcaagtaacttgaaagaaggcagtaaagacaatcccgaacctctaaagtgcaaacaagtgtggccaaaaggaacaaagcgcggtctatctaagtggaggcaaaacaaagagaggaagaccggatttaaactgaatttgtacaccccgccagaaacacccatggagcctgacgagcaggtaacagtggaagaacagaaggagacttcagaaggaaaaaccagccccagtcccatcaggattgaggaggaggtcaaggaaactggggaagccctgttgcctcaagaggaaaacagaagggaagaaacatgtgcccctgtaagtccaaacacatcaccaggtgaaaaaccagaagatgatctcatcaaacctgaggaagaggaagaggaggaggaggaggaagaggaagaagaggaagaagaggaaggggaagaagaagaaggaggaggaaatgtagaaaaagatccagatggtgctaaaagccaagaaaaagaggaaccagaaatctccacggaaaaagaagactctgcacgtttggatgatcacgaagaggaggaggaagaggatgaagagccatcccacaacgaggaccatgatgccgatgacgaggatgacagccacatggagtctgccgaagtggagaaggaagagctgcccagagaaagcttcaaagaagtactggaaaaccaggagacttttttagaccttaatgtgcagcctggtcactcgaacccagaggtcttaatggactgtggcgtcgacctgacagcttcttgtaacagtgagcccaaggagcttgctggggaccctgaagctgtacccgaatctgacgaggagccacccccaggagaacaggcacagaagcaggaccaaaagaacagcaaggaagtcgatacagagttcaaagagggaaacccagcaaccatggaaatcgactctgagactgtccaggccgttcagtctttgacccaggagagcagcgaacaggacgacacctttcaggattgtgccgagactcaagaggcctgtagaagcctacagaactacacccgtgcagaccaaagtccacagattgccaccacgctcgacgattgccaacagtcggaccacagtagcccagtttcatccgtccactcccatcctggccagtccgtacgttctgtcaacagcccaagtgtccctgctctggaaaacagctacgcccaaatcagcccagatcaaagtgccatctcagtgccatctctgcagaacatggaaaccagtcccatgatggatgtcccatcagtttcagatcattcacagcaagtcgtagacagtggatttagtgacctgggcagtatcgagagcacaactgagaactacgaaaacccaagcagctacgattctactatgggaggcagcatctgtggaaacggctcttcacagaacagctgctcctatagcaacctcacctccagcagtctgacacagagcagctgtgctgtcacccagcagatgtccaacatcagcgggagctgcagcatgctgcagcaaaccagcatcagctcccctccgacctgcagcgtcaagtctcctcaaggctgtgtggtggagaggcctccgagcagcagccagcagctggctcagtgcagcatggctgctaacttcaccccacccatgcagctggctgaaatccccgagacgagcaacgccaacattggcttatacgagcgaatgggtcagagtgattttggggctgggcattacccgcagccgtcagccaccttcagccttgccaaactgcagcagttaactaatacacttattgatcattcattgccttacagccattccgctgctgtgacttcctatgcaaacagtgcctctttgtccacaccattaagtaacacagggcttgttcaactttctcagtctccacactccgtccctgggggaccccaagcacaagctaccatgaccccaccccccaacctgactcctcctccaatgaatctgccgccgcctcttttgcaacggaacatggctgcatcaaatattggcatctctcacagccaaagactgcaaacccagattgccagcaagggccacatctccatgagaaccaagtcagcgtctctgtcaccagccgctgccacccatcagtcacaaatctatgggcgctcccagactgtagccatgcagggtcctgcacggactttaacgatgcaaagaggcatgaacatgagtgtgaacctgatgccagcgccagcctacaatgtcaactctgtgaacatgaacatgaacactctcaacgccatgaatgggtacagcatgtcccagccaatgatgaacagtggctaccacagcaatcatggctatatgaatcaaacgccccaataccctatgcagatgcagatgggcatgatgggcacccagccatatgcccagcagccaatgcagaccccaccccacggtaacatgatgtacacggcccccggacatcacggctacatgaacacaggcatgtccaaacagtctctcaatggctcctacatgagaaggtag

SEQ ID NO: 24 - DNA, 6222 bp, Homo sapiens
atggtaaaacttgcaaacccactttatacagagtggattcttgaagctatacagaaaataaaaaagcaaaagcaaaggccctctgaagagagaatctgccatgcggtcagtacttcccatgggttggataagaagacagtctctgaacagctggaactcagtgttcaggatggctcagttctcaaagtcaccaacaaaggccttgcctcctataaggacccagacaaccctgggcgcttttcatcagttaaaccaggcacttttcctaagtcagccaaggggtctagaggatcatgtaatgatctccgcaatgtggattggaataaacttttaaggagagcaattgaaggacttgaggagccgaatggctcctccctgaagaacatagagaagtatctcagaagtcaaagtgatctcacaagcaccaccaacaacccagcctttcagcagcggctgcgactgggggccaaacgcgctgtgaataatgggaggttactgaaagacggaccgcagtacagggtcaattatgggagcttagatggcaaaggggcacctcagtatcccagtgcattcccatcctcgctcccacctgtcagccttctaccccatgagaaagaccagccccgtgctgatcccattccaatatgtagcttctgtttggggactaaagaatcaaatcgtgaaaagaaaccagaagaactcctctcttgtgcagattgtggcagtagtggacacccatcctgtttgaaattttgtcctgaattaacaacaaatgtaaaggccttaaggtggcagtgcatcgaatgcaagacatgcagtgcctgtagagtccaaggcagaaatgctgataatatgcttttttgtgattcctgtgatagaggatttcatatggaatgctgtgacccaccactttccagaatgccaaaagggatgtggatttgccaagtctgcagaccaaagaaaaagggaagaaaactacttcatgagaaagctgcacaaataaaacgacgatatgcaaaacccattggacgaccgaaaaataaattaaagcaacgattgttgtctgtaaccagtgatgaaggatccatgaatgcattcacaggaagggggtcacctggtaggggtcaaaagactaaagtctgtaccacaccttcatctggtcatgctgcatctgggaaggactcaagcagcagattggctgttacagaccccactcggcctggtgccaccaccaaaatcaccaccacctccacctacatttctgcctctacacttaaagttaacaagaaaaccaaagggctcattgatggccttactaagttttttacaccatcacctgatggtcgcagatcacgaggtgaaattatagacttttcaaagcactatcgtccaaggaaaaaggtctctcagaaacagtcatgcacttctcatgtgttggctacaggtaccacacaaaagctaaaacctccaccttcttcacttccacccccaacccccatctccggtcagagccccagttcacaaaagtccagcacggccacttcttctccctctccccagagttcttccagccagtgcagtgtgccctccctgagcagccttaccactaacagccagctgaaggcactctttgatgggctttctcatactataccactcagggacagtctcgcaaaaagggacaccccgagttatgcaccacccaaacgtatgcgtcgtaaaactgaattatcttccacggcaaaatctaaagcccacttctttggcaaaagagatattagaagtcggtttatttctcactcctcctcctctagctgggggatggctagaggaagtatttttaaagcaattgctcacttcaagcgaacaactttccttaaaaagcacaggatgctaggcagattaaaatataaagtgacccctcagatggggaccccctcaccagggaaggggagcttgacagacggaaggattaaacctgatcaggatgatgatactgaaataaaaataaacatcaaacaagaaagtgcagatgtaaatgtgattggaaacaaggatgtcgttactgaagaggatttggatgtttttaagcaggcccaggaactttcttgggagaaaatagagtgtgagagtggggtggaagactgtggccggtacccttctgtgattgaatttggtaaatatgaaatccaaacctggtactcctcgccttacccacaggaatatgcaagattaccaaagctttacctgtgtgaattctgtcttaaatatatgaaaagtaaaaatattttgctaagacactccaagaagtgtggatggtttcatcctccagcaaatgaaatttaccgaaggaaagacctttcagtatttgaggttgatgggaatatgagcaaaatttattgccaaaacctttgcttgttagccaagctcttcctggaccacaaaacgttgtattatgatgtcgagccattccttttttatgtccttacaaaaaatgatgaaaagggctgtcatctggttggatacctctctaaggaaaagctttgccagcagaagtataatgtctcctgcataatgatcatgccccagcaccaaaggcaaggatttggacggtttctcattgatttcagctatttgctttctagaagagaaggccaagcagggtctcctgaaaagcctctctccgatctgggccgtctctcctacctggcatattggaagagcgtcatcttggagtatctctaccaccaccatgagaggcacatcagcatcaaggcaattagcagagcgacgggcatgtgcccacatgacattgccaccactctgcagcacctccacatgatcgacaagagagatggcagatttgtcatcattagacgggaaaagttgatattgagccacatggaaaagctgaaaacctgttccagagccaatgaacttgatccagacagtctgaggtggaccccaattttaatttctaatgctgcagtgtctgaagaagagcgagaagctgagaaagaggctgagcggctaatggaacaagctagctgctgggagaaggaggaacaagaaatcctgtcaactagagctaacagtaggcaatcacctgcaaaagtacaatcgaaaaataaatatttgcattccccggagagccggccagtcacaggggagcgagggcagctgctggagctgtctaaagagagcagtgaagaagaagaggaggaggaggacgaggaggaggaagaagaggaggaagaagaggaagaggatgaagaggaggaagaagaggaagaagaagaagaagaagaagaaaatattcaaagctctcccccaagattgacgaaaccacagtcagttgccataaagagaaagaggccttttgtactaaagaagaaaaggggtcgtaaacgcaggaggatcaacagcagtgtaacaacagagaccatttcagagacgacagaagtactgaatgagccctttgacaactcagatgaagagaggccaatgccacagctggagcctacctgtgagattgaagtggaggaagatggcaggaagccagtcctgagaaaagcattccagcatcagcctgggaagaaaagacaaacagaggaagaggaaggaaaagacaatcattgcttcaagaatgctgacccttgtagaaacaatatgaatgatgattcaagtaacttgaaagaaggcagtaaagacaatcccgaacctctaaagtgcaaacaagtgtggccaaaaggaacaaagcgcggtctatctaagtggaggcaaaacaaagagaggaagaccggatttaaactgaatttgtacaccccgccagaaacacccatggagcctgacgagcaggtaacagtggaagaacagaaggagacttcagaaggaaaaaccagccccagtcccatcaggattgaggaggaggtcaaggaaactggggaagccctgttgcctcaagaggaaaacagaagggaagaaacatgtgcccctgtaagtccaaacacatcaccaggtgaaaaaccagaagatgatctcatcaaacctgaggaagaggaagaggaggaggaggaggaagaggaagaagaggaagaagaggaaggggaagaagaagaaggaggaggaaatgtagaaaaagatccagatggtgctaaaagccaagaaaaagaggaaccagaaatctccacggaaaaagaagactctgcacgtttggatgatcacgaagaggaggaggaagaggatgaagagccatcccacaacgaggaccatgatgccgatgacgaggatgacagccacatggagtctgccgaagtggagaaggaagagctgcccagagaaagcttcaaagaagtactggaaaaccaggagacttttttagaccttaatgtgcagcctggtcactcgaacccagaggtcttaatggactgtggcgtcgacctgacagcttcttgtaacagtgagcccaaggagcttgctggggaccctgaagctgtacccgaatctgacgaggagccacccccaggagaacaggcacagaagcaggaccaaaagaacagcaaggaagtcgatacagagttcaaagagggaaacccagcaaccatggaaatcgactctgagactgtccaggccgttcagtctttgacccaggagagcagcgaacaggacgacacctttcaggattgtgccgagactcaagaggcctgtagaagcctacagaactacacccgtgcagaccaaagtccacagattgccaccacgctcgacgattgccaacagtcggaccacagtagcccagtttcatccgtccactcccatcctggccagtccgtacgttctgtcaacagcccaagtgtccctgctctggaaaacagctacgcccaaatcagcccagatcaaagtgccatctcagtgccatctctgcagaacatggaaaccagtcccatgatggatgtcccatcagtttcagatcattcacagcaagtcgtagacagtggatttagtgacctgggcagtatcgagagcacaactgagaactacgaaaacccaagcagctacgattctactatgggaggcagcatctgtggaaacggctcttcacagaacagctgctcctatagcaacctcacctccagcagtctgacacagagcagctgtgctgtcacccagcagatgtccaacatcagcgggagctgcagcatgctgcagcaaaccagcatcagctcccctccgacctgcagcgtcaagtctcctcaaggctgtgtggtggagaggcctccgagcagcagccagcagctggctcagtgcagcatggctgctaacttcaccccacccatgcagctggctgaaatccccgagacgagcaacgccaacattggcttatacgagcgaatgggtcagagtgattttggggctgggcattacccgcagccgtcagccaccttcagccttgccaaactgcagcagttaactaatacacttattgatcattcattgccttacagccattccgctgctgtgacttcctatgcaaacagtgcctctttgtccacaccattaagtaacacagggcttgttcaactttctcagtctccacactccgtccctgggggaccccaagcacaagctaccatgaccccaccccccaacctgactcctcctccaatgaatctgccgccgcctcttttgcaacggaacatggctgcatcaaatattggcatctctcacagccaaagactgcaaacccagattgccagcaagggccacatctccatgagaaccaagtcagcgtctctgtcaccagccgctgccacccatcagtcacaaatctatgggcgctcccagactgtagccatgcagggtcctgcacggactttaacgatgcaaagaggcatgaacatgagtgtgaacctgatgccagcgccagcctacaatgtcaactctgtgaacatgaacatgaacactctcaacgccatgaatgggtacagcatgtcccagccaatgatgaacagtggctaccacagcaatcatggctatatgaatcaaacgccccaataccctatgcagatgcagatgggcatgatgggcacccagccatatgcccagcagccaatgcagaccccaccccacggtaacatgatgtacacggcccccggacatcacggctacatgaacacaggcatgtccaaacagtctctcaatggctcctacatgagaaggtag

SEQ ID NO: 25 - DNA, 13118 bp, Mus musculus
  misc_feature (1)..(2832): "n" at positions 1 through 2832 can be any base.
  misc_feature (3670)..(5514): "n" at positions 3670 through 5514 can be any base.
nnnnnnnnnnnnnnnnnnnnnnnnnnnnnnnnnnnnnnnnnnnnnnnnnnnnnnnnnnnnnnnnnnnnnnnnnnnnnnnnnnnnnnnnnnnnnnnnnnnnnnnnnnnnnnnnnnnnnnnnnnnnnnnnnnnnnnnnnnnnnnnnnnnnnnnnnnnnnnnnnnnnnnnnnnnnnnnnnnnnnnnnnnnnnnnnnnnnnnnnnnnnnnnnnnnnnnnnnnnnnnnnnnnnnnnnnnnnnnnnnnnnnnnnnnnnnnnnnnnnnnnnnnnnnnnnnnnnnnnnnnnnnnnnnnnnnnnnnnnnnnnnnnnnnnnnnnnnnnnnnnnnnnnnnnnnnnnnnnnnnnnnnnnnnnnnnnnnnnnnnnnnnnnnnnnnnnnnnnnnnnnnnnnnnnnnnnnnnnnnnnnnnnnnnnnnnnnnnnnnnnnnnnnnnnnnnnnnnnnnnnnnnnnnnnnnnnnnnnnnnnnnnnnnnnnnnnnnnnnnnnnnnnnnnnnnnnnnnnnnnnnnnnnnnnnnnnnnnnnnnnnnnnnnnnnnnnnnnnnnnnnnnnnnnnnnnnnnnnnnnnnnnnnnnnnnnnnnnnnnnnnnnnnnnnnnnnnnnnnnnnnnnnnnnnnnnnnnnnnnnnnnnnnnnnnnnnnnnnnnnnnnnnnnnnnnnnnnnnnnnnnnnnnnnnnnnnnnnnnnnnnnnnnnnnnnnnnnnnnnnnnnnnnnnnnnnnnnnnnnnnnnnnnnnnnnnnnnnnnnnnnnnnnnnnnnnnnnnnnnnnnnnnnnnnnnnnnnnnnnnnnnnnnnnnnnnnnnnnnnnnnnnnnnnnnnnnnnnnnnnnnnnnnnnnnnnnnnnnnnnnnnnnnnnnnnnnnnnnnnnnnnnnnnnnnnnnnnnnnnnnnnnnnnnnnnnnnnnnnnnnnnnnnnnnnnnnnnnnnnnnnnnnnnnnnnnnnnnnnnnnnnnnnnnnnnnnnnnnnnnnnnnnnnnnnnnnnnnnnnnnnnnnnnnnnnnnnnnnnnnnnnnnnnnnnnnnnnnnnnnnnnnnnnnnnnnnnnnnnnnnnnnnnnnnnnnnnnnnnnnnnnnnnnnnnnnnnnnnnnnnnnnnnnnnnnnnnnnnnnnnnnnnnnnnnnnnnnnnnnnnnnnnnnnnnnnnnnnnnnnnnnnnnnnnnnnnnnnnnnnnnnnnnnnnnnnnnnnnnnnnnnnnnnnnnnnnnnnnnnnnnnnnnnnnnnnnnnnnnnnnnnnnnnnnnnnnnnnnnnnnnnnnnnnnnnnnnnnnnnnnnnnnnnnnnnnnnnnnnnnnnnnnnnnnnnnnnnnnnnnnnnnnnnnnnnnnnnnnnnnnnnnnnnnnnnnnnnnnnnnnnnnnnnnnnnnnnnnnnnnnnnnnnnnnnnnnnnnnnnnnnnnnnnnnnnnnnnnnnnnnnnnnnnnnnnnnnnnnnnnnnnnnnnnnnnnnnnnnnnnnnnnnnnnnnnnnnnnnnnnnnnnnnnnnnnnnnnnnnnnnnnnnnnnnnnnnnnnnnnnnnnnnnnnnnnnnnnnnnnnnnnnnnnnnnnnnnnnnnnnnnnnnnnnnnnnnnnnnnnnnnnnnnnnnnnnnnnnnnnnnnnnnnnnnnnnnnnnnnnnnnnnnnnnnnnnnnnnnnnnnnnnnnnnnnnnnnnnnnnnnnnnnnnnnnnnnnnnnnnnnnnnnnnnnnnnnnnnnnnnnnnnnnnnnnnnnnnnnnnnnnnnnnnnnnnnnnnnnnnnnnnnnnnnnnnnnnnnnnnnnnnnnnnnnnnnnnnnnnnnnnnnnnnnnnnnnnnnnnnnnnnnnnnnnnnnnnnnnnnnnnnnnnnnnnnnnnnnnnnnnnnnnnnnnnnnnnnnnnnnnnnnnnnnnnnnnnnnnnnnnnnnnnnnnnnnnnnnnnnnnnnnnnnnnnnnnnnnnnnnnnnnnnnnnnnnnnnnnnnnnnnnnnnnnnnnnnnnnnnnnnnnnnnnnnnnnnnnnnnnnnnnnnnnnnnnnnnnnnnnnnnnnnnnnnnnnnnnnnnnnnnnnnnnnnnnnnnnnnnnnnnnnnnnnnnnnnnnnnnnnnnnnnnnnnnnnnnnnnnnnnnnnnnnnnnnnnnnnnnnnnnnnnnnnnnnnnnnnnnnnnnnnnnnnnnnnnnnnnnnnnnnnnnnnnnnnnnnnnnnnnnnnnnnnnnnnnnnnnnnnnnnnnnnnnnnnnnnnnnnnnnnnnnnnnnnnnnnnnnnnnnnnnnnnnnnnnnnnnnnnnnnnnnnnnnnnnnnnnnnnnnnnnnnnnnnnnnnnnnnnnnnnnnnnnnnnnnnnnnnnnnnnnnnnnnnnnnnnnnnnnnnnnnnnnnnnnnnnnnnnnnnnnnnnnnnnnnnnnnnnnnnnnnnnnnnnnnnnnnnnnnnnnnnnnnnnnnnnnnnnnnnnnnnnnnnnnnnnnnnnnnnnnnnnnnnnnnnnnnnnnnnnnnnnnnnnnnnnnnnnnnnnnnnnnnnnnnnnnnnnnnnnnnnnnnnnnnnnnnnnnnnnnnnnnnnnnnnnnnnnnnnnnnnnnnnnnnnnnnnnnnnnnnnnnnnnnnnnnnnnnnnnnnnnnnnnnnnnnnnnnnnnnnnnnnnnnnnnnnnnnnnnnnnnnnnnnnnnnnnnnnnnnnnnnnnnnnnnnnnnnnnnnnnnnnnnnnnnnnnnnnnnnnnnnnnnnnnnnnnnnnnnnnnnnnnnnnnnnnnnnnnnnnnnnnnnnnnnnnnnnnnnnnnnnnnnnnnnnnnnnnnnnnnnnnnnnnnnnnnnnnnnnnnnnnnnnnnnnnnnnnnnnnnnnnnnnnnnnnnnnnnnnnnnnnnnnnnnnnnnnnnnnnnnnnnnnnnnnnnnnnnnnnnnnntacttttcaacaccaataaacaagaccttctcaaggttggagttccctgcgagctgccagtcagctcccaccgggcatctgggcaccattttgtgcgctgcagccgttcagtatatacatacaaatgtcaaacatatttttgacttttcagcattaattaaaaccagggcgttatttgcatgtaataactgtttacttgttactttttatgaaactgaaatagtttacattctttcgaacatttcctgttcctgttggctcccttccccacgcacagatttctttcaaacgtagcccttaactggttgcaggttgatgggtggaaaatgtttgcttttatgaattaagctttcgttgctgctcctaattagtccccaagccccctttgtcatccccaatctctgagccctttgcaacttaattgaaggtctggccctgagtggagtgccacgggtgtagggtccaggtgatgggggcgggggcgggggcacattatagcatgtcgctagctagggaagtcggtggatggtgaaccccaggaggcattaggcactcaggattctcttcttcctccacactgctccctctcttgagaggtagcagggaaagaaaggggtgatcatgattctcttactgtggcccctctgctactaagaagtttttttgctttatttatgttgaggcagtctcacaccaggtatagtataggctggcctggaacttgttatgtagccaagattaaccccagatttttagtattggctctgcctcagtgctaggatcgcaggtgtgtgctaccgcacctaacccactgacatctcttagtgaattgtaccgnnnnnnnnnnnnnnnnnnnnnnnnnnnnnnnnnnnnnnnnnnnnnnnnnnnnnnnnnnnnnnnnnnnnnnnnnnnnnnnnnnnnnnnnnnnnnnnnnnnnnnnnnnnnnnnnnnnnnnnnnnnnnnnnnnnnnnnnnnnnnnnnnnnnnnnnnnnnnnnnnnnnnnnnnnnnnnnnnnnnnnnnnnnnnnnnnnnnnnnnnnnnnnnnnnnnnnnnnnnnnnnnnnnnnnnnnnnnnnnnnnnnnnnnnnnnnnnnnnnnnnnnnnnnnnnnnnnnnnnnnnnnnnnnnnnnnnnnnnnnnnnnnnnnnnnnnnnnnnnnnnnnnnnnnnnnnnnnnnnnnnnnnnnnnnnnnnnnnnnnnnnnnnnnnnnnnnnnnnnnnnnnnnnnnnnnnnnnnnnnnnnnnnnnnnnnnnnnnnnnnnnnnnnnnnnnnnnnnnnnnnnnnnnnnnnnnnnnnnnnnnnnnnnnnnnnnnnnnnnnnnnnnnnnnnnnnnnnnnnnnnnnnnnnnnnnnnnnnnnnnnnnnnnnnnnnnnnnnnnnnnnnnnnnnnnnnnnnnnnnnnnnnnnnnnnnnnnnnnnnnnnnnnnnnnnnnnnnnnnnnnnnnnnnnnnnnnnnnnnnnnnnnnnnnnnnnnnnnnnnnnnnnnnnnnnnnnnnnnnnnnnnnnnnnnnnnnnnnnnnnnnnnnnnnnnnnnnnnnnnnnnnnnnnnnnnnnnnnnnnnnnnnnnnnnnnnnnnnnnnnnnnnnnnnnnnnnnnnnnnnnnnnnnnnnnnnnnnnnnnnnnnnnnnnnnnnnnnnnnnnnnnnnnnnnnnnnnnnnnnnnnnnnnnnnnnnnnnnnnnnnnnnnnnnnnnnnnnnnnnnnnnnnnnnnnnnnnnnnnnnnnnnnnnnnnnnnnnnnnnnnnnnnnnnnnnnnnnnnnnnnnnnnnnnnnnnnnnnnnnnnnnnnnnnnnnnnnnnnnnnnnnnnnnnnnnnnnnnnnnnnnnnnnnnnnnnnnnnnnnnnnnnnnnnnnnnnnnnnnnnnnnnnnnnnnnnnnnnnnnnnnnnnnnnnnnnnnnnnnnnnnnnnnnnnnnnnnnnnnnnnnnnnnnnnnnnnnnnnnnnnnnnnnnnnnnnnnnnnnnnnnnnnnnnnnnnnnnnnnnnnnnnnnnnnnnnnnnnnnnnnnnnnnnnnnnnnnnnnnnnnnnnnnnnnnnnnnnnnnnnnnnnnnnnnnnnnnnnnnnnnnnnnnnnnnnnnnnnnnnnnnnnnnnnnnnnnnnnnnnnnnnnnnnnnnnnnnnnnnnnnnnnnnnnnnnnnnnnnnnnnnnnnnnnnnnnnnnnnnnnnnnnnnnnnnnnnnnnnnnnnnnnnnnnnnnnnnnnnnnnnnnnnnnnnnnnnnnnnnnnnnnnnnnnnnnnnnnnnnnnnnnnnnnnnnnnnnnnnnnnnnnnnnnnnnnnnnnnnnnnnnnnnnnnnnnnnnnnnnnnnnnnnnnnnnnnnnnnnnnnnnnnnnnnnnnnnnnnnnnnnnnnnnnnnnnnnnnnnnnnnnnnnnnnnnnnnnnnnnnnnnnnnnnnnnnnnnnnnnnnnnnnnnnnnnnnnnnnnnnnnnnnnnnnnnnnnnnnnnnnnnnnnnnnnnnnnnnnnnnnnnnnnnnnnnnnnnnnnnnnnnnnnnnnnnnnnnnnnnnnnnnnnnnnnnnnnnnnnnnnnnnnnnnnnnnnnnnnnnnnnnnnnnnnnnnnnnnnnnnnnnnnnnnnnnnnnnnnnnnnnnnnnnnnnnnnnnnnnnnnnnnnnnnnnnnnnnnnnnnnnnnnnnnnnnnnnnnnnnnnnnnnnnnnnnnnnnnnnnnnnnnnnnnnnnnnnnnnnnnnnnnntgtggagagaggcttggggggagagagctgtaggtgcgggctgatggcatcactgggcaagggataaacgcatcttgctgaagctgggaggttacagagctgaggggaggccccaggagtccagacagctccctgtgggcggggcttgtcagtcatacttcctgacccacttgagactgctgattggtcagggttgcagggtacacgtgtttcacacacctgatcaggacagccttcctacgggccccctccccctcctcccctaaccttatccccatcccccacccctgccgccagcaaccagagcccacatagtttcttgattgcgactcatggccttgtggcctggcaccatagcatggttgctaggctcttgcccagccagccacctcctgcatcttcctcttagttccctgcatcagagaaatgctcgcactgagcacctccaaggaaactggggacagctcactccacccatctttctcaaggtctcttgctcttggcccaaaacctgactccctttccagctctgtggttggttgagaaggcaaggagctgctggtgacctcagaagtggcatgtggtctgttccctggggcaggttgggaggtgggtggcagatgatgagttgtgtgtgtgaatcttgagtcctgcctggatactatgggagctgtggttacccagctcctctgtgagcctcagtctttgcatctggaaagttggtgcatttaaaatagttaatccggtctctatcatacacggggtagcatcctggggactgggggtagggtggggtggagatagggtgacactctggcccctgtgaacttagcacctaagagagagaaagtgagccagcaggcagattctgaagtgaactttgcaaagaaacttttacacaggtccaggggcaggaggcacatggagctggagaggggaacagctacatttagacactggggagggggatcatggtgaactggtggtctgtgtaacagattccacagtaagctccaacagtggttctggtgatgaccataacgttgagtttatgaggagcactgagactattcagagaaatctctaaggactgtcatgtgatctgtaaatgtctgcgtagcttgttggtgacaaggtcacaggcactgctcattagacttctgtggcttgtggcttgcactctggcttgagagaggctcttccagttaggggttggggacaatactattgcagatttttttcctgtcccagatccctggccagctctatactaagaagggccaaccacagaggccaaattgaaaatctccactctgtttgagggttttggccctggagatggaacccaggacctgaagcattctagacaaaccttctaacactgaagtcaacccccctccccctggcctctaaaatgtcacctttaaataaagtagctaggggaagtcctcattgaaaaggactacgtctgaaaaaggactctccagtacagacctagccctcagtctggagtcctggcagctaaggctccaggtatcagcctaccccaccccaccccacccccttcattgtggccctagaagcaatgaggtcagacagccactccaacttccccttcgtgcccccattggttgggaggaggagtctaggagagaaatgacctcaaaatgagaaggcagagagaagagtgtccccaaggggagtagaaaggaatctgaggccacctgccctgtgtctccccagactgtctgcagttctttttccagaaatcaagcaaatggtccctgggcctggggatgcggccgggctggctttcctaactcaaacctccaaggatagatgccttaatatttgtgtcctgggctctgctggccacctcagggaccttcttccagtgctgggtctatttcccagggtgctcggtactctcccagaagcccttgagtttggaggctcagctggctggctggcctggctgccttagccatgctcaggcgtctcctgtttctggagctagaattttcccttgagcaaagagaacaataagattgcctgtgtcctcttggagagcaggactgtgaaaactggccctcttcttagggcaccattaacatgacctgtctccagtagcctcctgggcatctctgggggccactccagagagacacaaatgcctgggcttggagtgcccagggggagttcccaagccactaacttgggttgagagtcagtccacagaggcaaagctggacgtggggaatggagcttgggtctctgtggagtcccatcttgtccccaccccacccacccaggctcatcttaaatggtaacggcgctggcctagacattggggaaacaggcagagagatgaagccctggacacagacagtgtacagcgtgataaaatgactaagatggtagaaaaaaatcaggcttgccctttgacgtacgtccctaaacctttggccttcaaggtagagtactttgaaagtacaccttcatctacttcctgcctggggaggtctctaacatggacagtagaagaaagagaaagagagaaagaggggggaaggaggggaggacagagagagacagagacagagacagagagacagagagaaaatggatcgtgagaaagaggtgaagttagaaatcagactatggtggccacatagcctatgggccacaacccatagctgcgaacaagcttcagatgcaacagttgtcaaaagtcctaaagccccaacgggaaagcctcaagaagaggagatagcgatgtgtgttggattctggcgatggatagtggccagagacagtttcagtctcactagtacaagaaaggcaaacaaaaccaagaggaattgaagatcttccgttgtgatagacagaagccggggcatttgggtgacgtgtgacctcacgtcactcctgatgaggtacgtgtcccaagagagtcaagatcggccaccacaaactcatcccgggcctctgaggtgacaccctcgctcaataccccttgtaactctctgggaggaagtttacagagaagagatgtagaaagagattttgacacatggaaggccatattttaaatggtaaagagaaaaaaaacacaaccaaaaccatattattttaaaagattttcccctctgaggaattttgaatggagacattgaagccaaacatctatctaaaaatagaacagggttctggaaataacagttgtgtctacagctcccagatcggccctctacagtgagggctgcacacaacagcaagaacttaacggtgacataagggggtggaccaatcaaagctgagacttctgccaagggaatacttagtagccattaaaaattgaagattatggagagcttgtaatggcatgaggaaagaaaacaagacgggggcctcagtggttagagtgctggctcctcttgcaggggagctgggtttgagtcccagcacacacacatggtggctcacaacaatcactaagtacagttccagggaatctgatgtcctgttctggtctttgagggtgccagatcacatgcatggtgcacatacatacatacatacatgcaggcaggcaaagtaaataaataaataaaatataaataaaaataaataaataaacaaacaagacaggtgctagaattggggaggcagagacaggtggatctcagcaagttcaaggccagcctggtttttacattgagttccaagacagccagggctacattgagagatcctgtctcaaaacccaacaaattaaaaaatgaaaagctatggatgttatcaccataacaactgtgtaaaaactgttccatccggaggagtgaaagagaaactccaaatgatggtggccgtctcagtcagtggaactgtgggtgggatttcttcttcttcttcttcttcttcttcttcttcttcttcttcttcttcttcttcttcttcttcttcttcttcttctttttgggggtggggttcgagacagggtttctctgtgtagtcctggctatcctgaactcactttgtagaccaggctggcctcgaactcagaaatctgcctgtctctgcctcccaagtgctgggattaaaggcatgcaccaccaagcccggcacttcttctttttaaataatgttttgtgttctcaatttttttccctgtaaagatcactaattgctctcaggaaaaagcacacacccatctttacctcaaaatcatatgagtccctaagtagatgatcacaaaaatatagtctcatagaatgaaggaagaaagccaaaagggccctgtgtagtcggaggacagctaaggccacacctcctgtggccttgaatgacaagcccaacagcttgaactacactctccctgccttctctctgtgatcacacgtgttggactactggcggctgggcccaggagggaggctgggggactgtgcatgcacctttcaccaattcctgccttgatttccccagggaagagtttcacgctcacaatcaccgtgttcaccaaccctacccaagtggctacctaccaccgagccatcaaggtcactgtggatggaccccgggaaccccgacgtaagtgctactgagccctagtcagggcaaagggtccaggggagaagggcaccgggggctgtacctgtagctctgtgtctccttccaagcactcaaagggtctcagtgctaaacttcagccgtctgggctcagcctcaggctctgaagggtcagcaaggagaccaagatggcccagactctctagggacagcaggaaagaggaagggcaccatggcgggcagcatttgggatgaggcttaggccagtctgctctgcaccccagctgcctctgcagtgatgaaggatgtaagggaacagctaccgagggtgccatgaaaccacatccccttctgaaagccctgcatcttcggagcccaggcacactggctacgggatccctgggcatccctgagaatagggatgcagtgagtgtacactgagcatcacctgcatttggcaattccctgtccctcagagtccgtccctcagtgtctgcagcagagggtggaatttgcacatgtactaaagaagcttttcatgatggctgagtcaaaaggtttccctgttctaggaggtgatggcccagtgtttgtggggaccagtatttgtgggggatatgctcctgcctcaggctgccagggcttgggacaggagggcagggcctgagacctctttctggtacccaggaaactcaaaggagcgtggctcgccaggtccacattagtgagagccattccagccaagagtcaggcttcgcccctcacttagtgctccagcaagtagttctttgaagggggggtggtgggaggcagagatggacaatggacttggggaagtcacgttacctcagggtcaccttctcccatgctctgaactgcaggtcttgggctgatcactttcagcctcatatttcttgtctgaaaaatgggtttgcacaagcaattgcctaggatactgatgcctaggctactgctgtgcacaggcaacagatgcatctgtacatggcaacttacagaggtgactgatgtgcagtcgcctcagccagggcctcagcgaccgaccgtgtatggccaggagacaggcactgagtgccttctctgtgaaggggcctgatctgatctgatcctggcccacagtgggtctgggagttggagggcagcatagagaggttctaagtggccaggcaatgcctgcaggtcccaagaatatcctgtgtacatctgttagccctgtgcttcttgaggcctgtgggtgaggatgtgggtcaacctgctcagggagtcctctgcacaccttgtcttggttccccaacccaccatagctcagctggccctttaaggaataagccagctgggagggagacagaacagaaagagatagatggggtcagaggctgggattgctgtgtggcctaagacacttcttatccctctctgggccttcttactagctcatttttggaacagagcagaagagaagggctattttccatgttactccaggttatcccatccttgggctgtgctaacttctgcctatggcctaactgacccagaaatcaggtctcgagttcctattctctagacccgacctgcttagtattacttggctggactcagtttccctatatacaggtggggacccccacaggcagcggcagcactgagaaacccggtatgcatagcctcatgcagtgtttccatgaactgactctaggagcatcctgcaccttggagaggtagagccactcctaagattgccttagcatctccaggcatcagtgcatctcccagaggtacaagctgagggtgtgggtctgggacttagggggatcataagagtcctgacttatcactatcatacaggaagtgtcacacacacacacacacacacacacacacacacacacacacacggctctcgggtttctgcagtttccccttcctccacttgccaacccctgtgaggtcagagcctctgtgggtggctagggctggtccagagtctgggagtatcagtcctgcatccctgagacccagctgtggcttctgtggccaggtcggtcccctctagtgccctgcagagtgtgcccagtatgcagccgggtggccagctcaggctgaggctgatatagtggcttcctccctgtgtggcctcggtctctgatggatccctttcagttaatggggactggttcaaacgcaggttgctgagctgaatccagctctgggatgggaggtggttcaggagctgggcacagcagcagtggccacagctgggggcagctaactctccaggcacagcaggtgctgctaccaaaagtgtgggacccagcttccatgcccttcgggaggctgaagggatggcctgaagcttctcttcctctaaatgcccacaaagcaatttccacaaatattttcccaggcacgggctgccatacctccagcactacccgccacctgctggtcccactctcctgggtctcacattccacaggagaaaggaggagacaggttttacagtgtccacggccctgccaaatctggtggtggcctcttcctctcttgtaccctcttcctccctccagctgctggcttctgccaggaacattcctgcctcagggcctttgcacagctgccacagcatgccagagttatgcctctgtgctggtctgcatgctccaccacaccagcgttctcttttgcctgtctgctacttgcacctggccccgaggatgcccacaggagcgtttagctgatattccttaagtaggtcaggactgagctgagtaaatcatttgttcgcttcaacaaagctaaaaggaagccatagtaggcaaagggtgggcagggtgggagggcttcctggttgaggttcagtcctgaaagggcggagggggcatagcagtgtgacctctcaggacctggtatgggcagagaaaatggcccagtgctatacctgggccttggagacaagtgaagggcggtgccatcctggcctccaggtgtggggaagctgagaacaggatgct

SEQ ID NO: 26 - DNA, 1855 bp, Mus musculus
cccgccccgaggcccggggtactaaccccgcgcgggcggccgcgtcgccgccacttgattctctaggatccgggctggggccgcggccgccgagtccgtggggcggccgcgcgcgccggatgcgggactagcgggcgcgcggccgaccgtcggggcgcaccccctcccccggcgccgcccctccccccaccccccacgctggccgggccccgagccgccgccttcccgcctcccgcttcccgcggctgcggccgcccgcgccctgacggccgcggcatgcgtattcccgtagacccgagcaccagccgccgcttcactcccccctccacggccttcccctgcggcggcggcggcggcggcaagatgggcgagaacagcggcgcgctaagcgcgcaggcgaccgcgggccccggcggccgcacccggcccgaagtgcgctcgatggtggacgtgctggccgaccacgcgggagagctcgtgcgcaccgacagccccaacttcctctgctccgtgctgccctcgcactggcgctgcaacaagacgctgccggtcgccttcaaggtggtggccctgggggatgtgccggatggaacggtggtgaccgtgatggccggcaatgatgagaactactccgccgagctgcgcaacgcttccgctgtcatgaagaaccaagtggccaggttcaacgaccttcgattcgtgggccgcagtgggcgagggaagagtttcacgctcacaatcaccgtgttcaccaaccctacccaagtggctacctaccaccgagccatcaaggtcactgtggatggaccccgggaaccccgacggcaccggcagaagatagaagaccagaccaaggccttccccgaccgctttggagacctgcgcatgcgtgtaacaccaagcacacccagcccccgtggctctctcagcaccacgagccacttcagcagccagcccaagaccccaatccaaggcttcttaaacctgaaccccttctccgacccccgccagtttgaccgctccttccctacgctgcagagcctcacagagagccgcttcccggaccccaggatgcactacccgggagccatgtctgccgccttcccctacagcgccacaccatcgggcaccagcctgggcagcctgagcgtggcgggcatgccggccagcagccgcttccaccacacctacctccctccgccctaccccggggccccacagagccagagcgggccctttcaggccaaccccgcgccctaccacctcttttacggcgcctcctccggctcctaccagttctccatggcagccgcgggaggtggtgagcgctcgcccacccgcatgctgacctcctgccccagcggcgcttcggtgtcagcaggcaacctcatgaaccccagcctgggccaggctgatggcgtggaagccgacggcagccacagcaactcgcccacggccctgagcacgccgggccgcatggacgaggccgtgtggcggccctactaagcaccctggagactctcgggccagccgaatccttccctccagcccgagactacaagaagaaacagactttggcctggtcccaggggccagagctggcagtggctcccagagctctgtccagccacaagtttgagcagaggatgtggggacctcccacaggacactgctccaacccaaatcaatgtcctctctagctgtgcatcccaaacccacctcttgtctccagccatgcccaggatcaattctagaatcagaggctacccctgcctgtgtggggagggcctttgctggcaagagaagctcaggctcagagatgtctggactttctctccctccctctctctctctc

SEQ ID NO: 27 - DNA, 1230 bp, Mus musculus
atgcgtattcccgtagacccgagcaccagccgccgcttcactcccccctccacggccttcccctgcggcggcggcggcggcggcaagatgggcgagaacagcggcgcgctaagcgcgcaggcgaccgcgggccccggcggccgcacccggcccgaagtgcgctcgatggtggacgtgctggccgaccacgcgggagagctcgtgcgcaccgacagccccaacttcctctgctccgtgctgccctcgcactggcgctgcaacaagacgctgccggtcgccttcaaggtggtggccctgggggatgtgccggatggaacggtggtgaccgtgatggccggcaatgatgagaactactccgccgagctgcgcaacgcttccgctgtcatgaagaaccaagtggccaggttcaacgaccttcgattcgtgggccgcagtgggcgagggaagagtttcacgctcacaatcaccgtgttcaccaaccctacccaagtggctacctaccaccgagccatcaaggtcactgtggatggaccccgggaaccccgacggcaccggcagaagatagaagaccagaccaaggccttccccgaccgctttggagacctgcgcatgcgtgtaacaccaagcacacccagcccccgtggctctctcagcaccacgagccacttcagcagccagcccaagaccccaatccaaggcttcttaaacctgaaccccttctccgacccccgccagtttgaccgctccttccctacgctgcagagcctcacagagagccgcttcccggaccccaggatgcactacccgggagccatgtctgccgccttcccctacagcgccacaccatcgggcaccagcctgggcagcctgagcgtggcgggcatgccggccagcagccgcttccaccacacctacctccctccgccctaccccggggccccacagagccagagcgggccctttcaggccaaccccgcgccctaccacctcttttacggcgcctcctccggctcctaccagttctccatggcagccgcgggaggtggtgagcgctcgcccacccgcatgctgacctcctgccccagcggcgcttcggtgtcagcaggcaacctcatgaaccccagcctgggccaggctgatggcgtggaagccgacggcagccacagcaactcgcccacggccctgagcacgccgggccgcatggacgaggccgtgtggcggccctactaa

SEQ ID NO: 28 - DNA, 23107 bp, Homo sapiens
caaggggatgctgccaggcgaaacaagatggtgcttgtcagctgcttagacgctgccgtggaggaagcacccagcaagcatctgctgccgttttgatgatttccactcctgctggcgactgctttaaaggacagccctagcctgcagaggtgtgatggggatctactgtgggagaaggggggcttcctggaggaggggctcctggactgggcttcacaggacagaaagcattgctggcagaggctgtcctgagctgaggctctgaagagtggggggcagagaatattcaagaaatactgggaacagcagcagcaggaagaagtggtagtgggtgggccctggggccagcagccctgccttcttttctttctggggcccctctgaccagcggctgatctttgctaccttaaatcagggactttcaaaaggaaggggcctcagtgagcagactgtgcagaggggaaactgaggcgtagcaggactgggcccaaggtgacggagtgggttagagccagagctccccacgcagctcttgctctgggtaaccgaatgaaagaggctttttctgaagaccatcttctttcctcaggcactggaacttctgtcctattcccagtgtgagagccctggccctgtggctctgagactctctggcgccctggccacgtggggccgccttggctcccctctcccctccctggcagtggctccagcgttccacagtaacaaggaagctatttccgaagtgctgttggactcccctcctccgggaagtctgccctacggagggcaagggagcatgtggtgggagcgtgggttccggggtcagattacctgacccacagcctgggtcccggaacaggcgctcagcgtcggtctcatggtgaagcctcggtggccccgtctaaacaatgggaacaaaagggaaagtgtcaggaaaagagccctgggcttggagtcgggggatccgggtgtgaatcctgccttgctgctcaggctctgtgttcctcacacgacttcagcatcctggcctccacaccccggtctccagcatggggatgatagttctgcttcctttgggcatgagcagagataaaagcgatggtcatgatggtggtgacccacgtgactggaaagtgtccacaccttaggccagcacctcaacccacaaagacagtgtgatggggacaccgcagctcggggtgggggaaaggagtgtgacttgagtgaggccaccagactgcaagtgacaggacccgtcctcgaacccaggctggctgtcaaccccgccctcttccgccaggccgcaggagtaactgtaaacactctttgtacatggtgtgactcagaaacaggggactttattctcctgtgacgaaagtaacaaggcctgaggttttgcaccagccctattggctcccttcaagcttgtggctgactaaaacacccagatcctttgcactcaggctgttgtcggatcagtctgtggtccccacgtccacccggcaggcttcatgcctgttaagattcttctgctcacttgtcccccagctcatccacatctccctgccatttccagtggcctcaggagcaaggacaacatttcctccaaggcctgttagggctgaggactcggtctggaattggaagctctggccgtactgggcctgccctcctcagggtagcagtcaggtgctttccacaaggcatctcctccccatccgctccaggccccacccatcccacttgcctcgttcacgtgacttgccccatccccatgggcatctgagtttgcagccccagctccagctaaactcgcccccagcccatgttttcccctttgttgccaagggccctgggaggcagcagtgggggcctggccagagaccaaatggtcttattcctgccaccaagtgtcccatggattcctggtctggggcctcattggaggagaaggtggggctccctggttcttggtgactggctgagcccctgtggctcccaggccccctgctttctttctgaggctcccagatacctgtttgagcttccaacagggatgcgtagggagcttgggggcctacaagtaccagaatccattgcgttcccattctgaaaatcagaaatcaggcccatgcgaggcctcgggctctgtcccctcatgccctacagtggtcgacaggcttttcccacttttcgagtccccagcaatcacttgttcaggccccaaaaagcgcagtgagttctgttttacctcccacctacatcttgcctcttctccctctgccaaactagaaaacgcacatgtcattctagacccaaggccttaggcaaaccttctcctcccccttaccccctcccacatttttttttttttttttttttgagatggaatcttgctctgtcacctaggctggagtgcagtggtgtgatcttggctcactgcaacctccgcctcccgggttcaagcgattctcctgcctcagcctcccaagtagttgggatcataggcgcccgccaccacgcccggctaatttttgtacttttagtagagacggggtttcaccatattggtcaggctggtttcaaactcctgacctcactcaggtgatccgcccgcctcggcttcccaaagcgctgggattacaggcgtagccaccatgcctagcctccatcttttctaaagggtcccaggtccaggaaatcccaccccttgttcggcgtgtggcctccaacaagcttcctcgcctctccgcagttgcagttctcttacttgtaaaagagggcctggccaccctgcctgactggcagcctcccaccaagtcacgtgaggtagaatggccgtgaccgtgttagggttgatcagccgaaccctggagtgcacagtcctccaagggagccgtcctttcctcgggtcagccctggagaagctgcagccactagggggtgcgaacagggacgttcccgggagtgttgcatgtaagggaactaaaggggaagcttgagaaggactgaaatgtgggtggagaggactgcggagtgaactgtgcctccagtggccagcaggaaagagggagagcagcgtcattctcgccatgcttgttgaatcccttccgtagcagggaggatccccagggttttatgggaactccgtcatttctgtggggctggattactgtccccattttgcagatagggaaactgagtttgagctccaaggtgtgctactaagaaagcaagttacagaatgacacacccggactgaggctgttcaagagagttccatgagaagcctactttgcgttttccattcatggaagatgaaaaatgtctggaaagaaactggtcacggtggggactctggagaggagcttagagcggtggacagagccttatctgtaatgcttttatttttgtaaatattcacgtgttgcttgtgaaatgtaaaattagtaattaaaaaagtgtgtgtggcgggggaggtccctgcaagcttgatatcactccagaagtgtccctcggcctcagcaggccgcaggagggtgggagcctggccaccttgaccctcccagcacctctgagtcctcggatgtgaggctgggattcttcctgtgtgggctctggcagatagggagtggaaaatgctggcagttttctccaggtgtgacatctcgtcccctgaccccagcttccaggcagagatggctgtctagtccctcatgcaagccccctacacctctgcccagcatcctggtggagttatttttctgcctgaggcccagagagaagaaggcatgttctggggatcccagagtgacttagggctggaaaagcctgcagtcccctcctggggccacctcccattgttcttgtagacatgggagacagtgtgcaaggcaggctgggatgctgggaggcagagggtggcagtgctcctgggttatctccctgcctcccttgggggcatgagccactttctcatgtctgttgcctcagtttcctttttttagatctagggtccttgttccgttgcccagactgggatgcagtggtacaatcagctcactgcagcctccacctcctgggctcaagtgatcctcctgcctcagtcatcccagtagctgggactacaggcttgtgccaccccacctggctaagtttttcttttttcttttttttttttaatttttgtacagacaggggtctcgatagttgcccaggctgatctcaaactcctgggttcaactgatcctcccatctcagtctcccaaagtgctgagattataggcgtaagccactgcacctggccctcagtttcctcttctgccaaacagtgtgttgtagaggtttggatcaccgtgtgtcgtagaggtttggatcaccacatgtcgtagaggtttggatcaccgcgtgtcgtagaggttcagatcaccgcgtgtcatagaggttcagatcaccgcgtgtcgtagaggttcggatcaccgcgtgtcgtagagcttcggatcaccgcgtgtcgtagaggttcggatcaccgcgtgtcatagaggtttggatcaccgcgtgtcgtagaggttcggatcaccgcgtgtcgtagaggttcggatcaccgtgtgtcgtagaggttcggatcaccgcgtgtggttgaggttcggatcaccgcgtgttgtagaggtttagatcaccgcgtgttgtagaggtttagatcaccgcgtgtggttgaggtttagatcaccgcgtgttgtagaggtttacatcacagtgtgttgtagaggtttagatcaccgcgtgttgtagaggtttacatcacagtgtgttgtagaggtttagatcaccgtgtgttgtagaggtttagatcaccgtgtgttgtagaggtttggatcaccgtgtgttgtagaggtttagatcaccgcgtgttgtagaggtttacatcacagtgtgttgtagaggtttagatcaccgcgtgttgtagaggtttagatcaccgcgtgttgtagaggtttagatcaccgcgtgttgtagaggtttggatcaccgtgtgttgtagaggtttagatatgtggggtggcacataacgaccattctctgttcagaaagtcttttgacaacctctgtgaagaggctggcggtgacctcagggttctcccagcagaggcctaaggtcagacctcaggaagaacttcccagcagagtgaggcatttctgtctccactgagactctggggaagcaacggctgatgggcttcctgtgctctgcagggcaccggcagaagctggaggaccagaccaagccgttccctgaccgctttggggacctggaacggctgcgcatgcgggtgacaccgagcacacccagcccccgaggctcactcagcaccacaagccacttcagcagccagccccagaccccaatccaaggtacggcacggagggaggggctgcagcggggtgaggtgggggtggagggcctcgatgtggtccaatctgccccagaccaaaagcctgtccgaagatcagtcactgcacccccttgttttgtagaggagctgctggtgctcattggcacctgcagacggttcctgtgggctttctgtgtgctagccatcattcgttcactcagcaaacactgacattactgacacatgcctggtgcctggccccagggatctgcataccaggagttcactgtgcctggggaaatggggttaaccccatagtgcccctattaaaattggggcatgacttgtccaaggagccgtgacagactcgcccctgccatgtacagtttccccacccctgccccacagcctgcgatttttcatctgaaagtggattggggcggatgcctccacccagggctgggatgacattcaaatgacattactgtactcacacaaactttgcacactgttaagtgacattccaaccctagagaggcacatagcattcctgggaaaggtctcccaccctgcccagagcatcctcccaaacaggaggagctgaggtggaagggaagaccgagctggggtctccatctccactgcctagacggatacagcaagcacagttgcagccaggcctcaggcaggtcttctggagtatcgaggtgcctggcgcatagtagccgctcactaaacggctgccggctgcatctctcctctgttctctcagtcagtgagctggggacatgggaggctgtgtgcacagccggcccttgggctaagtggggtgccaagggtgcttggtggccgggtggacagaggcaggcagctggctgccgtcacggactgtgcccattctttctcaattccccagagcctggttagaaccccttggcagatgaatgaattgagaggcctaagaggttcagagccaccctcgggtcacacagcccatctgtgaccaggtccacagtctccacagtacctgctcccaagaactttctgtacttctgaggggacagataaaggggcctggaacagggctgccaaccggtctgcctgccccacccccttttccggtgccacgctgaggtgggggccgactgggtctctctactgacattgttccaggcatagtgctgcagccaggggctggatgcaggccttcagtgtgaagagaggacccctccccttctggcctgggctcaggacttttggccttggtcctgctgagacgccaaggttgggagaagccccaggcccagcctctctgagcccaggagctagtgcatttgagactctcagctctcgagcccaggagttggaggtctgctctcaagaggtagcggaaggagccctgcacgctgtgctcacgcccacccctgccgcgtagctgcctctgcttctgctacccatgggccagcatctgtcgaggtgcagtagcctgagagccagcctttctctgccatggacagagccaggccaggggatcggggctcagcgggggagccagaatccaggaggtggggtgaacagtggcttcctgtccaccagcccccatggaaggagagcccacatctgcccatccactgctgggtgggcacagcttgggaatcaatgcctggccccacggcaggcacagctgctgcttccatcctgggctgggaggaaaggagcccagcctgtgtggggcagtggctgacttctgcttctctgcctgctccctcctgaggcctggcccagtccctcgctagccccccacagcactgggccacaggcagccaggcatctccatcctcaggcccatcccctttgggtgagagaaagggcctcggatgaccaggacagggcgagcatgaactctgcagtcagctggaccaggctaggaattcaggctctgccaggcattggctgtatgatcttagacaagtcacttaaactcagcctcagttttctcatctgtgaagtggggagaaggaggtccctgacaaagaggggttgctggcagacctaggcttgggaagtcactctcacaggccctcctccctctgccctcggactccctcctggggatcccccttgggacaccccaccaccacttccctcggtgcctgttaagtgctttgaccctccaatattggtcactggcaagcagtgcagagaccccagcacctcccataccccagccccagcccccagccgcagccgcccacaatgggggcttctcacagctgaaagggctcattcagccaccatgcagcagcccggacaatctggagaagaaaataaacatttctttccactgttgggattggccactcgacagtgccccgggcagctcgggtttcctggggctgcgaggccgcagggtgggggtacaggagctccaaggaagctgctggggggtctgagggagtgctgagggcaggtacttcccccaccaccccggaggaggggtggtggccctgaggaaagaggctggaggggatggtggcaggtccagggaggcccagcccagcgccctgcagcccgcgtgagctctgaggggcacagtcctgccgttgtatcctgcggtccccatttgtttccttcgtcttgagaatggggttcccatcaggcggccagcacccacttccaccccacccatctcagctgtgctgacgtgcccagcacctgcaacaggacctctccccccgaggggctccccagatgaaaactggcagccaggtgcctcggaggctctcggcctcaaggggccgggacagccaagtgacctactagggaacatcccagatgtcccagaaggcccccgccacccagactgctgtccccacatcttcttaccttaagccaggagcatcactccgttcggatccacgcccagggccagagtacgctgctgagggaaacataccccagctgacttgggaagaccccaaagccccgagaagttccaagtcccagccgaagtcacacacacctcaggctcatagctctccgtcctcagccaagcctcggcgtggcaggcagagcccactccggctagcaccggcccttatcctttggtgggtgacacagaggggttgctgggctggacagactgcacctctggaccactgctgggggctcatccacctcccccggctgccagagtagaagggaggccctgcaccagggcctcaacttggcagggccctgaatgagccagttctcctgggtacccagagtaagagacaccacagccacagtggccttgcaaagcctcatggacccctgctctgtgcccagtgccattctaagtactcgatgtgaattaactgaatcctgatgaactgttatcgtctcatgttttatatggggaaactgatgcgcagagaggttaagtgacttgcccaaggacacaaagctagtaagtgtccaaaccaggataactgtccggctccagaagccacacagtaagccttgatcctgtgctgcctcaaagacgggacagctccctctcaagtacgtgttggggctcaggaccagaggccctaggattgtgtgccaggtccaatgtgctgtgtgaccctgagggaagtgcctcaccctgtctgggcctcagtttccccatcaagggtgttagactcaatccctgagcccctttgaatgctgaggttttgggggtctgtgatgacaaaagttggggacagaggatggaacacccttgccttggagcccattgagaagccacattcctgggggagcaggggcagagtctgggctggacactgtgaccaggttggggtctgggtccccaagtttgtctgactgctgtctcactttgctgccaaggcaggttagggtggcatccagtcactgtgtggccacgagtcggctccagagacacaggcccagggtgaggtggaggccagagctcctgtgaactcagtgcccacaacccaggtgtgagcgcacagaacctccgcgtgctgcacctgggcaggagaggcacgtgtgtccccagcagaggccttgtgatgagaaccagtcctttctctgccacagagactcagtcttgctctctctctgcctccattttcttgtcttcaaaagcgggttccaactcccagtctcacacggtcattggagccctttacacatccacggccttcccagctgttaacatgggccggtggggagaggaacctgcctgggcagggctgctgggaggcctgagctgactctgccctcagccccaccaccgcatcctaggcctctcctctgcgaggctgggaaggaggatttaaaaagaagaatagaccccctcctctgttctgttgctgctgtgggggggctcccatggcccctcttggcccggggcacgctccaaccagcttcccggcaggtctgtgttcggagtcctggcgggggaggccccgggcagcctagggcaggaagaggagagccaggtctagaactaggggtcccccagatgggccttgggaaccagagcccaaggtcattcttcaggaagccctcctggggttgtctcgagctggaactgacctcttccctgctgtcctccaggcacctcggaactgaacccattctccgacccccgccagtttgaccgctccttccccacgctgccaaccctcacggagagccgcttcccagaccccaggatgcattatcccggggccatgtcagctgccttcccctacagcgccacgccctcgggcacgagcatcagcagcctcagcgtggcgggcatgccggccaccagccgcttccaccatacctacctcccgccaccctacccgggggccccgcagaaccagagcgggcccttccaggccaacccgtccccctaccacctctactacgggacatcctctggctcctaccagttctccatggtggccggcagcagcagtgggggcgaccgctcacctacccgcatgctggcctcttgcaccagcagcgctgcctctgtcgccgccggcaacctcatgaaccccagcctgggcggccagagtgatggcgtggaggccgacggcagccacagcaactcacccacggccctgagcacgccaggccgcatggatgaggccgtgtggcggccctactgaccgccctggtggactcctcccgctggaggcggggaccctaacaaccttcaagaccagtgatgggccggctccgaggctccgggcgggaatgggacctgcgctccagggtggtctcggtcccagggtggtcccagctggtgggagcctctggctgcatctgtgcagccacatccttgtacagaggcataggttaccacccccaccccggcccgggatactgcccccggcccagatcctggccgtctcatcccatacttctgtggggaatcagcctcctgccacccccccggaaggacctcactgtctccagctatgcccagtgctgcatgggacccatgtctcctgggacagaggccatctctcttccagagagaggcagcattggcccacaggataagcctcaggccctgggaaacctcccgacccctgcaccttcgttggagcccctgcatcccctgggtccagccccctctgcatttacacagatttgagtcagaactggaaagtgtcccccacccccaccaccctcgagcggggttcccctcattgtacagatggggcaggacccagcacgctgctggcagagatggtttgagaacacatccaagccagtccccccagcccagcttcccctccgttcctaactgttggctttcccccagccgcacgggtcccaggccccagagaagatgagtctatggcatcaggttcttaaacccaggaaagcacctacagaccggctcctccatgcactttaccagctcaacgcatccactctctgttctcttggcagggcgggggaggggggataggaggtcccctttcccctaggtggtctcataattccatttgtggagagaacaggagggccagatagataggtcctagcagaaggcattgaggtgagggatcattttgggtcagacatcaatgtccctgtcccccctgggtccagccaagctgtgccccatcccccaagcctcctgggaggatccagccaaatcttgcgactcctggcacacacctgtctgtaacctgttttgtgctctgaaagcaaatagtcctgagcaaaaaaaaaaaaaaaacaaaaaaacaaaaaaaaaacaaaacagtttttaaaactgattttagaaaaagaagcttaatctaacgttttcaaacacaaggtctcttacaggtatagttccgtgattatgatagctctgtgattataagcaacatccccgccccctctcccccccgcggacccccagctgcctcctgagggtgtggggttattagggtctcaatactttctcaaggggctacactccccatcaggcagcatcccaccagcctgcaccacaggctcccctgggaggacgagggaaacgctgatgagacgctgggcatctctcctctgtggctctaggacatctgtccaggaggctgggcggaggtgggcaggatgtgagaggtggggagtactggctgtgcgtggcaggacagaagcactgtaaagggctctccagccgcagctcagctgcactgcgttccgaggtgaagtcttgcccctgaattttgcaaaatgggaaagtgggcgcttgcccaagggccaggctgcatggattctcacatcagagttctctggccctagaaaggcttagaaaaggcgtaagggaactcataaaggctagcagcatgcggtattttaactttctgcctcggcctctgtggatgcagaaatctgccctacaaaatgctcttcattggttgtctctgtgagagcactgtccccacccaacctgtcacaacggccagaaccatacaccagagacacactggcaggttaggcagtccttctggtgatcctattccattccctcctgctgcggtttctcttggcctgtcctcactggaaaaacagtctccatctcctcaaaatagttgctgactccctgcacccaaggggcctctccatgccttcttaggaagcagctatgaatccattgtccttgtagtttcttccctcctgttctctggttatagctggtcccaggtcagcgtgggaggcacctttgggttcccagtgcccagcactttgtagtctcatcccagattactaacccttcctgatcctggagaggcagggatagtaaataaattgctcttcctaccccatcccccatcccctgacaaaaagtgacggcagccgtactgagtctgtaaggcccaaagtgggtacagacagcctgggctggtaaaagtaggtccttatttacaaggctgcgttaaagttgtactaggcaaacacactgatgtaggaagcacgaggaaaggaagacgttttgatatagtgttactgtgagcctgtcagtagtgggtaccaatcttttgtgacatattgtcatgctgaggtgtgacacctgctgcactcatctgatgtaaaaccatcccagagctggcgagaggatggagctgggtggaaactgctttgcactatcgtttgcttggtgtttgtttttaacgcacaacttgcttgtacagtaaactgtcttctgtactatttaactgtaaaatggaattttgactgatttgttacaataatataactctgagatgtgtggaaggagtccagtgcccggtttctagggctatgcatggaggtggggtggggtgggggagaggatggagacctcctgctgttgcccaggaggaacaggaacagagacacccagcaccttcatctccttgcttccaacttcttcaggaatggccgcagagaccaccctggccacaggacagccggtgaggcctgctcctgtatggctgggaccccaggagagcatcaaataggtcttcaaagtgccacaacccttccaccaatcatgagcgggctgtgagtcttcccagccgtgttgggaggaattcctatgcctgttcctcagattcacatttcgggagggggcagaggcagagggagagtccaagtgccttggtgagaacccccctctgaggctcgtgtttcaagatctgtggcaagctagcagcagtggggattgggagtaagcggcaacttcagtgcccccattttgcagatgagacaactgcggtgcaaagaaggagtgtcatcaaggtccatgtctccctggggttgtccatggctgaactgggaccacagcccaacaatggtagcatgggtgtgatggtgtggggacctggcttgacagcccccctcccaccttgccagcaaggaggcctggtccacttgggatttgtaccaacacacagcccagagcctggccagttgggatttgtgaagggaaatttttacaaaacagaccttatttttgagtgatgcccaccgacttcaaaaaccactcccaaagctttgccctgctcagtttggttggtctgcctgaaactcagctcccaacaagaagcttccatttccctagcccggcatccccttttacccaaaagacagcaggtccatctctggacaggacctcagccgtggctacagaacttctctgttggtctgctctgggcagcctctgccagggttggtcctgaaacggcatctacatggccaaaactgtttctatttatttggggtcactttgtaggggatggtagcactcctcaccaggcacactttggtgccacagcagatcggagaggagctgtgccctccagagttcctgactcaaatctccatcacctgcaccctagcaggcacgaaccagcacacccagcttgccaaggggaaactcaaggtcccgagaagtctcagcttgcctgaggtcccagggctgcgggaggaagtgctgcagtagccacagcagcctgcaggtggcaatagggggcggcatccctgggcagcaggtggagagagtggacatcatcccctttggacaagggtgaggagaggctgccttggttacagcaagaattcaggtaaggtattaagaagaacttcccaacctcaggtgactcattcccgaaagggccagctaaaggtcttgatgtggggaaggttttcccttcccgagccgtgtggcagtgggaggtccctgtccctctctgagtctccctttttggtcatacgctgaatgagcaccggccgtgtgccaggtgtggagtaggaccccacaccccataatcgtctgctttgggacagggtgtacctggcttgaaggcagggttgactttcatagttttacaaccctggcctcctggaccctgggcccagccccacccatgtcccctgagccaccagcaagagcttaggtcatgtagaagccagttcagattgaggaagccatttagttccacagcctgggagcccctggactccagaattccgctttggaggctctaggagtcctgttgatctgggctggactttgagtccctccagtttcttcagcccccacagcttgaggttggcccagatgggcccaatgatggacccagagagccggctgtggcctgggggctcccagaagtggcctcctgtggggtgaagtggcccagatggacccgccttgccggcccctaggagcagccctgccactgttgggctgtggccatggggatggctttggcttttacactgagcaatggatgtcctggcagtgaggctacaggccagagatgacacattcccacgttagggcctggtgagggcttgaggagatggcgcggggtggggccagtgccgtgtgtaggggagggcagggctggatgcagacccagccctgcctccctcctcagccccggcctctcctctgctccagactgcacccccgcataaatgcagccccccagcatggcccagagggcagctctcagctgcaccaaacaacccagcctggccacgtgagtagagaatacacctcagtgggtcggttcattttggggtcgtaaatgaaatgagctgtcaaatgggacgggggcaggagggaggccagagtgaaagaatgaactgttcctggcagaaatccaaaatgcccctcattcctccccatgagggctccagagctgggaggggtgaggggccacatcgccccgacatccgcagccacacctgtgtggtccagtggctggggaagcctggggagccggatcccgcgcttcctatttttagttttgcagctaagagtgcgctgtgtgttttatatatttatattcacccacagaaagggcctgccctgggcctggcccaggggacctatcatgggaaggggagtgcggcagccctggagccggcctggactaccctcctttgtgcccaccctgacggctggcagcaatgtgggctctctggtgtccaaacacaccatttgggccacaccaccccactcagctcattgggctgggtgtctttgaggccttggccagaattcattcactcattcaccagacacagagccccaccccaccctcaggtgccagacaccaagaacaaggtgaacaagtcacagccatggcctcagggatctcacagggcagacagacaggaaagcaggttgtgccagcccagtgtggatcagggcaaacaagccaagctcctcagagaaaatgtctctcccccgagatcagatggaaagatgagtaggaatggatcaagcagagatgtggcaggagggaatcccatgtgcaaaggcctggagaaccaggtgtcgctgagctgggaggatggtggggcaagtggcgcaatggtgatgggaggtgggagaggatccatgtcaggggtcagtggcacgggggagccaagcggagatgtatgtgttggatgggagcaccatcatggtgcggactggggatgagggtccagagacctgttcacaggctactaaaatagtccaggcaaaggagaagcctgtgcagaatgacagagggaggagctaagaggtatcttagacatcattagcaccaaagtcacaggaagggcaccatgccccaaacctcaggtttgaatgtctctcaatctctcagggttagtggcatttcatgtgccactgggggcaaggtcttaacaatagtctttattatcacccagttggcaattgccccctccctctccaccacttcacaagtgaagccttatgtcctgcctcagtttccttatagaaccatgtgaccataccagaggccacatgcagcctctcctctcagacttgtgggtccaggacgctcagagtccggccaagctaccccactctccttcatggtctgaaaatataaagattatgagactctccatctgcggttcctgagttctatatattacattttaagtaatatttttagtttttatttttagacagggtctcactctgtcacccagactggagtgcattgcagcctccaactcctgggctcaagtgatcctccctcctgccttggcctctcaaggagctagaactacaggtgtgcaccaccacacctggctaattttttttttagaggcagggcctcgttacgtttcccaggctggcctcaaactcttggcctcaagcaaaccttccaccttggcctcccaaagtgtcgggattacaggatgagccaccatgcccagactaaatgacatttttaaatgacacaaactaatatataatcatgagagggaaagtagacagtccggattaccaacaaacacacgagaaaaatgagccataatccccccctccaaagataaccactgttaatatttttaggcttttctcccccattcagatctttatttcctataaatatataaatactttttagaaataaacatttttctagccagacacacactgcgtatacaggttatcaattaatatagttaaaaatagagataaaattaatccagaatgaaatcaatgcaaagatgggattatggctgttttctgttttcttctttacagttttctaaaattagcacacttgttcagggtatagcatatcaaattctagacataaatgtccaagcagaggagttcaaaatcatgcaaggactacctcatctgtcattagctgaaacaccacctcttccaggtagccttccctgataccctcatactaggtttgatgccttctctttatctctggaataataaaaataataataataatagttaatacttactctgtgccaggcactattctaaatatttcaccattttttaacccagcccattgaggtatgtattatcattctccccatcttacagatgaaaaaaaactgagaaacaggttgggtgcggtagctcctgcctgtaatcccagcactttgggaggctgaggcaggaggatcacctgaggtcaggagttcgagaccagcctggccaacatagtgaaaccccatctctactaaaaatacaaaaattagccaggcatggtggcacatgcctgtaatcccagctactcaagaggctgaggcaggagaatcacttgaatccaggaggcagaggttgcagtgagctgagtttgtgccactgcactccagcctggacaacagagtgagattccatctgaaaacaaaacaaaacaaaactgagaaacaaggacagaattccacctgatcctgacgaaggcagagcagtcgctgaaaatattaagtttcctaccaactaaaagtattggaggctcaaagtaagaatcaagttgactttaagaaaaaaaaaatatgacatttctacacatacttgcttataaagattgatcaagggggaggaaaaaaagaaaaagaaatgagaaaatgtctttttaaaaaaacagaggccctttctctgcgtctgagagggatgcctctacctttctgagttgtgattctaagatttcacaaagcatgaaatcaaaaaacagaagtcactgtgactgtctctgaatctgtctggaaacccccagcccattcttccccgcccaaggcggggaacttcatgaacgaggcctccccggagctaggtccgagcctcttcatggcaggctcacccccctacccaaatatgcccacagtgggaatatctgcccaggcatcagtcttgccccgccacaaacaggttctatttctttttccatgaaaacaactccgtcctaaatcactgacgcctgaaattaggaaaatacaaggcctatattataataaaactattttaacacagtggggccccttcggtggtgggagcggtggccaaagactctgcagccccttccatttgtagcccctggaaatgctcagagggatgagaaatttggttttcattagcggcgaatgtgaggagctctgtcgctctgaatggacctttgattctggctggtggtggactctttccagggcctggtgagttttgttttgttttgttttgttttcatataaaatgggctaggcccttccagcttatatctccctgtactacatgagaattgggcaacgccccactctcttgacttctaaagtcaacagctggggccggcaggagaggcacccaggaccattcgcctttattgactctgaggttttattaaaaatgttatgtttccttgaggcctgtgccagacccaacaagcagactggccagtgagcagctggcagaggccagggggtttgcactgcctggaagacaacccaccttgacctgccttctcccactccagtgacccccagaaatggcctctgccttggaatctccacagaaaaccctatttcttcccctctactttgagcaaaagaacattggcctgctcttttattcattcaacacacattggttaggcatctactacagtggcgggtgcttgggatgcagctgcaaacaagtcacacaatgtccttattcccctggagcctacaccctaattggggagaaaggccataaacgaataaatagatcacatggctacagacagtaatcagtacacaaaaaaataaaacaggagaatatgatggaggaagactgggagttggaaggcatcattagataagatggtcagggaaggtctctcagaggagctgactgtggactacataaacatagccaggcatagtccagtttcacccactgtaccagttgtggcatcttgactacagcagatcaacactgtctctggaatttggtatgcagctaccaatttggtaaatcctttcttcctgatatccaacagcagagaggcactagagcagtttacatggcagggacagcagagcaccttcatggtccagcctcaggactccctcactccatcctccatcatggtatcatttaattgactctctgttccacatggctggggaggcctcacagtcatggcagaagacaaaggaagagcaaaggtgactgttgctatgttttaccaaagagactggtggcattttgaacttgagagagatgatttagggcatctggtgggagaaatttctaggcagcaaagtgttcaagaggtgacttgggtactgttaaaagcattcagttttattcattcacaaagatatggtttggagttggaacttatgtttaatggggaagcagagcataaaagtttggaaaagttgcagcctgatgatgcaatagataagaaaaatccatattctgaggagaaattcaagcctgctgcagaaatttgcataagtaatgaggagccaaatgttaatcgccaagacaatggggaaaatgtctccagggcataacagagactttgtggcagcccctcccatcacaggcccagaggcttagaaggacaaaatggcttcatgggctggggtccagagccccactgctctgtgcagcctagggacttggtgccctgcatcccagttgctctagtcatatctaaaaggggccaaggtacagctcaggctgtggcttcagaggtggaagccccaagccttggcagcttccatgtggtattgtgcctgtgggtgcacagaagtcaagaattgaggtttgggaacctctgcttagatttcagaggatgtaactggatgtctaggcagaagtttgctgcaggggtgaggccctcatggagaacctctgctagggcagtgcagaaaagaaatgtggggttgaagcccccacatagagtccccactggggtgctgcctagtggagctgtgagaaagggccatcatcctccagacctcagaatggtagacccaccaacaggttgcactgtgcatctggaaaagccatagatactcaacgccagcctgtgaaattagccaggagggaggctctaccccatgaagccacaggggcagagctgcccaagaccatgggaacccacctcttgcatcagtgtgacctggatgtgagacatggagtcaaaggagatcattttggaactttaatatttgactgccccactggattttggacttgcatggggcctgtagtccctttgttttggccaatttctcccatttggaacagctgtatttacccaatccctgtacccccattttatccaggaagtaactaacttgcttttgattttacaggtgcataggcagaagggatttaccttgtttcagatgagactttggactgtgaacttttgagttcatgctgaaatgagttaagactttgagggactgttggaatggcatgattgattttgaaatgtgatgacataagatttgggaggggctagggagggaatgatatgttttggctgtatcctcacccaaatctcatcttgaattgtagctcccataattcccatacgttgtgggagggacccagtgggagctaattgaatcatggaggtggtttccctcatactgttcttgtgatattgaataaatctcacgagattttataaggagtttcccctttaacttagctctcatcctctcttgcctgccaccatgtaagacattccttgctcttctaccatgattgtgaggcctcccctgccatgggaactgtgagtcaattaaacctctttcctttataaattacccagtctcgagtatgcctttattagcagcgtgagaatagactaatacacccaaggaatctcttaggtcaggtttccctagaagcagatcaagaggtggggatttttgtggggaggactttcaggggaagtggaaagagggaagcaggacacagcagagaaagaaagttaatctatgacatccctgggctggaggccagcctcattctggtctcatgagggcctttggagcattaattacagcactgacttgtcccctccagatagcagactttttgtgtcctcaggtaagtcagttggcaagacttgccacacccccaaaggagcataacctccatggtgagatgtctactgtttggcagagagcaattctccagagaagggggcagatgtgagcagtttgcagccaatgctcacacaatgttaacatgacggacctgggtggtagcgtggggtgtcaagatgatcaaggacactgcagtggatgctgtgggtgagcctctcaacagacccccttcactggacagttgctcccatgctcctgctgctctaaacctaaggaggaaaaatggcaagaacccaagatgctttaataaaatatatggctgggcacagtggcttacgcttgtaatcccagcactttgggaggctgaggtgggtggatcacctgaggtgaggcgttcgaggccagcctggtcaacatggtgaaaccctgtctctactaaaaatacaaaaattagccatgcatggtggcgggcacctgtcatcccagctacttgggaggctgaggcaggagaatggtttgaacccaggagttggaggtttcagtgagccaagatcgtgccactgcactccagcctgggtgacagagtgagactccatctcaaaacaaaacaaaacaaaaatgtatgcacaccagagagtggaagataaagcctctgaaaattcagggtcccccgtattgatgaagatcttaaggaacctgtgatctgaggcatgccaagccatcccctctcagaaaaaaagacaagttgctgcatttgcacctctaccatacagtaggatgaaaaagcacccccccaccccaccacgaagatatgtccatgtcctaatttccagaacctatggggatattaccttatttggaaaacggatctttgcagatgtaattcagttaaggatctcaagatggggaggtaatcttggatgatgcaggcaggtcctaaatgtaatggcaaatgtccttataagagacatacagaacagaggcacatagggaagaggaggaggccatgtgaccacagatgcagattggagtgatgcagccacaagccaaggaatgtctggagccaagagaagcaggaagaggcaatacacgggcctcgtgtattgcccgtgtcagccctgccaacatcttggtttcagacttctgatctccccagctgcgagaaactgtccttctgttgttttatgcccaccttctttgttctccttgaatttcaaagcagcatataccacacttgggaatgctactctgacctatttattaggcaattcagaaagctttcagttctgagacaaagcaaaagagaacgctgcataggtccaagctgcagtgtgagctgc

SEQ ID NO: 29 - DNA, 3809 bp, Homo sapiens
gccgctgttatgcgtattcccgtagacccaagcaccagccgccgcttcacacctccctccccggccttcccctgcggcggcggcggcggcaagatgggcgagaacagcggcgcgctgagcgcgcaggcggccgtggggcccggagggcgcgcccggcccgaggtgcgctcgatggtggacgtgctggcggaccacgcaggcgagctcgtgcgcaccgacagccccaacttcctctgctccgtgctgccctcgcactggcgctgcaacaagacgctgcccgtcgccttcaaggtggtggcattgggggacgtgccggatggtacggtggtgactgtgatggcaggcaatgacgagaactactccgctgagctgcgcaatgcctcggccgtcatgaagaaccaggtggccaggttcaacgaccttcgcttcgtgggccgcagtgggcgagggaagagtttcaccctgaccatcactgtgttcaccaaccccacccaagtggcgacctaccaccgagccatcaaggtgaccgtggacggaccccgggagcccagacggcaccggcagaagctggaggaccagaccaagccgttccctgaccgctttggggacctggaacggctgcgcatgcgggtgacaccgagcacacccagcccccgaggctcactcagcaccacaagccacttcagcagccagccccagaccccaatccaaggcacctcggaactgaacccattctccgacccccgccagtttgaccgctccttccccacgctgccaaccctcacggagagccgcttcccagaccccaggatgcattatcccggggccatgtcagctgccttcccctacagcgccacgccctcgggcacgagcatcagcagcctcagcgtggcgggcatgccggccaccagccgcttccaccatacctacctcccgccaccctacccgggggccccgcagaaccagagcgggcccttccaggccaacccgtccccctaccacctctactacgggacatcctctggctcctaccagttctccatggtggccggcagcagcagtgggggcgaccgctcacctacccgcatgctggcctcttgcaccagcagcgctgcctctgtcgccgccggcaacctcatgaaccccagcctgggcggccagagtgatggcgtggaggccgacggcagccacagcaactcacccacggccctgagcacgccaggccgcatggatgaggccgtgtggcggccctactgaccgccctggtggactcctcccgctggaggcggggaccctaacaaccttcaagaccagtgatgggccggctccgaggctccgggcgggaatgggacctgcgctccagggtggtctcggtcccagggtggtcccagctggtgggagcctctggctgcatctgtgcagccacatccttgtacagaggcataggttaccacccccaccccggcccgggatactgcccccggcccagatcctggccgtctcatcccatacttctgtggggaatcagcctcctgccacccccccggaaggacctcactgtctccagctatgcccagtgctgcatgggacccatgtctcctgggacagaggccatctctcttccagagagaggcagcattggcccacaggataagcctcaggccctgggaaacctcccgacccctgcaccttcgttggagcccctgcatcccctgggtccagccccctctgcatttacacagatttgagtcagaactggaaagtgtcccccacccccaccaccctcgagcggggttcccctcattgtacagatggggcaggacccagcacgctgctggcagagatggtttgagaacacatccaagccagtccccccagcccagcttcccctccgttcctaactgttggctttcccccagccgcacggtcccaggcccagagaagatgagtctatggcatcaggttcttaaaccaggaaagcacctacagaccggctcctccatgcactttaccagctcaacgcatccactctctgttctcttggcagggcgggggaggggggataggaggtcccctttcccctaggtggtctcataattccatttgtggagagaacaggagggccagatagataggtcctagcagaaggcattgaggtgagggatcattttgggtcagacatcaatgtccctgtcccccctgggtccagccaagctgtgccccatcccccaagcctcctgggaggatccagccaaatcttgcgactcctggcacacacctgtctgtaacctgttttgtgctctgaaagcaaatagtcctgagcaaaaaaaaaaaaaaaaaacaaaaaaacaaaaaaaaaacaaaacagtttttaaaactgattttagaaaaagaagcttaatctaacgttttcaaacacaaggtctcttacaggtatagttccgtgattatgatagctctgtgattataagcaacatccccgccccctctcccccccgcggacccccagctgcctcctgagggtgtggggttattagggtctcaatactttctcaaggggctacactccccatcaggcagcatcccaccagcctgcaccacaggctcccctgggaggacgagggaaacgctgatgagacgctgggcatctctcctctgtggctctaggacatctgtccaggaggctgggcggaggtgggcaggatgtgagaggtggggagtactggctgtgcgtggcaggacagaagcactgtaaagggctctccagcgcagctcagctgcactgcgttccgaggtgaagtcttgcccctgaattttgcaaaatgggaaagtgggcgcttgccaagggccaggctgcatggattctcacatcagagttctctggccctagaaaggcttagaaaaggcgtaagggaactcataaaggctagcagcatgcggtattttaactttctgcctcggcctctgtggatgcagaaatctgccctacaaaatgctcttcattggttgtctctgtgagagcactgtccccacccaacctgtcacaacggccagaaccatacaccagagacacactggcaggttaggcagtccttctggtgatcctattccattccctcctgctgcggtttctcttggcctgtcctcactggaaaaacagtctccatctcctcaaaatagttgctgactccctgcacccaaggggcctctccatgccttcttaggaagcagctatgaatccattgtccttgtagtttcttccctcctgttctctggttatagctggtcccaggtcagcgtgggaggcacctttgggttcccagtgcccagcactttgtagtctcatcccagattactaacccttcctgatcctggagaggcagggatagtaaataaattgctcttcctaccccatcccccatcccctgacaaaaagtgacggcagccgtactgagtctgtaaggcccaaagtgggtacagacagcctgggctggtaaaagtaggtccttatttacaaggctgcgttaaagttgtactaggcaaacacactgatgtaggaagcacgaggaaaggaagacgttttgatatagtgttactgtgagcctgtcagtagtgggtaccaatcttttgtgacatattgtcatgctgaggtgtgacacctgctgcactcatctgatgtaaaaccatcccagagctggcgagaggatggagctgggtggaaactgctttgcactatcgtttgcttggtgtttgtttttaacgcacaacttgcttgtacagtaaactgtcttctgtactatttaactgta

SEQ ID NO: 30 - DNA, 1248 bp, Homo sapiens
atgcgtattcccgtagacccaagcaccagccgccgcttcacacctccctccccggccttcccctgcggcggcggcggcggcaagatgggcgagaacagcggcgcgctgagcgcgcaggcggccgtggggcccggagggcgcgcccggcccgaggtgcgctcgatggtggacgtgctggcggaccacgcaggcgagctcgtgcgcaccgacagccccaacttcctctgctccgtgctgccctcgcactggcgctgcaacaagacgctgcccgtcgccttcaaggtggtggcattgggggacgtgccggatggtacggtggtgactgtgatggcaggcaatgacgagaactactccgctgagctgcgcaatgcctcggccgtcatgaagaaccaggtggccaggttcaacgaccttcgcttcgtgggccgcagtgggcgagggaagagtttcaccctgaccatcactgtgttcaccaaccccacccaagtggcgacctaccaccgagccatcaaggtgaccgtggacggaccccgggagcccagacggcaccggcagaagctggaggaccagaccaagccgttccctgaccgctttggggacctggaacggctgcgcatgcgggtgacaccgagcacacccagcccccgaggctcactcagcaccacaagccacttcagcagccagccccagaccccaatccaaggcacctcggaactgaacccattctccgacccccgccagtttgaccgctccttccccacgctgccaaccctcacggagagccgcttcccagaccccaggatgcattatcccggggccatgtcagctgccttcccctacagcgccacgccctcgggcacgagcatcagcagcctcagcgtggcgggcatgccggccaccagccgcttccaccatacctacctcccgccaccctacccgggggccccgcagaaccagagcgggcccttccaggccaacccgtccccctaccacctctactacgggacatcctctggctcctaccagttctccatggtggccggcagcagcagtgggggcgaccgctcacctacccgcatgctggcctcttgcaccagcagcgctgcctctgtcgccgccggcaacctcatgaaccccagcctgggcggccagagtgatggcgtggaggccgacggcagccacagcaactcacccacggccctgagcacgccaggccgcatggatgaggccgtgtggcggccctactga

SEQ ID NO: 31 - DNA, 94381 bp, Mus musculus
  misc_feature (2681)..(2700): "n" at positions 2681 through 2700 can be any base.
  misc_feature (11224)..(11290): "n" at positions 11224 through 11290 can be any base.
  misc_feature (28032)..(28051): "n" at positions 28032 through 28051 can be any base.
  misc_feature (37054)..(37178): "n" at positions 37054 through 37178 can be any base.
  misc_feature (44115)..(45641): "n" at positions 44115 through 45641 can be any base.
  misc_feature (47999)..(48255): "n" at positions 47999 through 48255 can be any base.
  misc_feature (59012)..(62394): "n" at positions 59012 through 62394 can be any base.
  misc_feature (63574)..(63720): "n" at positions 63574 through 63720 can be any base.
  misc_feature (70645)..(70664): "n" at positions 70645 through 70664 can be any base.
  misc_feature (85078)..(85097): "n" at positions 85078 through 85097 can be any base.
  misc_feature (93428)..(93447): "n" at positions 93428 through 93447 can be any base.
caaaggtttttctgagggaaacgtggaggtaaaatggagtggccaattatacaggcccttaatgaagccaacttttcaataacccaccaacaggttcccgaggaagaatagcaattttctgtatgcactcgtgatcctgcacagcagccagagacccaagatttgccgcagagtgaggctggttgtagccattcaatgcctcttcaggttgggttttgtggttgttgtatgttttaaaggcggctacgttgacaattgtctgaacctcaggatacagtatacctataatggtccacttatcgtactaaactgcgtctctgataaatttataggacatgggccctctttctttctttctttctctttttctttttctttctctttttcttcttctctttctctttttcatagtcgggtaggggcagtgaagtttgtctgccctttgcacagaagggaaccccgtgtcgtttgaagtgtggtatgtcagcagctcggattccacgggagaataaaaacatgttcttcaaaggtgtcatgccaggttaattttattcatttgtaattcgcaccccagtgaagacaaccacgagcacactttaacagcccccatattttcagaggagattttttttctcttattcaaagatttttgtatatctgcttgtttcttgtttggagggggaagcctgctatctgcatgagccctggctttggcaaattttatctagtcttcagggtgtttcataacagaaaaatagagtcaactgttcagtcttggggttcagtcctgggagctggcccgagagacttggaaagattaggattcgatggttagatgcacccttcagcttaactccaaaggacccagcagctcttccttggccagaggaaagatcagcattcgatgatgcatttgacagtaatttcaggtgaaatggatccatgtaaaacagtctacttacggactccagtttcctacagcagcaaggaggttttgaacgcctaatcacacttgattcctgatcgatcctcctcacctttatccatccattttgcactctctgtcgcttgctgtgataaaatactttccaaagtaaactttcagtaccatttgcttttggttaagggtaaaaatgcctgatgctccaagccgcgcctagcgcttctcgtcagctagggggcgctcgctgcccgtgtcatggctgcggtgccttggccgctgtgcctgggaacccgcgtccatcagcacatccggctgcggcggctgcaacagcagcggctgcagtttgtgtcgctgcaaaaatgtcttaagcgtgaagttgtaatattgattttcctgcagagatttgtgcaggacaaaatgagaatataagtttgagaaatctattttcaagccattggcatcgatttgtaaacccctccttacctggcaggtggggaggcggttttttcttttcctccaatttccttttctttttaaacaattaaaattgttattcctgaatgagtgtttttctcccccttggtctgtccatggtcttgacattctaaacattttgttttgttgcttaagcattcacagtccacctagggagtctgggaagagctgtcatcattttaggggtggcccatcttagtgttccccgggggtggggtgggggaccactgtgaattgttgctgaaggggtcgtggacccaagacaacctgatagatggtgatcctttcggctccgatttgataacagccctcaatcccatcttctccaccgcgagtccacggaactaagggtgcaagcaccctttccctaacgatatagcataattcaaacagtgcgggtgattttgtttgcaagcagtgtgtgcttgctggggccagtgcgccttgcacctcagagagttcccttcatagatggatgtcacgatgctccaccgctcccccaaacatgtgatttagtgccgggggatatgtatgtgttgatggtggggtttctagatctacgatgtcttagctttagagtttgtgagatgcacagacagcgcagtgaactggagtcgtctgcgcgagttcagtggataagctgaagagcttgccctgacacaggaaagtgctttattctaacctgaaagagaaataaattaggtcagacaaaagccttagctgtcatcggctggaggaagagggccagccatttatctgatggtgtctctacttcatttaatgtttgcgtctggccagttgtaagcataccgtggaggcaaacacagggtaactatgaggaatataggacctcgcaatcttgggtctgggcaacggtttgtagcctacagagaactgttttttgtttgtttgtttgtttgcttgctttgttttgcttgcttgtttttaattcagtttatgggaagccccaatcatttgccttggaatttggggtccttcccatactgtgattacacaccaacacagacattcaattcgttaaaaaaaaaattatcaggggtgataggacagccggcagctagacgttttcctttgagagcctcttttttcatgaaggaaggactctttggctgcctggttgggcctttcttttagcttaaactctccaaggattttggtccccaagttaatgctgatgtcacatctggggaggagaggtgaaaaatgaactctttttttgggnnnnnnnnnnnnnnnnnnnntgcttggttttcccgggatgtgctgaaaaaaaaaatggctggaagcaggctgtcagctgggcatagctctgtgccctccctcatcaggagctagggagagagggggaacacagcagcctcttggttcctgtcagaatggtgctagattgtgagcagagctgtgttccggggactctggatggtgttttgacatatgcaagtcttttgtgtagttgctgatattctagaattttgttctctctctctctctttctctctctctctctccctctctttcattcttcgtggcagctgataatttgcttgggtgtggaattagccagctcgaactatttactgcaatgcaatgccagaccacacaaaattaagtaacttcaaagtaaaaaaaaaagagggtaaaaaaaaatcctctgttttgctgtaactttttacgaccttgttctagtgaactgctaaactacaaatacatttgtgatccacgctaagaggccttgtagaacagcatgctgagggacttaagaaagcaagtgccaatattacttccattaagaagtactcagacaggggcactgctgcaaacgaaagaagaccaagttggagtcatgtttaaatttctaccctggagagaggaggtgtgggaaggagccattgcccttgtaggcttcttgctgtctgagtatctggatccccgtagagacaacctatctccgctgtacccatggaaatcctccccctgtatctttgaaaacccaaaatgttaaacaaaacaaatgctctcatttggccacagagaacgctcttatatcaaatcattgccagccctgttgtggctctgaagatggaaggcacttgcagtgtcatgggcaaatgtgtttaaaaggtgttctaccgttgatggtttttttttttttttaatcctcccttccttattttcaaaaggcagctgttttatttatcaaagccgattgattcattgattcattctcatttgtcccgggcgtaggttttcattttaactttttggtatggtgagggtctatgagaatgcctgagtgtaaattaccttattccttctttagtctcttcttagttttgaggggatctagcctcctgaaccgtgtttgtgtgcagtgggagggaggggcttggactaatcctgtagagcattttagaagatgtttagaggctgttcttaatcagtctgactttcccccaaggtgaggctgttatagggcagtctgtgcggacaggggtcccctgtctgctgtccccatcacaggatttccctacctagagtcaatcaaccaaggctgtataagtgaggatactcctgtagccaggacgtcttcaaggctcagaaactccctacctccaggctgactaggttctatcatgccccacattggtcatgtcagccccaatcctggtcagtttcccagaggagaaacccactctgtcctcacgtcccgacctgactgatttctctccgtctttattccacttgtcagaaatggggaaggtttcaggttgggtgtggtggcgcacgcctttaatcctagcactcaggaggcagaggcacgtggatctctgagttcgaggccaccctggtctacagggctagctccaggatagccagggctacatagagagaccctgtcttgacaaacaaacaaatggacgaacaaacaaaaaaatgtaaaaatttcaatttgagtagtgtgtacacataaagcaggcagggtggcagcctggagtgtgtgtgtgtgtgtgtgtgtgtgtgtgtgtgtgtgtgtccctattcctccagggaggtggcttctggagggtcttaggggaatgcagggaagtgacacctgggacttgcaggacttctaaaccctctgagcgagctgatggcctgtgcagatgtggtgggttagaatgtataggtcttgtactggaccttgttatttaggtccttggaggaccctgctggggacctaaccctttgtggccccaaagggacaatcctctcagcatgcgcctcattctggcttccatctcctctctgggcacttcattatcccctcaggtggagaacttcataaaacctctcttcgtcgtcgtcctagcgccttgcgtcatccagccgtagatcattttttttccccaagaactgactcttgctttctcccagtcagccctcccccagcccccatggcgattattttcccttggatctaataaattaaaaattgatgggagctcagaaagtgtgctctgccgggtgccgtgtaggtggtgttactgttgctgtgtctcttggtgtcttggcccctcctgagtgtccacccagaatagaacaagaggctccctatgcatgggctagctggccaagtctctagcttcctgggtagccggcataaagtctccagtcagaggaggcagagctcggtggatgctgaacatttcttgtaaacatgcatgcacattgtgatgggggctgtgacgctggcagtacactgttttagcaacctgtccctcacccccaatccttccttactgtctcctcctaccttattgaaacagtactaaccgtgagttagctattaagaatagagatttggaattgaccagaggcaaaggggagacaggagtccatgatgtaccatgtctgcagcaatgtgtgtgtgtgtggtgtctgtttgtgtgtctgtgtctatatatgtgtgtatgtctgcagcaatgtgagtgtaggagtgtgtgtggtgtgtgcctgcagccatgtgcgtgcaggacttgtgtgtgtgtgtgtgtgtgtgtagcagtgcacacaccccatggcctgaggacagctcatcttttggctggaattccctgaggggcaggtgcaagatagttgttgatggaccagggcaggcagggtcctaggatctgtgtgacagagggactttcaggctaggtaatgccctctgatggaggtttggtggctgcttggctgagccagtgtgaacagctcctctccatttctgtcttctgtcccaaattccttcccagcggagctgagactggggaagtttgccttaggatcaagggatcctcttccacttaacagtgatgcctattattatttgtgaagcctgatttcattgcctctaaatgcgtttaaccagctgggaggaggcccagccttgtaaataaaatgtggttttgttgtaaaagaaaatctaactcttctctctctctctctctccctctctctgtatttgtgtgtatgtatgtatatatatttgctcacgtgccttaaatttaatatttgaaaaccctctccaatcctgtggtctcttacatttgagcaagttgccggctgcatccgtccattcattttcctcctaatgagtcaaacatcttagcaactgctgcccctgttctgatcgaggtgtgttgagggtagtcatggtttgcaggctgcctgacgcttggagcttttcaggaaagcacgtatcttttcaggggaacgcttttcggccttacttgttaaggctgaatttacaggatgaggttgagggagggggccagtatctagagtttgagcttggaatggctgcattcatctgtctcttctctctgtgtgcgtttgggactttctgcctgtgtaagcagtggctggatcctccgaggttgattcggagctgggagatgcaagtgtctgggccagacgtacatcttcagttcagggcaggcaagcagggttcccagagggacagactccttgtactcaggtcttggccaacaggctctgtcccttttctttcttccattattggtacagttcttagaagggacacacagacacacagacacacacacacacatgcacacacattacatgcccagcccatatctgcctgccagcggaaatgaaaccacagcctttggtgtgtctctgagagcctctccctgagctgccaggcccagtcagctgcctggtccatctactctaacacagaagttggggttcagtgggactctgctgcccgagtgaaggtggggaggggggcgttgaccttgccaccttcttcaggagagaatcattagcaacagggacccacacatggcctgggggcggggagaggaaagcccatgcttgacattggcagggccagcctgatgtcacaggcaagcgttttgcttttaacatgggaagagggaggggaggtagtttttacgtttctcctgatttcttttcctcctaactcctttagtagtggaagcccagatctacgttctgagctaagcgtgagctggcacagcttgtctgtctgtctgtctgtctgtctgtgtgcctgcctgcctggagggctttgggtactccagttggcttgcctctaaagggaaccccagcactgcagtgttataaacagtattggagaccttcaaacccaattactggggctcccagggcttactgcaggagggtagtgaaaagacagaccgacagagagaagatagacagacagacagacagatacataaccagatattacagaggaaagaatgctggtttggagtgagtcctggtcagaggaggagtggagctggaaggatactgtggacagtcatatatggcctttactgatctttatactggtctgtgtttctttggagttacaacatggatttgaagttttgtggcctgaaacctcctcacagggaggaggatggagctcatactatgagaactgtccaggtgggtaggcgtgactgaaaaggccaaaaataatgatattattaataataatgatataataatatcaataatatcaataatattagtagtaaggaaggcagactcaattaacaggcgaaatggagccctttgctgtggaaagagagctacactggctggagatgtgggtttattatttttatcaaaggctgtaaggagcagaggccttgccaggcctgctcgaggcgggcagtggatccctcccagggatagcacccctccctgcttagtttgaattctcaatttcaatttcagtttgccccccgcccatccccattttgttttgcttctcagtttatttcctttgtccctttttgtttcttttctgaccaaacaatattttgacacccttctcctatgtctcagtcggtgttcttcctttcctgtgtgccgggcgggcacaatgcatctgtatatttctggaggactctttgcgcagtcctctcctttggctctgaaattatgtatatgtaattggtaattaaaggtgcaagcttttcaatataaacagtattgctcaatgttagattattaaagggagaggaggcaccgaataattaccttttccgtcctgacaagcggtttacgggaaatccagtctctccctcgaaccttcagcttgaaggttgtgattacattttaaccatggcagggtggcttttcataagataaatcggtaaattaattacgtagcattgtcttcgagctccttttaaagtaaactccgatttcttttttcaagtgtaattaatggtttctgggcggcgtggcgaggatggcaccgttacctgtctttttttttttttccttttttctctttcccctcggttgttgttattaatgatctacagacaacagacttaggatttacacacacgccgggtgtttctgaactgccatgttttccggtgcgtgtcttctacgtttaattcacagagggccctgcctgcctccccggtaaccacgggcagagagagactcaggctgtgaatcccattggtggtacctgcccttctccctgcacggctccagctgccctttctttctacatcacctgcctcaggttctacacccggtgttgcacacacactagacccccccctccccagcaagcttatattcagaaaacatagaacagtgactcacatgtagcattggagatgccacaggcaaatttgcttcagttttccacgttggctctggctccttaacaaccccactgccacggaatgtctcttcctctttcccaccctcttcagttcctctgtgccaatcactatccattcctaattgctgaacagcttacaatttatctccctcctcagtggcagacctgtggctgtccccagctcccatgaagacctggccactcgtcttcaaggctgacaccgaagaatcctagccagagtcgcccagaccctgaggggaagacagagcccccttgcccacttcctttgatttattgtggcactttgctgctgagccttctaagggtcccttgagggagtggctgatgtttgaagcatttattagcttcaaaaatatttaggtcctgtgccccttccagaaaaataacataaacaacaaggggggaagtggagtgactgctgaagaaatttaaaaacatccagcccattgaaaagtgtggtttgagagctgccaagaagtgatttttgcagtctgaagaggctgttttctttctcggagtgaaaagaaaaccgaccgacagaaaggctgaggtggggagttgatgagcagtgagaattttacgagggtctggaggtctgagcaggagcgcagggtcgggggtggggagggggcgggagggggcaggaggggaagccagggctgccttttcggcttgcttttcccttccgagtccccgagcacctgcgcttcttcctctgggcaggactggctttccagtgcctgtctgggtttctgttttccagtttggtgcctggccaggactcaggtagaagaatgtgagtaggaagctcatgaatagggaagccctgaacgtgaatgaaagctatggggagaaggctcgtctccagctggagccagggcttgggacacagtgttacctgttaccttcctagtccccagccaagccgcccattggaataatgtggggccgggggttggaggcagcttaaggaaggctgaggtttgacttcccaaatcattgatccagagccagaacctccctgagtgacactcacatacccagaagtgcgagagagttgtcccccagctgatggtgttgtgggcaggcagggtgtgcgtgtgtcatgcgtgtgtgtgcacatgtgtgcagggcatgctctagggagcccaaatcagtgctgttgtgctgacctcggggctatgatggtgaactccggtccctggggggatgtggggagccacagaggctggcagtcgaggggctcgtctctcagtgggaaagggtggaaggaaccagtctgtgatgacctaagcccatctcttgtcttctctgccccttccctgtctcctttctgtctccagcagaggctgaccatgtggaggctaccatcctcgaggaagacgagggtctggagatagaggagcctagcagcctggggctgatggtgggaggccccgaccctgatctactcacctgtggccagtgtcagatgaacttcccgctgggggacatcctggtttttatagagcacaagaagaaacagtgtggaggcctgggcccctgctacgacaaggtcctggacaagagcagtccacctccctcctctcgctctgagctcaggagagtatctgagccagtggagatcgggatccaggtcacccctgatgaagatgaccacctactgtcaccaacgaaaggcatctgtcccaagcaggagaacattgcaggtatgacgtttgcttacctggtggctgctgaagctgcctccctagctgctccaactccctgacttttaagcactgattctcaggaggtccagggcttttcaaaatggcctctgggtcaccatctggggcttcccttttctgagggcccaccttccaggtgactctccggggaagacaaggtgaagaagacctgactgttgtgtgttggctactttgcttttggtgagaaaatgctgacttgtgcttaatccagaagtggcctggagcacgagatggaattttggaggttggcttggccctctcttcgttggtgatattggctcagcccctggctttggagccaggctcggtttggactctgtcatttccaacctggaaacggtggcttcctcatctctaagatggagtccagaaggacccacccccaccccctttgtgtcgattgttgaagaacgcaggtgattctgagtgtggtagtacctgctaggcccttatgcatggcacttgtctacactcttctcttcggactcagtttcccctgttgtgaaaaaaagggggtaggccctcttttcatgagcctgcttcccattttgcctgaccctcaggttttgggaatctgtctgatttcgacttcatcttgccttttgactttgggctggatatcttgagaattagagccctattttcctcttttgtgaacggggaatgaataatcctagcaggccttgtgtgatgatggaggaaggggggctctggaagagctttggcaggagaactctcgtggggggtgtccctctggctgtgcagcagccagatggaaaactgtggagccagtcctggaggagtttgggtcctgannnnnnnnnnnnnnnnnnnnnnnnnnnnnnnnnnnnnnnnnnnnnnnnnnnnnnnnnnnnnnnnnnncattgtatcctcttggaagtgatacaaagcatgggccaggacctcatgtcacctagaggcgctcagagtcactgtaagcccagctccaccacacacctcagttgcttacacttgagctccagtttatccacctgtatactgggagaaactggacagtctgatacccccacaggcataagatgggcagtggggagaatctgtggaccagcttggccttggcttggctttctggtgggtgtcctggcagcgtaatcaggcctggggcagacaggcatggctgcacaccacctccaccattaaggcaaaaagggtgtctcgtcccttgtctgtgttgccaggcataccacttgggatagatttcaagagtgtggggacgcctgcccggcgtctgcagtgcacagcagcctttgaggggtggctggtccctacttcactttcatctgctgacccagcctcaaaatcctcattttatgttgaaggtctttcccaaagagagcctgcggatcaccgtggggaagtttgcctaagaaagcaactaaatgtgatttttcaaaaggcgcttaatctccccacagcttcgtccttatccttccattccctctgccccccacccccaccccgtttcctcccctcgtactgttaatggcccacagtatttttattttatgcgtgacgggagatagccttggtccgtctgctcggagtcggggcaagaggagcgagggaggagtggatttgttcgttctagaagaaaatatgtaaaataagcctttggaagtctaaagagctatgtttgttcaaagcatttaaaatgttattctaatcaaaggcacaaagcactttgcatgccgtgtcagctgcatctggccattcctcttctttcaacccatcccacccttcctttctaccccagggtctcctggtccttcctcacttgggtaccaacttttcttcttcttcttcttcttctttttccccatttaacagaaagaaaagattaaagaataaaacatcagtggctcaaatgtataaagtaatttaatatggtgagagcattaattattttagcttaattgaattccgaggaccccgcagtccttgcagcttggtagacaaggcctgtttattatttctgtagattaacagtaaaggaaacacagataactttcagttatttattgtaaaataaatgtgtcaattcatgtgtaaagcaagctgctcaaagataattgagtctttatattttaagaggggagctaggaatcacgggcccttctccactcaggcacccggaaatccttccagctgctgtccaggcccctggcacactggtctccatgggtcccctgctcctgtctcccgcctgtggcttcagggtcccttccctgctgctctgtgccctgctgctgtctccactggccttgatggtccctggcagccgctggtgagcaggtggctgctgattcttgggactttgctcctagctggccatcatggctgagtccttggtggggtggctatgctactggaatgttctgaggtctgcagccttcactttggtggggcagcctttcctctcagcctgacacttgtagaagcagggccccagcgatgggtagagatgttgttctgtaggtgagagtccccctgtccttaactgtgtctccagggtgggagtggagctggggtttggccagtcatctaaccaaagtgtggttgacccagtccctaccctttccttggcaaggtctttctggagatagctatagtttgtgatctttttgctgttttaaatgacagagcagtggttctcggctttcctaatgctgccacctttgaatatagttcctcatcttgtggtgaccccaaccataaaattatcttttggtcctacttcatagctgtaattatctgcgaatatgtaaatatcttaggcaatccctgtgagaaggttgcttggcctccaagggggttgcaacccacaagttgagaagctctgtgggaggattagaaaggtacagaaaagattccataaagcttgggtcctagaggacattcattcattcatccattcattcattcactgaacacctatgctgttccccttaggagggtgtccctcagggagtatgtgaggaaattccagccctatctttcatgttgctacttggcttggaatcttcttgctgctcccctgctatggaagaggaggtcccggatgcctggtttccagggcagcctagggatgggggtgatcataagcaaagtctgtggctggagatctgacccaagggatgcctgtgatgacaccactcatggaggtgctgtgtgtccctcatgactccttcttgtggcctctccctgcctctgttaagaactctgctcaggcactaggtccgtgtacctacggtgacctgggtcagggatgaggaaatacaacattggtggggagtgggggtggggattgtttatgggagcgatggagagaggaaggggctcacttgtctggggtctggagctgtgtaggaaagacaggatggaaagctaccccactccctggctttcagaatcagcttccttatctgtgcctgcagctaaggatgattgcagcctgcgtgtgggtacctgctgcaggggagggcacaggcatgatacacgtgtgcagtgcgcatatgttggcccctccccaccccggcctgagatcatccaccctggcaatctgcttcccagctccacacactctttggtttttaaaggaatggcttcccgagagttgtggaagcgtcaactggttcctgaggctcagacaccagaaacaatggcagggtttagacagtcgggtgagggttcatgtccacccgtctatctggtgccatgttgtgacgtcattcagtacctcatcctgggaaggggacagggactgtggtgtcccctgggctgaatccaggcacccccagaccctcggctggtctgagggtgagtcactcctttcctcagtttcctcctgcatccactctttagcatcctgcagaggactgaatgaaatgagctccaggatataccacacggcgcaggtcaagccagagacagactgcaggcaggggagagtatgcgcccggcttagcagcgatggggatcccactctctcagtcctggagctgagtctgctcctctctgtggattctacactctcctcagaatttccttagatggcctccaaaggaaattggctttttcttgttatcaccttgtccacaccccaaaggatagccagcagggagggagtctgctctctctctcagctgtcttttccttccccctcaatgaaaaaaaagaaagaaagaaagaaagaaagaaagaaagaaagaaagaaagaaagaaaacggactaaaaagaggacatggctgatcccaaggggctgagatttttattatagatataagagagaatagacagaggcagagatagagacagtccagaaagaacatgactggaccaagtcaggcctgaggagagaaaggaagcaagcgaagaaacaacaaccaagatggcagcctgggccaagagactggcataaccaaaacagctgagttatctaggggccagggaagccaggagaagagaaggcccagtccagttcctgggcaggagtttaaggtaagggttgccagccaggagaaccctataacaggtagggactgagggatgctgggagaatatggaggccagggtctactttgataagttaacaggcacctcagccagttgtcctgggtttgagacctaatgcttctccaagctcaaatgtcagttttctgaaaggtaagatttagggtagcagtgacaggaggttccagatcactatagaggcgacaggtggctatcactatggtgtctttctcagaagcctgagcaggggcccaggatgagcctgcagagccctggtatagacagggcttggcttctggcctcagatgctccttgctggagggaaggggtcctgatgaaccccacgatttacacgctgctctgagaatattcgctgcaggctatgtagaaaactcatagtgaaaaaaaaaatgaagacattactttggatgtgcgagaaagaaaataagtggctcgtgctggaagctggagataaccccacttgcaggatgcctcaaaacacttgcgtttgatctatttggagttgttattttccctccaaattacgattagttaaatccatgtatattgtggcatggattatctctctctctctctctctcttactgttaaatcgccaacgactaattattagttctgtctctgcagtgaggaatggcccatgtctgagggacagagccctaggtgaagattgggggttgggtgcggatggcctgacctcagggctcaggataggatgtctgcacggtggtccaggcagagttcacgccagactcttctttctcctccttgtgtttgatggactttctgacttaaatttcaaacctcccaacagatagagctaatccaatacaagttgaaggacttgctgcagtcacacagggaaggggagtcatacctggctggcctggctcccttgggtagatgtctttagggagagggaagtctgtcattgggctggcagatttgggaggcagcaggcagtacctctgtacttcatctgggatgacatttgaatcccatgctgacgtctggatgtagccaaaatcctcaggcccccaaaacttgacccttgcctgtgaaggctttggagagaggcagaaggcagctgagcaagctgtgaggtgtgaatttccacgggactgggttggaaatggctttttttcccccatttatgaaaatgttttattttatacttattgtcgcaattatttgcaaccccacaaatacaaatcacttgttttattttgtggaactgagggttccagtaagtctagttactcacatctgggagtctcagccctctgtacaactggatgatctttgctgccttccagggtgggcggtttactgtggattttatctgatattgtgtgtctgtacacccagcctctagaccagtagctgttgttacagggttactcagaggaaggttggcctcagaggtgacactggaagaggagctggcagtgccaccacagacttgtcggcttgtctgaatttagctctcatgatcctgagtcaggacagatggccctttgccagacatcactgcccagtcccgaggcttggggccactcgtctcccagagagggtcccatgtcacctgtgacagctcgtgaaccataagaatcaagaatcagagcggtggcaggggcggcctcagctctgagcagtagtccaccgtttaactggacttttcaaacatgggactgttagaagggcatctcccagctcctttagggatgtatctttatttgctgaatggtgcgaattggcccattcttagggaagtagcttgagaaaggaggagagggaagagagaaagagaaacttggctctgggggagaatttaaccacattcactctgttactgtttgtttgtttgtttgacagtagttagcagttgaatagagtatttatttatttatttacttacttacttatttatatagcgtgtgtgatagggttcattgctgctgctgttgttagtcttatacaaagctgggggggatgtgtgtgcccatgactgtgcaaacaagacggcctggccactcctcctgcccatcctgggtcatcttttcatgggagttgaggcttccgttgttgggattttagtttaatgcatgcctgtttagtatgtgctgtgtgccactatttccaagggccctgtaaagaagaaacctccatttaatcttataaacacgtttggtaggagttaacctgaagcccactttacaggtgggaaaaacaagtgcagattcctcttggttctatgtgctttctctatctgtttctctatctgagggattctatctctgtcctctgaacgctgcaaatcagcgactgctttcgttttttgtaggagaggcaacagagccagggtagggcctaagtctgtgggtggttcactgaaacctggcttctgctctgtgccccggaaggagtcttcactgggccatctcctcctacaggacccagtgggtttaaactaagttaggtataggcttatttgctcctagctgggcagcggctgctgcctactagaggccgttctgagaggaagaggggcctggaggagagcgactccacgtgttctgtatatatctgtggttatgtgtccactgctggctgtgttggccctacactaggatcataaccaccaggtggcttcagggtccagggagagggagggtcagactggtgggcagggatctgagacctggagggagtattcttgtgtggccttgactaggcccattctctttctggttcccctgtcttctaagctaaaatatgagaaggggtgttaagtgggggtggggggtatggagaggatcaacagtacaggggagtggattgctgagaggaaaaggatggacctcctgctaagcctcataccagggtggtggtatccaaggcttcccacacagaaaactcagacctggatcctggagtagacccgtggtaaactgtttagagtgcttcccaggccccggcaaccccccagtccaaaccagccccacctaaggacttgtgacatagctgtcatctgtgagctagagccagggggctgtttccattgaccttcaggctgttagtgtgaccttacaggaacagggcagctgtgggtatagggaccagccccattgaaaggcagagccatgttaaatggctgcagtcccagtgctcgggctgcaccccagtgatgacacaaattagtcctagttagcatccaagaagaataaacctggtttccctcgaactgtctgagtggcttcctttcagctttcccaagacagaccagatttctggagagggtaggggtccagttagggacggctcttgaggttagaggccaggacggctcttgaggttagaggccaggttaggtcttgggtttagggtgctagcaagggtctggattcttctcccttaataagagataggtgtgtcctctcttaaccttttcccatctccagcaaatggctggaaaaccgtagcggtgtcctagaccagaactaagttcttacttggagttggagctgggtctgccccacccccaccccacccgagttcaaagctagccaattaaggggcccaaacagtgcggtcttccctgcatcattggcttgtaaaactttccctgccaaccaggcgactttattccctgggaagggggaaaaaggcatgtaattttcctgacctggccttttgctttggggaaaatgggaaagaaagcgattttcgtaaacagtcttgtcgagcggcaaaggaggtcagagtctgtagactgcaaagcaggggtctggaaagtggcccttggttgtggtagcggtccctgaggtttcagggtgttttgaggcctaacgggggactctggggtggggatggacatcaaaatcttccccattcggactttgaacttcctcaggcccttgccacaaggcaccactaatgcaatttcccttgctcccggaacctgcaacttgaaagactcatctcctttcccgcctccggccgccagcagcccctcccccacccggcctcaagtcctccctgtcctggtccacgtggtgtgcaccttcagactctgtcttcctggagggcactcggaagtttgggtccactgacaccagttcactcagcaggagaacacaatggcctcccttggagccagccgtcccgtgctatggccgggcacaaggcgcgatgtgcacccctacacgttggtgactgcacccgggcctcccaggggcccgccgggtctgctgaggacctccgacgcgcaggttgctttcgggccttggggctcttcaggtcctcttcgggccattcctgcccgccctccccgccgtgcacgttgattgcgccctgggcgggaggcgagcggggccggggccatgcataattcccgggcttaatggagcagctgcccgcgcggggcgggtgcaggcgcagctgaccctgcagccgtctggcctcgcggggcaggcgcgctcctttcttcccagtctgcttcggccggggtcggggaaaggggtgggggttgggcaagccgaaaggccactcctggggggagggtccgtccttccagtttccattcttgcaacttttgctttgggcttgggggtgggagcatcgagtcgtagccgctcggatccgctcctactgaagttgcagtgcgggtttccgcagagcgcgccgaagtcccagactccttttttccccttctttccttttatgtgccccttcctccacccctacctctaccccggcaccttggcggccccaagtccagccgcagtccagcaagcacaccgctggctccccgccagcctctttcccgggctgcaggagagggatggaggcggggacccaaggtcaagggcgggaaggccgcctgccttgcggccctttgtgcacaggccgcccctccccccaccgctctccccctctgcccaccgtgactgcgccaagtcgagtgacccctgactagggggattgtatttcagaagctgctggaagctgccattggcctcttccctgaagccgccactgcgaggggcagatctcacagcccttgtgacttttgtcctggctcctggggccactcagggaccctctcccccgccctcacttttgcggacgtcgatcagatgggatcttaagctcaccttggcctaaggatccaggtgagcccggaaggccggggcctgagttctctcctgcaagcttgagttcctgcagggcagccaggcttgccccatagtgggagatcaggacctcttgtttctttgaaacactcggggacaaaagttttctcaattgtgcgggaatgggacccgccactggggtcgatcggaacgcataggattactgggaatagagtcagctccctaatcaacctttgccacttctcttaccacaccgctagagagaatttgtatgcaaatgttatcttgctagaatttctggtcctgtgtcttaaaagttggcctcgtggttgaagctctcccagagctggaaaaacagtacccaaaaaccgtgtgttgtttgcctgtgaatttgccttacctgagacatcgtttgcagcataggattgggcccaattctctgttctccatttttcagaaataggtctgagctagactgaatcgatacattataacagtaggtaggcaaggtggtttaaaaaatgtgtgtccacgtgcacttaaagtttgggcctgatggtaggctgtgccttctgccctgtctgggttctgtgtcaataataccttcctggtattttgagagaaagttgatcttcaaaagaaaaaaacaaaacaaaaaaaccaaaacgcacaggtttagctaatccaaacttggagcaactggcttttctgatggagtctaaaggtacttgtcaatttatttgttgaaaagccttggggaggagtaagtccttctctggaacggaaacccgccagtcctggacaggaagggtttctctctgcccgaacttgctcctggatttctcagacgtccatttatgacagttccaacaagacagaaactgcctttggatatctgtaaatacggctaaagatcacaaccctgccttcagagtgggctgggaggaaaaggccagttctgtgtcggattaatagttatgtacctgggttcctttacagaaggaaagatgaaacaccgtgtgtgtgtgtgtgtgtgtgtgtgtgtgtgtgtgtgtgtgtgttcttcccagtcaagggagatgagcatccagtgtctttggaggctaggtgtgtgagagagaggaggagggttcacagttcatacttaatggccaccaccccaaggagaaggccagctaaccacttgtgctttccttactttccttactttgacaactcaaaaggaattttaaaaattatacatgattctccctcacctcgatttgagttaagccttaaggcctcacagtggaaggctttcctctagggctgatgcatcgagcacccccatccccgcccctcttctatcccccctcccccatccttcgaggtaagggtgtgtagatctttcttgcctcggtgccagtgttagagtgacagagcgctgcctggctatgaggtcctgagccctgagctgtgtcctcagggcacaggtggcttggcttggctttgttcaggagccgtgtgtgggaggtgtgcatagaaatggagccctccgtcagctggatctccttgcagttcagccactggggttggtagctgaagcggcggcgcctgcaacagcacccctgcccacccccttcactttcactgcttggagaaatctccgtgttcctgtaggctttcccacaacgccgctccccttgatggcactgcttaggcatttgataaatatttgttgcttttggagcatcaggtgttacctcaaggtttaggcactggggtggagtctgtctgggacctttgacgcacagcctggcttatccttcaactgtccagggccatccagtccctcagctgatgcctgtatctgtagaatggggatgtgttttttttactaaccagtctccatctatataggagcataagcgagtggagcgaagctacggctgatttcatagacatcataccagcgagactgttattgtttgggccctgggggcggggtgactaatttgcaaagaggaaaggaatccaacagctgcttgtatagggtgttgtttttaatgcgaagaggaagcatttgggggctttggggagaggcttacggcataccacaaggaaacgcccctcccccacctccattcacttcagaggcccttctctgtagctccccacttccagctccttattttttgggaacgtgaagagattcattatcttaatacctagtggtgttgctgttaccctgacctgaacaccccagaacatgtcctcttcccctcctgatactaggttctggccgcggaagggtagggagcgagatgggggtgagggtgtgtatgtgtgtgtgtgggtataggatacagacttgggtgaaatgtatacagcaggcagccttcaaatgtgtagtcttgctcaatgcaggtgaaaaggaactcggatctggctttcctttctctgccgcctcaaagctctcagaaattagcatctgtacccattgagtccgcagctggtggctatgaaatggtaccttccttcactagggagaagccggtctccagtggcctgcagggggccaatgttttaccttttttttttttttctttcttcagtttttatattcaaagaagcttggtttcttttccctctgccaatgctgggtgacccgaatccaagttttaataataacctcttgctggacccgaaggctccaggctaattctgctctttaggtctgctgaccttgctgtgcatctgatgtgtttgtcagcttcggtttgggatggggtgaatgcgtgtgcaccctcagagttcctgttccacccgctggactggaggtgggtgggtgggggatcgcagatagaagtagaagactagatctgtaccgtaccggagggtaggcttgcagccaggcgtgtggcacctgtaattgaatccggacctgcgttccgtgcaggcctgcaaggatgcgcaagggaggtatcgaggttctaggctctctgtgtggctgaatcgggcatgaaaccgtcttctgactccgtggagcccaaatggtgtgtggagaagccagggagcagcagagagcctagaagcccgtgcacgttctgtttgcacgagtcggctcttgcatcttttgttagtggcggttccttaattaacccgcggattagggctgccttcttttgacacgtacatatattttgggggtataatattcttgttctcctcaaactcacaaccggaaccgctcaggagcctccccagggagctatggcctcttctctccctcttgtcttcccagcttttcccttcctgttcccctcctacccacccttcccttcaacccaagtgggcttgtagctgagtggaggacgggcgtgctacacacagctaaataaatcatgtttacgcttggcgttcttggtagtgaaaaagctgttggctgtttccacttccgtatttctcagcatttgcttcctacctgtttttgagtccatgcccagaaatagtagttttgtcaaatgaggggataatgccagccagccttccctgctgccaaagaagctgatggattttgcaaaaacagagtgacgtttttttagtgacaccgatttccccccctgccccctcaaagaaattagggtgtagaataaggggtatttaaaatgcacatggagcaggggagggaaggggaggattcctagctgcttctactggggtttgtagcaggcaaggttagagaaggaaggtctgggtttttgttgttcgattctctcagggcagcaggcacccgtaggaggtgtagaggctgttctgagcccggaggagagctgagtcaagctcttttcagtcccaagacttcattttctcagatttggagatacggtgcaatgaattttttttttctttccttctgttcagttttgggtctgtttagttccggaggctttcagaatggtacttgccgaattctttctctgaggtaccagtaaggaatgtcaccctgggcccggggtgggagcctgtctgcacccaacttgacagtcagtggttctgtacagcatgaggtacgcaagcctcccgcctctgcctttaacccgtgatgctgttttaggggcatgtgaaaaagtcactctcgtgatgggtcctgtctgccaggcagagggcttcctgggtaatcaaagccaactgcaggcttgtggattaaaaaatgaaaagaaacgatttcaaaaccaagcaagtggcagataaacactccgcttctggaggaaggtgggacctgatttctctggaagattcctgcaggaattctgtccatggtcaggcacatcagccctgttgcaaagatggccaggaagaaaaaaaaaatcacaataaaatcaaagtaggcatgctatgctttcccacaatttctgatgtaaatattttgtagcaaagatggtatttccattgaggactgtgcagccagcatctttaattacattaaatagtggcacaagtctcagctgaacgtaagcctccggttaggtccgctgccgtgggctcgctagattgacttgtaatcatcaatattgccggtgttaacgtgataaccacgtttattaaatttatcccacgaagtgttaatttttatgtattttgttgtgcacacaccccacatgacctctggtatgttagaagatgaaaatgaatttcatgtcaaaaaaaaaattaaagaggtggttgtcagactgctttgtcccccttaaaaggaaatgggtgattttttttcattttttaaaatttttacttatttaattttttttttttttttggccatcaaatgctactaggttgaaaagcaggctcacaatatgtgtattaaataccatccacgtacagaaaacggaggtaaagagacgacttggttgaacgtaattacaggcctgctccgttctttagtcagtgacatttcagacctagcttagaaacagaaagagacagaaagagcctgcccttatgtgaggcaaagcattcaacccacattctgtgtccgttcgaaagaggcacaaagagatgacagggtggaagttagctaagtctagaggagagctggattaaaaaaaattataataggggagttcaattgttcgtaactgacgcacgcaatacaaactaagcgtgctgttgagggctagcagggaacctctttttagaattgattcctccccccaccaccacctgaactttctctttaccaagtttacttctattccgtctgaaacaagaaaccctgctaacccagaggctgggagatcacttctgtcttggtggagttttagggtccggtctgtagaaggttcagctccacatgtgtgcagcgtgctccatgctctgggcctgagtcactgcgtgaaacccgtgttggtcccttcctgtcctttcgttccttttttttatcggcctgtgctattttctttcctaattctccaggatcctcacggttcagacgtgcatctcctctctcctcattctgtgttttccccaagcagaagctaaggttagagctcctgacaccttctaatcataacggtgtcctgaactctgcagcttccaaacccatttggtatgggatcagacttttgatgagagacaagttcattgttttcgggttaccagtgtcaggcccagtggatgctgtctaggatagaggagtccttcgtttaaaactcccaggagtgcccaaatctgacaattcatttcctgggttattgccctctggtcacatgacttgctttcattatggatttcctcccaactccgcctcctgagctgtaaaggaaaggaaacacagagacttaggggcacatgagcaagcttgtcgctggagtctggtcctaactaagttttatttgtgaatggactgaagggtcctgacctgtaagtctcaggttctttttttcttggaatgcaaacagtgtacttagctgttgacttccatttttaggcggtatcttcatgggctctgagcccgtgcacacacacgtggtaaactgtttgttctggaggcaaaaccgagatgaagtttctgaagttcttgactgactggaatcagagggccgactctgataagggctgatgcagccacacagcttttggctaaaaggcctagcgtgggaaacagggactttctttgctaggcattggctatttttataggtaagattagagactcttgtcagccccagctttgtcctggcccctgtagaccccaggtagatgccttagcctgcccatgtttctgacacagatgtatgtgtgtgctcctggtgcgtgctggcatctctagcttctctctctctctctctctctccatcacagatgtgctcacccgagtttctctaactagtaaaacacatggccttcccctctggtgtccctaggccatgtcattctcagaatcctggaccctggtttggcggggtatgcctgccaagatcacagtggatggccgctgcttactgttctgcgtgcagcagcctgaagccaggctcaggctttagcagccattgaatgtggctgacatgcattccagccgttctgagagctccaggctccctcaagagaagcaaaagaagaggttctagtttcaagtttcctcagcaggtgcccatctgggggctggaaccgtgaggctcaaaggactgactgtctggcttctccacctcaccctgggtagatctgaggagaggctttagggtcacctgacaccttcctgacatgtggactatcctcccgctctgccctcagagcctttggaagctgttggaagattctggaacaggtggtgtagcctcacctgtctttggctttgggtacagaaaggggatctgcttgccccaggggatttttagcagctccttgttttgaggaagttagaattggcagcagtggaaagaaacaattgctcctgggccttgggaagtgatgctgtgtggaccagctttgattgctagatgctgccgcccgagaggatggtctctcttccaacgctggcacggggcagaactcgggttttggtgtgccctcacagggtgcaaccctttctctgtatctcttaacctttccctggaatgcctgtcagggagttaaaacggtgtggctctttgtcagttacagggatgccagatgagggaggagcttgggggaaggcggcctggctcaggatccaaaagaagtgctgctttctcttagggtgcccctgagcctttcacactggctgcaggagagatgcccagctgtgcgcgtggggcttgtgagtggtgtccccggtggtcatttcaggaagaggtagtaacagtcctttcaggctcagtcatgagcagttgcctgtggcccttcaggctgtggcctgacatattcttccttgtcatggacacacatagaggccttccctgagtccagtcacaagcagtggatgatgggaaaatgagacaaactctcccatctgcatccaacattcggtcaccacctgtaaggtcaccaacccttgagcgccttgagtccagggaaagggtattgtgggtttgaacaagagggggcgtcctgctcagatggaggacgtggaagtgagagctgggagccggggagccctcaaacttttccccagagtttctaggttgggcagttgctgtgagcctggctagccttcccctgacttgctttctggctctgccttggaggcctggcctggcttctgggttttcattgttgttagagcactgggtcctctctcctgcttcgttttgtctctgctttcttatttcttacaaatggaagaacaaaaagaacgcacttgttgagcttctgcgccccagacctgggtcgctttgacagtgagtgacagagaggctctcttaggatcatttctagtcnnnnnnnnnnnnnnnnnnnnatttctagtcctccggcctcagctactcccccacccccaccccccaccccccacccccaagcagagtgggagagaggttagtgatggcaggcccagaccttgtctggggagttacacagggcctgtttccattaaggtggcaccccacccctttgaaataggaaattgccaacatggatgtcattggctgctaattaggtgaattttaactgcaggatcattttaccagctaataccgttatgatgtgcttcctcgtgacctgtggtggagcccttactgtacgagctcagcctcagcagcagacatctaggagttggttgctcagcttcctctgagtggctgctggctttctctgttcctacttcgtgtgttcacaccagggccagtgagagcagaccctgagatgcccaggccgtgggcaccagtgcccctcatccctatgtggcacggtcccccaattcttgggcctctggaacagaccagaagcttcgtattatgatttgtgcctatctacatggtaccaccacggggcatcatgcttttcaagtctaatctgccctcacctccatcttctctctctaccaaaccggaaaaagaatcttaatttcctgtcgggctgggaggaggcgggttagagtcaggataatgactcttaaatatgagcaatgcgtctggttccatgttatttttcctctaccctcttaatacacagcattttttatcatccttaagacaaagtagctggcaaaatatttaagtgatcagaaacaaatgtttttatttgcctgcgtgcgaattgggttatctgcctatcttgtttacgaaatccggggctgccttcccgcacagtatgctcgcctctcgaatcttccccggctcccatttccatatttctgcgtgcttgttctttgttaatcacttggcaagcgcttatttgaatattaaaaatttctttaatcatcaaacgcaggagcacagtctcatgaatattcatattctccccccctcctcagactggattctagttcattaccccgcagtaaaagccaaacagccatcaatcgctctcattactggctctggcgttttgattggctgcctgctgcccatagaccttttttttttttttttttttttttttttaaatttcccttctcctatgagctgtcttatacctgccaacaactttaaaaaaaaaatcaacaatgcaagaataaatttctctggttgaaaacaacttagcaaacttgtcaaacagcccttgtagcttgctgggccctctcgggacaccagaaccacaaacctccctcctcagtccaccctagtcccaccaaaaaacaaaacaaaacaacccaaaaaaacaaggagaaagggggtagggaagaaatagaattaaataaataaataaaaaagagaaacttgagctcagagagatgaatatttgtcaagagagttgacgtaagtttcatttgcataatgactttgtacttctgcattaataaaatttgcatatgaagccatgttaattactcctgatcatgctttttgcattcatgcatagtaattttctccgacttgtgagaattaatgtcttggcacgagggggggaaggggcgcggggactgtcaggttccctcgccagagtccctcgctcacacgcgctggcgtggatgtctgtctccttctttgatctctgactcatttctgcactatcagtaggagttctcgccttaaaaaaaaaatgtatccgttgaaaggcaccagtagggagaaaaatagacttctgtacggtatgtgccaggccacctcttggggtaggaacatgggatctgtcacctcccagttgcagagtggcggccctgggaaggctgcaccgggaaggcttggttccctcaatcggggctgggcggttccaggcattttttgtgtctacaggctcctggtggtgggcgtgttgctgcttagtgcgcatgtgcagggcatggagcccagcatctgcagggactgcttgcaagggaggtgggcttcaagctcccttcaagtgcctcacccccaggagggcaccaacagtgatcttgtcctctgtttggactttagccatcataccagaggccggtttgggagaccttttgaatattccttcgtaggtggcttaaataccaagaagtcagtctgaccttgactttggagcaccgttttcacgttttttgagaggggcaatatatccccaccccataggaatgttttatgcttgcatggcataatacaagtatcaattttttatttctttttccctaattaaaatgtacttttatgataaaactgaggcagccagggtttcattaagctgtccggatcctacaagaagctgagttagagcctacatccctcccccacataccttgatacgtatgggtctgtttggactggcttagactgcaaaagaaaggtgtcttttaaaagaagatgtgaaattgtagtgtgcgtgttcttgctgcgtctgtgtgtgcagtgaaccgtggcacacaatgaaggtcaggacagttgtgtgggttagttcttccttcccatctttactcgggtcctgggggaaaaccctcagctgctgagccatctcacaggccctggacttctggaacttctgggaacaggacccaagtccccatgcacactagaaaagtgctccagcgctgacttccccacagagagctttttaaaaaagcatcctgcgaggcttatagggtgtcttccttgctggagcaggcttccagctgtgaggaggactggggaggggtagggcagaaagttccaggtctggaaataaatgtaaggatggtagtggccacgtttactaggtggctggctctggctgcagagtgccctgacagtccctttaaaaacacagtgactagccaggtgtggtggcgcacgcctttaatcccagcacttgggaggcagaggcaggcagatttctgagtttgaggccagcctggtctacaaagtgagttccaggacagccagggctatacagagaaaccctgtctcgaataaccaaaaaaaaaaaaaaaaaaaaaccaaaaaaacaaaccaaacacacacacacacacacacacacactcacactcacacacacacacacacacacacacacacacacacacacacacagtgactgagacagagagagtgaccacttgaggtcacaggctaagaaatggcctaggaggaatttgaacccatttttttctgtctctgtccgtctttctgtctttgtctctgtttcagtctctgcacccctcccccacaggctgacatctctcagtgggtcaggtacagagtctgttagcagatctcaggagctgtctgttctagatccaaggccgggcatcccttccagtggaaggctgaggctgcaaagtgggtcagggacaggcttagagacatggccctcacctttgatttccttttaaaatgaaggtgcacctattgtgaaacttattttaattcgctccatttgtggctttggatttttatgtacgggattgcgtagccatcactactgtttaattgatcacacccccagaagaccacataacctattggttctcagtctcccctccccccagcccctggtaattactactcagtctcctgatgtttggctgaccagaagctcgccacggcattatagcatggtggcttctctcttggtttttgcaggagttggatttcaggctccctctgcgtgcaaagcttggagataagctgtgtctaggggggacttctagtggggctgagattgctctaaaagctctacagggaccctaccccctcctgcccttggagcagatagccgttagtgagggtctcacacccaatgagggcctgtggccacctgtctaacccaagtgttaccacctggtgtgggtgtgtgacttcatcttgacagaccctggttcaggccaggggcgtccttctagaaggccgtggaggcttgcgatttcctttttgatcctcggccattcttcccgtcagcgtcgactgtgaggagctcctgtgggcattcgcagccatgaggtgtggtgctggctgagttatggcctttcgtagaatcagaagcctctcgctttcactaatggatgggctgaggtccaggctgctcgctcagacttcctccattcccatgtggccattggatacagggtgggtaccctggtcactttactccagctgcagctgtagaggtgggaagggagcatggccaggctctggagaccgtgccacgttcatgctgcagagtgcttgatcgtgagtctcagttcctccctgtggagtggcaggtgctccttcctggagatgactttcaaggaccttgagctctccgcggtctaaagggacgaatcccacagggattcaaggtcattagaggacagggtcaagtacagtgtccgatgcagtgggctttgaggcaaacactggcctcccatgggtaagtttggcctcaggttgtacttgcaggaggcccataggacagctgtgatgtggctttttgctcttgttttggtactgcaactattcttgggcttattgaccaggcccatttggggctgtgtgccagggcagaaacaaccggtgccttgtatgagtatatcactgcctcagcagggtccagcagggtcagtgctggcacaggcctctgggccggacatcacagtgcccgagctccaagctctgagtacccggatcctgcatttacatggaagcagtgggatttttgaggaggctcgaaactgctacggtttgctgattcctgcacttctggcctctgttggagtctgtgcaatgagtgtcctacgtccttgtgttcaggagcgtgttagggacccgatcagagaagagggggcaggcacctggctctctgagagcctgcgtgattctgtggcggggtatggagtagtgcagatctgcaggtgccaggaggtgagttctggcctgcagtgcagacctggtgaggcttagctgcccagcatctttgttgatggtttcttcttcttcttcttcttcttttttttggtctctctgatgcttctctgttcaattatttacccagggaatttgggcttcttcacttgtggttttggcaagggcttcacacaaatgttttgccctggtggtctcttaaccaacgtaagataaatggccaaatcaaacgcaggcctcgctggcagtggaggctcaatgtggggccgggtggaggcaggacagcatcctcaccggccctgttcattgctgtcactggctgtccgagcagggagtggggactcattcccaaaccagggtggagacgttgagacgtgtctgggccatgctaggtttcttgtggtaagagaggaaggagaagctcagggcatcctgggagcttccgaggcttgggtgctgcttgccagggtctggagagaagccccaggcaaccagctaggcaggaggctcatcagtgtccaggcccttggaggtagacctgaggtggcggaggcctgactaaagaacctataccggcattagtctcctgcctctttcaaagaggggtcgctcatattttgagaccaaatcctcaagcgaagcccactctagtttgttctgaaagatccttttaggggatcttaactgggagtggggccccgacgggccttctctgtgtgccaaccccttgcactagggccctcaaaggcagccctctcggcccccagaaacaatttggcagctgcaggtgtagcccctgctaatgtcctctgtgcaccccttctcgcttgcccctggaccccagttgtcatccccgtagggctggtgtcctcggggccgaaccctctcagaggctgtactgtagccctgtgacccggggccccctcttgtgcctcaagtcccttgtgcagtccagggcaccactgaccagtcttttctattgttttttctccagggccgtgcaggcctgcccagctgccatcgatggcccccatagctgcctcctcttcccaccctcccacctccgtgattacttcacctctgcgtgccctgggcgttctcccaccctgtttcccgctgccttgctgtggtgcacgccccatctcgggcgacgggactcagggtgagggtcagatggaggctccctttggatgccagtgtgagttgtcaggtaacagagccgctgcggtgggggaggtgggctcccgggatggcgggctgtgccctgggccgagccggggacccaaggtggggtcccagggggggatgtgccccccatcccccactcaaaaagcttttcggggtgggggatggcaacagaagtgccaaagatgtcaactgaactgtaacctgtgtcggttcccagggggtcaaggggccgtctcccccgtatatcccccaccctcgaattctgagagtctcactcccagaatgcactgcccgacctccaaatttcatctctttgggctgtttagccgaagtttaattggataacacttaacatctgaagttttcttctgccccttgcctctgccgccctgccacccaccccagacaagggtgggagaggattcctgggctgtctgtgtacagcgctggagccgttcaaagtgctgactttctctttgggacaatgtgttgcccattaacttagagggaaggaaaaaaagtctcaaagaggagccttttaaaaaagctgtggccacgggtagccgtgaaagattgtgggcgtctggggcagggggctgtggaggtcagtggctctgggtggaccccagagttgtcccagttacctctgccgttgttggaggcccgtgagaccccgttacacaaagggcatccccagccaggtggcgacacagcctgcgtagctcccctgctctgactccccacaaacatagacttctgtggcttagggtccccacaaggtcgaggggagaaagccctcccccccgcctcatggtggggcctggtttgcaacacactgtggcttaaggggccaggatgctgacacaggctcacgtggcaagcagctgtggcctggtttccgtggccagggccagagctgcggcgctggggtacattcagtttgtccctgccacacggccaggcacgttgcagcctttctcttgactcaagctgtgtgaaaggaaaactatttttattgggcaagttttgcttttcattgacgctgtctcagggacctttcttattgggagctttggttttgcacaagaagagcagcccctgatccaggatgaggcctccctggtcttcctgccagtagggtgtttctgcagtactggcccatactcctgctatggcaggtggctatgttgttggattgcccatccaagtctgggagctctggttccttccttgagtgcataaagcagagaccaaagtcacccaggaaggaactgaatcagcttgctaggaagctgacttcccttcctggtcagccccgaggtgactgaggcttcttgtagcttggaagatcctgttcaccaagcttggggtacctgctgggctgggccttgctctttggcttcctgttatatggggctgcaaccctgcagccctgtactcaaatagtgggggcctgcactatcaaaattaagcctaaatgcatatggtcaggttgtgcatgtagaagcatgacctctttgtcccacgtgctacaggggcaagcttaatcttcagctggccctctgtaggaactgccaaatcggagttgcgagtctttcctgtgcccatgagtggaaggggcaaaggctagggggctatggctgagcctctttggaggattgcgctaaggcttggggactagttcctttagcccagtggaggtcagataaggtctgcagggccttgtcagccaggggagtctggcatcagtctgccctcacacaggctacttgctttcttagagtagagcagctgtctgtcctgaactaggcatttggttgtgtgtcaaggctttaactcccacattacagacgagcgtcagagcctgaggtctcgaagctcaaaccggctcattccttagttcgctggcggtcctcaggcacagtttgtaagccacatgtggacacaggcagagtcaggtgtggtgggtccctcgcctacctcacagctcacagaatgggctttggggaccatgtcctgaggctgatgggagggaaggtaagaacacagaagtggctcccatacggtacctggttcaccttgaggtgcagaggctgccatagagttcagggctctggggcatccggtccacgtgtggcgattgccgtgcaggggaggcgagaagcagtgagggtctgagccctgggacctctcctggaccggctcctgagggacctgctgtctttcttcttcctgtactgttccttgtcattgttctgccttgttagcatcgcctgtgtgaggctctaccgctgtgctgtgttttcagataaattttgacacattcaagtatcctcttccagtgggttttgtccctttggttctgttcctggcactgggctgtttgctgaagtgtttttagtgcctgtttaattagtagctgcagaggaggcataaaatcgccaggaaccctcgaggaaggaggggctgtaaagacggaacactgcagtactcactgcgctttgtcccccttctgatcagggtgctttgaacccatctcttcaaattaactcaggaagcctgagtttcacacaggttaattgcatgcccacgaacacactctgggttatttatagaagggtgtgatttcacaggagagaaaactacccggacaagccaggccctgccaggacccttcccccatgcttcctgcagatggttacagctgcgagaaggggacaccggggcccatttcttatggattccacagagatcctatgtggtttttgagtcaggtgctccaggcaactaaaaggtcttcccctcagaggtatcaaggtagctgtgtaatcaannnnnnnnnnnnnnnnnnnnnnnnnnnnnnnnnnnnnnnnnnnnnnnnnnnnnnnnnnnnnnnnnnnnnnnnnnnnnnnnnnnnnnnnnnnnnnnnnnnnnnnnnnnnnnnnnnnnnnnnnnnnntatgcatgtatatgtatgtatatatacatatgcatatacatacacacatatacataatatgtatgcatgtatatatatgtatatacatatgcacacacacacacacacacacacacacacacacacacacacacatgaatgtaatattgcaaaataaggctccgggagtgtatctgtggattagaacaggttggggtgttgtgggtctgggcccggctagggccccaggctccattctgtcctcaatccttccctgctttgagacatcatgataaaaaaagtggccttcagaatatatcagactgtgttcatgagtgaattatgtagctaggtttgtggccttacccaggtcattcattcctcgtcctttcttttcctctgttctctcatctgtgaaatggacgtaaggatcgggcatgctctacggctgtctgaggtcatttagggcagacattcagaacgatgctctgaatctaatgaacccacagacgttatgattcatacgcaagcagtaggggtttcgcaatctgatggtgctctgtgtctggcactgggtgggagcttcccttaaaccacatccccggtttccatgcttaaaagcgtttagcctcttggctggctccgccgtgcaccagccttaggaggtggaacgggaactgagaaccttcattgcatatttagaagctgtaaatggtcatcagccacagtgattaatgcatgtgcttggcgaagttcaaggtctcacgcaagaacacacagcatccaggctcggggaagtggaagtgtttggatttaatagagggagtcacttgcagtcattagtatatgctggaatcacagggcaatcttgtaaagttaaattcaatttacttttctactgaaattgtgcttgctgtgttatttaactagtctggggtttcttggcttgggttaaagggacaataaagataaaagaatacctgtaagtaaataacagggtttaacgggagaatctctcgtcttctcctccttcagttatatcccagtgttcgccctgtgttgatttttatacccggagccctccaatgggatgcctcggatcagaccaccctagctgtggaggcttggtgcaattaatacagtctgtctggaaagtggtcttatttctggaagttttatgttaatgatatggtctgcacgctgcacatttcataccagaatgaagagcgagctggagtttctttctgggctgggtttgattagcagcggaggttccctgggcagccgctctcccagaggacagagattggcagtcctccccagtcctgccagggcactgcttggtgggtgtggtgtactgggtgctggggggagggcgtgtcgttcaagccttcctggggaaggaggggccgtgtgggcgcagtagggaggtgtgtgtgtaagcctccagagggaggtgacagatggacttttgagttcctctgcactgtaatgcttttttttttggggggggggtgctttctgcgtttaccacgtccccgtgtcaatggggctggctcagtggaattattgaaaatttagagagccctactgggattgtagttcagttggcagagtgtttgcctagcatgcatgaagctctgggttcagaccctagccccacactgtgtaaagcaggtgtgtggtgccagccagttactcacacttgggaaacgagagcaggggggattagaagttcaaggtcaacctctactgcacaacaggttcataggtcaggctgggttatgagagaccctgacttaaagacaattagttagtcattagtcacttgtccctttgcaatgccaatatgacaaagactttggtagtgtggccccatgactgacatttaccacgtgttccacaattcctggaggttgtctcctaagactgactctggtgtttgcgttatctcaggatggctccgccgtagctgctttctttctgggcctgcccaagacctgcacagtgtcctccctgtcttgatacacgtcagcagagagctgccggccccctggaggttgacaaggatttgacagactgcagaaaaagaccactgttcactgtccatatagcaaatctcagccttcagcaccaacaggggccagagcggttgcagtgggctccggggagggactgcagctggccagcggggtgggactcaccggggtgactaccttcagatgaaagaggttccagcgacacagacgttactacagataccatttcggcctctgccggcctttcagaaggcagagctaaatcaaagaattctgttcaaatctgtacaagatgctgtttttctgccctgacaggagaggcatttggaagagcagtttctttttctttctttctttcattctttcttcctttttttttttttttttaatagctgtcttaaaaaggagtttggctgtttagcacagctggtgctcattacgttatggactggcaatgaaatagcatgtgtaattaatttttaatgcagcgctgggtgcagcactttcaagcagttagtggatgtgaaggcccagcactggctgtggacatcagagacctcggagccaagcagccacgggctcctttcaaggggatttgacattggcaggagaggctgctcaccaccctccgtgcggaggggagctcgctcagaagtgggtttgttttgggtgacccaagggtcaagccaacccttaccgagccaggattagggggtcctgattggacatctcatctgacccttttggtatccagacggataaactgaaccaggctggaggaagacaccggaaggcacaagtggctggcagaactgacttggctctatgtctcacagtctctgcccactagactctctttttgagacagcagcttttgtatcccaagctgaccttgaactcatttttttgtaacagtatcttctgatccttgtaacagaaggtccttgatctgctgatccttctgttaacttcttaacttggaatgttgggatttcaggtctataccgctatgccctgttctatgtagtgagtgctaaggactgaaccctgggtttcatgcaacctaggacaagtggagaaactgaggcacagagaggaggagtgagctctacccctggtgccacatcactagtctgcatcctggtctaccttgagttcacattgagagctagtgagggacatcctgttatccaaaggagatgcttaaaagccaacttcttcgttgccaccagattcgatgtcctgggcaccgggcttggcagcaggtaacatttttgacagcaatgaaccccaagtaattggtcttgggactctcatgaggtttttggcctctgctgtgggccacacccctctgcatgttcctgttctgagactgcatgtgggcttggcttgcctgcatggttgctgtccagtctaccctgggaactgcagcatggagtcttgtttggattaggcactatgattcacaggtaccagatcggggacctcctgggtcctgttctctgtgccattgagtctgaatgcatggccctgggctgcccactcctcctctctgtgccccagtttctccacttgtcaaacggggcacaagtaacccctttgggaagactcggagacacttctgtcagggtgtgccagggcatgagggagcaggccatatgaccttggctactgtgatgacctagcattcatggaagggggtggggtagggggtgggaaagagccgttactcttactgcttttggaactagctgctgctaatccacaaaaaaaacctactatgtgccagctctgcccctcgccttacatcctaaccttatctttcctccaagaacgggtaacccctcgtcccactggggtacccactacttagctaagagttacaggccacccaaccgaggtcacacagcacaaaccctgcagaattaaagaaaggtgcaggctgggctctgctgggtctccaagctgtgctgcctctgtctatcccctccgtcctcccattgggctgtggtggctgcttatacctgcctatcagatgcacaacatgctggtggaacagcagctgcacttagacatggtccctaaaagggtcctctgggttctttatttcactgaccaccatatttgtgtctgaccctggcctagacatgggacccttgggtgtgtgagaacaggtgtgtgcctgagactcctgacgtggaaggcagggaaggctgcccttccgttctgctgggccatggcagctttgatgtgggtcttcatgcatgactggacttaagggggacacgaggaagaagagcatggaagagacagcgaccctgatgaggaagggacgcacaagacagttttggcaaattgccctaagacagttttttgggtttctggtgtctgggtgggaatccggcctgccccaggctttgtgctgcctgcctctcttgtgtttgtggtagggcctgcaccttgaggagtgcagaacactggtgggcatcctggggtctgacatggtaaggtgggtcatgcagggcgggtccaaagtcaagccctctagggagaatggcttgctttcttcatctgggtggagcctgtccctcagcactgagggagaactgagtttgctgttgtggagtggcctgggtgacaccttgaacattgctgtggcacaaggacatgaggatgggatttcctttcctttcctttcctttcctttcctttcctttcctttcctttcctttcctttcctttcctttcctttcctttcctttcctttcctttcctttccttcttttttctttgtctttttccaagacagggtttctctgtgtagccctggctgtcctggaactcactctgtagaccagattggccttgaactcagaaatccacctgcctctgcctcccaagtgctgggattaaaggcgtgtgccaccactgcctagcgatgaggggatttctaaaagtcataattataggtaagaattactgttttgaccacccgcccacccttacttctagagattgaacccagagcttgctcaggtgacccgaatggcccatgttttctaaatctgtggctggggcagagggagggaggtgccaactggagatgttttactgtgacgccgagtagctgaaaccatgaaatctggtttatctaagtcatgactggccaattgaatccgaacaggagagggaagaagccgtagggtccccccactgtgaggtgttccagtctgctttagatcttcgaggaaccgtggcctggctagttctgtggtcctctctctggacattatttaataagtgttaggaaagggcacattacctccgtgtgtggtcacaggtgacagaggcagatttccctttctcatctgggtccttatacctagcggcgtgtccccagacacggtcaggctgttgtctgcagtcccaatgtgcatgggtccatggttctggccttctgagttttgaattcagacagtcggtagggacactgacatctcagatgtagcttgattggtacagaacagggtgtctgatgatagcttccctgagtctgggtgccactgcccttcttgtcacgtctccctggcaggtgcgggtagggagaggtgcatgtgacttgtgacgctcctacggggccctggataataagaccatctgtattttatcgttcttgtagaaggggtcagaggactccagtcttctccaaggagattaatgcaaaactgaacttactgtctgcagaaaccggcagatgggatcggttcataaaactggacattaattattgcctttcttaataaggtgatgacccgctgatggggtgaagcttgccccaccgggtaggtgtatgtatgtatgtgtcggtgactcagggtgagtttagtctggacttagttaatttagacttggtctctttgctctgaattttcttgggtttttatcaactagctcatttattctgtatttaatcataaaagagaccatcgattgatggcctgtggtatgccatgggcttttttttttttaattgtgttttgagacagggtctcatgtagcccaggttagccttgaacttgctgcttccatctccttagtgctgggtgtgtgttcccatacccagtttttgtggcgccgggaatcaaactcagggtcttctgcatgctagacaaacaatattcccagcccctagagaaaggaatgtcacaatagttcaaagataggatctaaaatacctttttttaaaaattgtgggtaaaatatatgtaagatttacaattttgatagatggtcactactttgctgctgccgttgccaccaccgccaccaccaccaccaccgctagagccttcatcttgctaggctatcactaagctacaaccgtagccttgatttgaaccatttttaagtatgtgctactatgtagccttcacctccttacatctctggaactgtctcctctcaaacaacctggtctctcattgaacaatagctccacctctcccctcccagctcctggaacccaccattccaccagctgtctctttgattgacacagggactttgtatggaatgcagtgtactgcatccgtgtgtgtgtgtgtgtgtgtgtgtgtgtgtgtgtgtatttggctcattcatggtgtagcaggtgtgaaattgtctttccatattaggactgcgtgctagtcccttgtgcgggtggcttgtgtttgctctttttgctcttccattcatccatcagtgggcacctgggcagcttctgtcgttgcctgttgtcaaccctacagatgtgtgtacatccactcaagggccggattttagttcttttgggtgtgtacccagatctcgggatcgtaagtgactctgtgcttattgtttattattgttgttgttattatttattattattaactaannnnnnnnnnnnnnnnnnnnnnnnnnnnnnnnnnnnnnnnnnnnnnnnnnnnnnnnnnnnnnnnnnnnnnnnnnnnnnnnnnnnnnnnnnnnnnnnnnnnnnnnnnnnnnnnnnnnnnnnnnnnnnnnnnnnnnnnnnnnnnnnnnnnnnnnnnnnnnnnnnnnnnnnnnnnnnnnnnnnnnnnnnnnnnnnnnnnnnnnnnnnnnnnnnnnnnnnnnnnnnnnnnnnnnnnnnnnnnnnnnnnnnnnnnnnnnnnnnnnnnnnnnnnnnnnnnnnnnnnnnnnnnnnnnnnnnnnnnnnnnnnnnnnnnnnnnnnnnnnnnnnnnnnnnnnnnnnnnnnnnnnnnnnnnnnnnnnnnnnnnnnnnnnnnnnnnnnnnnnnnnnnnnnnnnnnnnnnnnnnnnnnnnnnnnnnnnnnnnnnnnnnnnnnnnnnnnnnnnnnnnnnnnnnnnnnnnnnnnnnnnnnnnnnnnnnnnnnnnnnnnnnnnnnnnnnnnnnnnnnnnnnnnnnnnnnnnnnnnnnnnnnnnnnnnnnnnnnnnnnnnnnnnnnnnnnnnnnnnnnnnnnnnnnnnnnnnnnnnnnnnnnnnnnnnnnnnnnnnnnnnnnnnnnnnnnnnnnnnnnnnnnnnnnnnnnnnnnnnnnnnnnnnnnnnnnnnnnnnnnnnnnnnnnnnnnnnnnnnnnnnnnnnnnnnnnnnnnnnnnnnnnnnnnnnnnnnnnnnnnnnnnnnnnnnnnnnnnnnnnnnnnnnnnnnnnnnnnnnnnnnnnnnnnnnnnnnnnnnnnnnnnnnnnnnnnnnnnnnnnnnnnnnnnnnnnnnnnnnnnnnnnnnnnnnnnnnnnnnnnnnnnnnnnnnnnnnnnnnnnnnnnnnnnnnnnnnnnnnnnnnnnnnnnnnnnnnnnnnnnnnnnnnnnnnnnnnnnnnnnnnnnnnnnnnnnnnnnnnnnnnnnnnnnnnnnnnnnnnnnnnnnnnnnnnnnnnnnnnnnnnnnnnnnnnnnnnnnnnnnnnnnnnnnnnnnnnnnnnnnnnnnnnnnnnnnnnnnnnnnnnnnnnnnnnnnnnnnnnnnnnnnnnnnnnnnnnnnnnnnnnnnnnnnnnnnnnnnnnnnnnnnnnnnnnnnnnnnnnnnnnnnnnnnnnnnnnnnnnnnnnnnnnnnnnnnnnnnnnnnnnnnnnnnnnnnnnnnnnnnnnnnnnnnnnnnnnnnnnnnnnnnnnnnnnnnnnnnnnnnnnnnnnnnnnnnnnnnnnnnnnnnnnnnnnnnnnnnnnnnnnnnnnnnnnnnnnnnnnnnnnnnnnnnnnnnnnnnnnnnnnnnnnnnnnnnnnnnnnnnnnnnnnnnnnnnnnnnnnnnnnnnnnnnnnnnnnnnnnnnnnnnnnnnnnnnnnnnnnnnnnnnnnnnnnnnnnnnnnnnnnnnnnnnnnnnnnnnnnnnnnnnnnnnnnnnnnnnnnnnnnnnnnnnnnnnnnnnnnnnnnnnnnnnnnnnnnnnnnnnnnnnnnnnnnnnnnnnnnnnnnnnnnnnnnnnnnnnnnnnnnnnnnaatagaagctaaaaatagctggacacacatttgcctataatctatttttttttaagaaaacataattatttttgtaaaccagctctgagaaaacaggagtatttttagcctgtgtcttctaggatactggacgtcatcctaggaagagcatgtcagagcccaccagagtgtggtaatgtcagcatgtcgggcagtgacccctggggaaacagggtttgaggagccccgtcctcagccctcctttgctgagagaatggttctcgagagtcagactgtggcttctatggctgatggcggctggggacatcctggtttcacctggacaggtagctgtggcactggccaattggtagctggctaagctcgggtttgggcaagggagagcttgtggtgagactagcctggcctgctacctcagcagacctgcaggagagatgagggcttgagggaaaagtgttccaagccttcttatggggagccaaacattgcctcatgtaatctccccgtttttcccactgcctctgccagggtcaatgggcctggcacaatgtctgtaataaagagctctgtgtgtgtgtgtgtgtgtgtgtgtgtgtgtgtgtgtgtgtgtgtgtttgaatctctgtgtgcctgttaacgcgtgtttatgttggtgtttgttgtttgtaggtatactttgagagtatgctcttaggagatagcacctactgaggcccctcctacctttctgtctggtactggatgtctttggtacaggcgtgtaccgacatggccgggcttagcattgcagcctgctgtgaccttggtgtgagtgtgtctctgaagatagattttcttccccgtgcttgctggggaactcactgtaccgaggccaagacatcatggtcagttcagagtgtggccacccatgagcatgcatagggagaccaaaggctttgaagtggatgttgggttctcaccctggctgtgacgagctgtgattgcgggtgggtgagccaggctgtttcctcatctgaaacgtaggaacagtgccaaccaagtgttccagtcaggcacgacaataggacacatgcttaccacgggttttacgctggcactcctagcctgtctctgagaggaaggcagtgccatcattcccactttacagatggggagactgaggcacagagactccagaaatgttcccgttgagtctttcccagttgtgatacactccctgcctcaagcagcagccggctttgtgtcactgttacattttattgttgttataactgtaattatcatacccaagatcgttacggcagccgtttcctgggtggagatattcctctcgctgccccagccaaccttgacttctagccatgttcttcctttctgggcatctcgtctttcatccacggactccttctgctgttgttcccgacgcatgttcatttgaggtctccgtctttctgctctaattgagataatgaacacagtcctccacccccagaatgggagcagaaagtcaagtgcaaagtgacggttgccatttgctgacctcccctttctttctctcttagtacgcgtctctttacgaagggattggctggatgcaaacagctcataacctatggatttatggagacagcgagagctggctttataagctcggatacctgcagtcagcgtcctgtctctttaagccgaggctccgacttgccgtggtattttacagtgcctggtttcatttatgctggagccagacttactatgtgagcgtcgtccgcatgctggaattagtcttaagcttgcttctgtggcgttgccaaattccatgtttgtgttttatttagaattcttttcacggccagccgattctgtgccggcacacacaggcactgttgcgccccatggagaaaataagcaagcttgcgttttctttggcagaggccgcggccacaatagactgtggtctctgaaacattttttaaaagctattttaacccataacagatgcataaagtcggctcaggcatgccagttttcttagttttaattaaaaaataattacagtctaatgggatgttagtgacacatttggatgaatggtcggtgacattatctgcaacttataaattagtgcctctcccttggctggggcagggctggggaagatttggggaggtacatttgcatatctgttcttaattgcagggtgggagatgggagagtagcatcccctgggttggagacttaggggcagggacagagaccttggtcagtggctctgaaacccagcatgtgtgacacaggcatctggtaatattcttcaagctccatctgacagaactcacctgcaaagtcctcacatatggnnnnnnnnnnnnnnnnnnnnnnnnnnnnnnnnnnnnnnnnnnnnnnnnnnnnnnnnnnnnnnnnnnnnnnnnnnnnnnnnnnnnnnnnnnnnnnnnnnnnnnnnnnnnnnnnnnnnnnnnnnnnnnnnnnnnnnnnnnnnnnnnnnnnnnnnnnnnnnnnnnnnnnnnnnnnnnnnnnnnnnnnnnnnnnnnnnnnnnnnnnnnnnnnnnnnnnnnnnnnnnnnnnnnnnnnnnnnnnnnnnnnnnnnnnnnnnnnngctcagcctctctgtgggtgctgttcctgcttatcctgccctcctggatggaacagttcccggcagctacagtgtgtagcttgtctctctccagtagttgtggggagctgtgtcatcctaccctgggagatcaggaaggttccctttatctgtgcctttgtgcctggccctgtaggctgcttctttggcgacaattccaggggcccctgtgcttcattaccaggcttctttcataggtaccacccgatgtgttctaaggggggggggggcaggacttgccccaggccactgggctgagccaggacctgcctgcctgacctaactcctcactttcccattgaaaactgcacggagccacaccctgtggctcccaacaaggtcgagaagactggctcggagtctttatttttactttccgggtggtggaggggggcgtggtgttagtgtcgctggtggctcttcctgttgtccggggtctaaaatgagtgtttcttagacaatgttttcccgagcccaaattcctcccgagtaaaattaagttcttctattaaaagcgtgagtcacaccagcccagatgagagtggttttgacgttcctcgaatttttttggaagggaaacatcacattcatgctaatccttgcaattaaacctcatcgctgggtaatccgccagacgcttggtaacctagccctctgccgtccgtccgcgtacggtgcctttctctcctttgctgttgcctgcccagagtttcttcctctgttctgggctcatcagattccccgagcatggtcttgggtatctaattgccacagatgattaatgtgtggttgataaggctccatgtctggctgttcatatgaattctaaggagatgggagttcatttctgtctctgaactgggtgtttgctcccccactaggggttttctgctcagatcggggtggaccccaggcatccctgacgatcaagagaagacagaagggtgtcactgggggtgggtttggacccgctttggggaaatgtagccaggctggtaaggaattggataatactgtagccatgatatcaactttcctgagctgtgtgtttctcttactgtgacctctcaggtttatgctcagctactgctaaaggtctcactgactctgggtcctttccttgcgagttcctgttactgccaatgagatctattccgtcagcctgaggaccaacctgggtgttcctggttcctatgtgtctaggtcgatgtttggctgcagtggactgtccctggttgcttctcaagcccaggtcaaagcagaaacccagtgtgacagacagcccaggtcagatgcagtggggaggctgtttctacggtgttggcttcctgttctagtcctggaacaaaggttggcatagttgaggaatcctggcccctggaaacatggcagctgtcaaatgaaccggagttgtgtctccacagctttgggtgcagtctttgagttctggagactagggggacgtcttgattttatgtctcttttctcagagagctgctgcagctcacctgctgctcctgtgaagccttgggtaggaggttctggtgtctgacacctaggggagacaagtcaggggtggagagggtgagtgtagaagccggtgactgcgatggatgggaaaggctttgggtttggaatgggatagagtgtggtttctgagtttggaataacacttctcattgggatgtggggagcggggtgggcagggattcgagttcatttacttgtattaaaggctgaggcttcctcttttcacgagtaagaagcaaaagcccgagaaagtgatgagaaacagcccggaaaggcagttcgtttactcattaaatcttctataaaataaataaggatttagcatgaagggcccagctgcagggtgtcctggagggaggaggggacaagtccgacatgaacctcactatgggaatggaccagtaggcccggactgtgtgcttctgctccagaggccaggtcttagtcctggaagtaagaacaaatgggtatgagtgtccaggaggggtgtgtgcacacatacacgtgtgaaagcttgcgggtacattagcagtttacatgtgaacatataacatgtgaacatgagtagacatgcttttatatgtacggacatgaataagcaggcatgtacacgtgagcacacgtatggaaacgtgttggtacatgggtgcgcaagtgcggttatgtgcatgtacatgcaggtatagatgtatacatgtgttcctgttcatttgttaatgtgtgtacatgtaggtgtaggtgcatgtatgtgctcatatgcacatgtgtttgtacacacacacacacgcacacacacacacacatacacacacacacacacacggtgtgcacatgtgcagtcaaatgcaagtgaggtctatgtgtttgcatgtcttcatgtacaatatgtacgtgcacgtgtgtgtgtgtgtgtgtgtgtgtgtgtgtgtgtgtgtgagagagagagagagagagagagagagagagagagagagagagagagagggaggaatgtctccacttacctctgaggacctgtttgaggtcagctgctgtggcacttaaagaggggatccagagtcagaaatgcagagagtcagaaagaagtgaggtgtaggaacagcacccgaatgcacaaccctgctgtggctcagtggagttcagctgtgggctcgggtgggtgtccacccctgatgctctcacgcccgaggcagagtggagtcgggagaacaagatgagccttggtccgacctggctctgcccctttatagatgggcgactcttcactttcatgttccagcctcagtttccttttctgcttcaagaagatggccatgttaccatcagcctacatacagtgctcagggtagggctgacatatgacaggttccagcaaggcaggttatgactgactttgttgtttggcaaatgtatgcggggtgaaggtgtctcctgaaggtgtctcatccatgacaacctgacaggcctgcagcaaccctgaagccgaggcaggatgggatagccgggaccctgggcttggctatgtctggaaacctttttgttaatggcgttcttgtgccccagtggtaaggccgaccctccctctctccatctggccagagcgaggccctcgctaagctgcttcttagtattgtcgggttctctccaaaccagagcagggagggtccccgtcatggttgacttggggaggtaggcttctccatcctcagctcaagctgctcggcctcatttggaagcctcttagacccggacaaagctgggcgacgtgcaggaaggtggatggatggactacgagacctggaaatggtttctccctggagaagacgtggacagtaagcatgcctgccgacaagaagtctagaaaagctgcatgcttgccccagcagttgggtgtctagtcaacccgccctccgctgttggtggtttcaggcattcttttggaacagcgcaacagccttcctgtttttacagtcctggctttgtctctttctttctcttgaaaggagcagggtgctgttatcatggggtgtatttgggcatggtaagcatagaacatttgtgtctgagtggctccttgtaccaagacaggcattactaggtgatcacacggtccctgacctggataactcaagatgagaagcaagcagtcagtagtaattgatcatcctggccaggagttgaagcctgtcttctgtactggcagggctttcctgaatggagggagaggctcattagataatggcttccctggtgagagcctgtgtgtgctggagtcagactgccccccctccccccagccttgcgtagatcatagaaaggaaggttttgacctgaggtcccaccttggatcaggcagcatggtggatcagccagtaccaccttagggatctcatatttcacagtgctagggatgtcagggtcccctccaggtggctcttggctgcttcggaagtaggcgttgtctcatcgaggctgtcttgccccagcctgggaacaggcggccaggcatcttgctgagatggtggtctggcatagtgcctgttcttcccttgggggtcccacgtgttcccgggtgctctgttggaatgacatccagggtagggcctatcctcatactggcctaaccctggctgtgccttgttctgtcacatggcctctgtggtctctgtgggtttccaccccagggccatggcctgttctccagtcacccaagaattctctgctgatgtcagcagaggctgtgtgtcaacaaggagtcttagggtccactaggaatgtgagttgagagagggagagagagggagggagggagggagagagatgggggagagaactgggaacctccttcttcctctggtacgtccatcatttcggttcaccccttctcttcaggtcctgctgaggtgaaggctacttctgtcttagagatggataaaaatagaggcttagaaggccacggccctcccgagtgggccagcgctgtaatgcctggcctattctctctggccagctttgccatacagtgtctcctctgacagggcatatcagagtgtcttcactctgccctgtgtcccagcagtacctacaatacccttgtcctttgggggtttcagtccctgtgtctgtcctggctgcagtctatcttctgtgtatgtatgtatgtggctgtctgtgagttcatcttctgagggccagggaccttgatctctgtgtctctgacatcaacattgttcctgggtcaccaaaggactgagttcttcctgctggttggtggataacaaagaagctatttgattggtgctttggggctgggctttcagcctctttggacaaagatggaggattggtggggctcctcactgaggtatataggttccaggggccagctcagtaccccacaagtctaggcaggatgctggtgatggcttgtgtggataagtacctgttctttgctgggtgtagcgtcccattacccctacctgctcttaaagctgtggagtcgctgtggaggccaggactctggccctccattctccaagccactcttctggtagactttacagctggccctttggaatcccatcagctgttattggatggctgagctctgctctttggcgctccttgttaagccacatgctgtccagcaggcccaggtccttgctcctgcttcaccttgggaaagcaccgctgagcagccccagcacaccccaggacctctctgatcaccttatatggaagagtgctgggtgctctcatgcttgcacatgcttctgcatcatctcctgtccctgtctctcgggataagccttggtggtaaaggccagtgaggagccgagtgatggagagccatctttagaaccttcttgcccagaagtaagaaagactctgggagcaatgagaatgaagagttcaaagctcccctaattctgtgtaggattctaagtctagaagaatcggccaggcaaagattgtgtggaaggaaagaatgaagggcccttgtctgggtgaactcacatagtgagtgtgctgagatttagcctggtatggggaggcctaagagccggggcagccattctgttctgttctgtgaattacttctgtagccgagctgtggtggcgctcacctttaatcccagcacttgggaggcagaggcaggcggatttctgagtttgaggccagcctggtctacagagtgagttccaggacagccagggctacacagagaaaccctgtcttgaaaaacaaacaaacaaacaaacaaacaaacaaacaaacacaaaagatttacttctgtaataagtggaatagaagtttcatgctttatgaagcatcaaatgataggaaagaatgggttagaagacatgacagggggagggggatttgttgtcaggcttcataacgagagtgagaggggaaggggctaggagtaggaccagaatgtattatatgtgtgtatgaaattattgaaatatagattagttattttaagaaggggaaagaggtaggagatggctcggtgtttaagagcactagttgctctttcagaggacccgggttagattcctagcactcacatggcaactcacaatcgtctataacccctgttccaggggatccagtgccctcttctggcctccactggcccagagcacatgccgtgctcagacatacacccaggcaaaacacccgtacctataaaatcataatagatcttaacatggaaatcagaggttgatagggtatggcttagtcaataaagtgtttgtagcactggagcacagacttgagttctatccccaggacctgtgtaagtatcaggcccagcgagcagatcgctcttcccaatgctgcagagctggagacctgatcattgggatgggttgaccagatagcctcctgaacccgtgctccagctccatcgagaggcatcacacacacaccacacacacacacacacacctcttccttgacagcagttgaaatacaccctgaagtagaggctgtggctctcttgacccacaccttgagcctcctgcttctttgagggggtgtgggaatgtctgggggctgggggttagtgagacaaccgatcctgggtgtcactagctgaaccccattggctcaggtgtcccttccctaggtctcaccctttctggtgaatgccagcaggccctcactgtcttccctcaggatcctctgtatagggctgccctggcatttgtcactggtgtctgggatctgagctgctctgggagtagaggggaaagccggagggcctgaggaccagtgtttcctttgcttcaggggagtccgactgtagggcaggaagctgctggccgtcttccttcctaattcccatatttccaccttcctgccctcactcgatggctggaagaagtgcagccatgtccagcatccctgagagttggcgccattcctcctagggatggggagccttgagcttggggagcctacccaggaaagccaggcaggcaggcaggaaggccttcaccccgctgtttcttctccctaggtgctgctatggccagcccggctgtcagctgcacttgactgaagtacagccattgggtggaacgcagactttaaatgtacagaccagtccaatcttttaccattgcaaaatgacattctgtcacgcaaagctttcccaggagttgcaaactgagttatatgaaaaaccacactcacaaaaatctcatgagtttgtttgtttgtttgttttgtcttgttcgttgttggtttttgtgtgtgtgtgttttggagacagggtttctctatgtagccctggctacactatgtagctagggactcactatgtagatcaggctggccttgaactcagagatccatctgtctctgcctcccaagtgctgggattaaaggcatgcatcgccatgccctgcagaagtcttagaatactttaagttcagaatgctttgggttgggtggcattcataactaactacccttggtcctgtgctgtccaagggccttgggttgcatatacctgctagaagtgggatccctaaagagaaggcgactcagtcactgggggtcccaggaagttggttgttaggggctgagaacctccggacaccctgctttgaagaactagcccaggataaagcacagtcacagctagcttcgtggctccctgggccaccagcaaggtccttggaggctttctggattacctggggtctgctctgtccctgccccaagagaagaagctgggaagcaatcagaatggtacctgcctgcagcggtcatgtgaccaggcccgtgggcaggtgatctgcggcctagcacacctgtcccaacgtgctctcaacgagggcagaggctacagcacactgaccacacgcagtgggcttcatctgggcttcggacctggaaactgtgcttgtcttccgtggccgtaggtggctaggttttcggggtcctcacggctttgacattttgaatgtgagatgctggcattcttccgtagtcatcctcggggacccgttgaacctcagttctgtttaaagtgttcctttaggtctccgcctgtgtgtggcagaaaaagagaaagcttctagactcttgtcaagttctgggcctccctggcagctaagggatttattcaaccgtctgtgggctcggcagctggtggtgggtcactgtgttatgctagcagagagtcccaggagcactgtgtgggactgtgcattctatgtggatgcgccgagttccgaggtcccccttttttgagtcttccctctggttagcccacctcactcacagctattgggttttgcagacaggatgagctcagatgtggccagccagagggggaggtgatggtcacaggatttccagactcgctgccatctcccttcatttcagaaccccttaccctttccatctgtagaggtgaggaacgggaggcactaaggctttctggatgctgctgacatccaggggtttgacgtgctcaagtaggattagttacacggcaggtagagcctgcttccttccttgccccatagctctctatcttttcctatctcaatgtcttacaggtgccttgtttggggggtgttccctttcctaatgtcccccacccaattcattacccgatccaaagatgcagtcagcaggcatttgtgcagtagccaacatcaaacaagcaccggatgagtggatgaactgctgtgtcagggtcttctcctgcatcccccagtgtccagggcagagccggtgcctgggaaactcttgctcaatgaatgcgccagcaaagaacccatcttccccgccttggtcctcgggattccagggtgcacgccctcttccattaacctcattgacccaaacgttgagaaaggaaacccatggacgctgcagtctcttctcatcctagacccacattatcagctgccggaaaagcatctgtgagatgcagggaggtctcatgctgggagcttctctctctgtcgaggctgagcctgtgccctctaaggccgcagacacaagaacagagcctgtggagaccggggagtggttcgtgagataaggcatggctgggcccagcctcataccgtccctggcctagtaggggcttgaagaggctgtcatttattctgtcagagtggcgcaggcattggccagtgagggtagaggtgatcaggagtgggccctgcctgggaacagtgcctcaggagctgccctttccctagagcccttgagtgggaggtgctggcttgctggtgccttagaggctctggcctgccttcttccctaagcagagcccaggcccaacactgagacgcaggcttgtcatgcctagctctagacttatggttgtcaggctcagttgccctgtgcccataagtgttgatagacttgggttccagtagcttagaggcaacctctcccttctcctcaggccccttgagctacatgggcctggaagagactggcccttgcccttctgcctagtgaacccctagccttcccctggtgccctcttaggctctcttctaggatggagctacttattggtgtcttcctggtgcaggcctaggcttgtcctcttctctatcctgaggtatgtgttgggtagatctctaaattaccacccatagctttctctgatggaaactccggcaggtggtcagtggagacgggagactactgcccctcctttctagatgagtttaccacagagggaaaaataacaatagtagtctccccccaagttccctccttgatgaaaggggatcgatcacaaggaggtatggtttgtctctgtcagccagaccatggttgctgtcccctaggagagacacatctctgggtgtgcctgagagtgttttcagagagggttcagttaggaggtcagacctatctagaatttggcagcactgttctgtgggctaggacttgggagtgaatgaaacaggggaaaggtgctaagagccacactcatctctgcttcctgactgtgatagcatcatgtttttctaccatggcggactgaatgcctttgaccgagagccaaaataaactcctgtagctttacttcagtgagtaaaggatctcatgggaggccaagcaaggagctctggggtgtgtgtgtgtgtgtgtgtgtgtgtgtgtgtgtgtgtgtgtgtgagagagagagagagagagagagaagagagagagagaatatgtgaggccaccgcttctccctggcacccgctggggtcctttgtccatgtgtaggtcctggtgggcagggggcactgtgctgtgccgagcagcagcctggatgtcatcaggaggtctgtggagagtcagagcctcacagtgacggggacagagacctctcccactccacaaagcaccgtggaggagatgccagagcacagagttcaagggaggggagtcctgagacccatcatcaacagcgatgctcttacttctgattctcatacttccggtgccttggacagaacgcagaggggagggtccagccagccaccggcaccatctaaaggcaaacacattgatctagagcggtggttctcaacctgtgggtcgtgacctcacccccccagtcttatatcagatatttacattatgattcataattaccaaaattatagttatgaagtaacaacaaaataatattatggtnnnnnnnnnnnnnnnnnnnnnnnnnnnnnnnnnnnnnnnnnnnnnnnnnnnnnnnnnnnnnnnnnnnnnnnnnnnnnnnnnnnnnnnnnnnnnnnnnnnnnnnnnnnnnnnnnnnnnnnnnnnnnnnnnnnnnnnnnnnnnnnnnnnnnnnnnnnnnnnnnnnnnnnnnnnnnnnnnnnnnnnnnnnnnnnnnnnnnnnnnnnnnnnnnnnnnnnnnnnnnnnnnnnnnnnnnnnnnnnnnnnnnnnnnnnnnnnnnnnnnnnnnnnnnnnnnnnnnnnnnnnnnnnnnnnnnnnnnnnnnnnnnnnnnnnnnnnnnnnnnnnnnnnnnnnnnnnnnnnnnnnnnnnnnnnnnnnnnnnnnnnnnnnnnnnnnnnnnnnnnnnnnnnnnnnnnnnnnnnnnnnnnnnnnnnnnnnnnnnnnnnnnnnnnnnnnnnnnnnnnnnnnnnnnnnnnnnnnnnnnnnnnnnnnnnnnnnnnnnnnnnnnnnnnnnnnnnnnnnnnnnnnnnnnnnnnnnnnnnnnnnnnnnnnnnnnnnnnnnnnnnnnnnnnnnnnnnnnnnnnnnnnnnnnnnnnnnnnnnnnnnnnnnnnnnnnnnnnnnnnnnnnnnnnnnnnnnnnnnnnnnnnnnnnnnnnnnnnnnnnnnnnnnnnnnnnnnnnnnnnnnnnnnnnnnnnnnnnnnnnnnnnnnnnnnnnnnnnnnnnnnnnnnnnnnnnnnnnnnnnnnnnnnnnnnnnnnnnnnnnnnnnnnnnnnnnnnnnnnnnnnnnnnnnnnnnnnnnnnnnnnnnnnnnnnnnnnnnnnnnnnnnnnnnnnnnnnnnnnnnnnnnnnnnnnnnnnnnnnnnnnnnnnnnnnnnnnnnnnnnnnnnnnnnnnnnnnnnnnnnnnnnnnnnnnnnnnnnnnnnnnnnnnnnnnnnnnnnnnnnnnnnnnnnnnnnnnnnnnnnnnnnnnnnnnnnnnnnnnnnnnnnnnnnnnnnnnnnnnnnnnnnnnnnnnnnnnnnnnnnnnnnnnnnnnnnnnnnnnnnnnnnnnnnnnnnnnnnnnnnnnnnnnnnnnnnnnnnnnnnnnnnnnnnnnnnnnnnnnnnnnnnnnnnnnnnnnnnnnnnnnnnnnnnnnnnnnnnnnnnnnnnnnnnnnnnnnnnnnnnnnnnnnnnnnnnnnnnnnnnnnnnnnnnnnnnnnnnnnnnnnnnnnnnnnnnnnnnnnnnnnnnnnnnnnnnnnnnnnnnnnnnnnnnnnnnnnnnnnnnnnnnnnnnnnnnnnnnnnnnnnnnnnnnnnnnnnnnnnnnnnnnnnnnnnnnnnnnnnnnnnnnnnnnnnnnnnnnnnnnnnnnnnnnnnnnnnnnnnnnnnnnnnnnnnnnnnnnnnnnnnnnnnnnnnnnnnnnnnnnnnnnnnnnnnnnnnnnnnnnnnnnnnnnnnnnnnnnnnnnnnnnnnnnnnnnnnnnnnnnnnnnnnnnnnnnnnnnnnnnnnnnnnnnnnnnnnnnnnnnnnnnnnnnnnnnnnnnnnnnnnnnnnnnnnnnnnnnnnnnnnnnnnnnnnnnnnnnnnnnnnnnnnnnnnnnnnnnnnnnnnnnnnnnnnnnnnnnnnnnnnnnnnnnnnnnnnnnnnnnnnnnnnnnnnnnnnnnnnnnnnnnnnnnnnnnnnnnnnnnnnnnnnnnnnnnnnnnnnnnnnnnnnnnnnnnnnnnnnnnnnnnnnnnnnnnnnnnnnnnnnnnnnnnnnnnnnnnnnnnnnnnnnnnnnnnnnnnnnnnnnnnnnnnnnnnnnnnnnnnnnnnnnnnnnnnnnnnnnnnnnnnnnnnnnnnnnnnnnnnnnnnnnnnnnnnnnnnnnnnnnnnnnnnnnnnnnnnnnnnnnnnnnnnnnnnnnnnnnnnnnnnnnnnnnnnnnnnnnnnnnnnnnnnnnnnnnnnnnnnnnnnnnnnnnnnnnnnnnnnnnnnnnnnnnnnnnnnnnnnnnnnnnnnnnnnnnnnnnnnnnnnnnnnnnnnnnnnnnnnnnnnnnnnnnnnnnnnnnnnnnnnnnnnnnnnnnnnnnnnnnnnnnnnnnnnnnnnnnnnnnnnnnnnnnnnnnnnnnnnnnnnnnnnnnnnnnnnnnnnnnnnnnnnnnnnnnnnnnnnnnnnnnnnnnnnnnnnnnnnnnnnnnnnnnnnnnnnnnnnnnnnnnnnnnnnnnnnnnnnnnnnnnnnnnnnnnnnnnnnnnnnnnnnnnnnnnnnnnnnnnnnnnnnnnnnnnnnnnnnnnnnnnnnnnnnnnnnnnnnnnnnnnnnnnnnnnnnnnnnnnnnnnnnnnnnnnnnnnnnnnnnnnnnnnnnnnnnnnnnnnnnnnnnnnnnnnnnnnnnnnnnnnnnnnnnnnnnnnnnnnnnnnnnnnnnnnnnnnnnnnnnnnnnnnnnnnnnnnnnnnnnnnnnnnnnnnnnnnnnnnnnnnnnnnnnnnnnnnnnnnnnnnnnnnnnnnnnnnnnnnnnnnnnnnnnnnnnnnnnnnnnnnnnnnnnnnnnnnnnnnnnnnnnnnnnnnnnnnnnnnnnnnnnnnnnnnnnnnnnnnnnnnnnnnnnnnnnnnnnnnnnnnnnnnnnnnnnnnnnnnnnnnnnnnnnnnnnnnnnnnnnnnnnnnnnnnnnnnnnnnnnnnnnnnnnnnnnnnnnnnnnnnnnnnnnnnnnnnnnnnnnnnnnnnnnnnnnnnnnnnnnnnnnnnnnnnnnnnnnnnnnnnnnnnnnnnnnnnnnnnnnnnnnnnnnnnnnnnnnnnnnnnnnnnnnnnnnnnnnnnnnnnnnnnnnnnnnnnnnnnnnnnnnnnnnnnnnnnnnnnnnnnnnnnnnnnnnnnnnnnnnnnnnnnnnnnnnnnnnnnnnnnnnnnnnnnnnnnnnnnnnnnnnnnnnnnnnnnnnnnnnnnnnnnnnnnnnnnnnnnnnnnnnnnnnnnnnnnnnnnnnnnnnnnnnnnnnnnnnnnnnnnnnnnnnnnnnnnnnnnnnnnnnnnnnnnnnnnnnnnnnnnnnnnnnnnnnnnnnnnnnnnnnnnnnnnnnnnnnnnnnnnnnnnnnnnnnnnnnnnnnnnnnnnnnnnnnnnnnnnnnnnnnnnnnnnnnnnnnnnnnnnnnnnnnnnnnnnnnnnnnnnnnnnnnnnnnnnnnnnnnnnnnnnnnnnnnnnnnnnnnnnnnnnnnnnnnnnnnnnnnnnnnnnnnnnnnnnnnnnnnnnnnnnnnnnnnnnnnnnnnnnnnnnnnnnnnnnnnnnnnnnnnnnnnnnnnnnnnnnnnnnnnnnnnnnnnnnnnnnnnnnnnnnnnnnnnnnnnnnnnnnnnnnnnnnnnnnnnnnnnnnnnnnnnnnnnnnnnnnnnnnnnnnnnnnnnnnnnnnnnnnnnnnnnnnnnnnnnnnnnnnnnnnnnnnnnnnnnnnnnnnnnnnnnnnnnnnnnnnacattacacaccaattaaaaatggcgataccacaggcatttccagggatagaggaagtgccaagagggacaaggatgaattcagagtctgcgacatgacggtgtagctggtataggtctgagaaaaaaaatggcggcttcctgttctaacagcactcacactagtatttgtttacattttctctcggatccttgtctatagcttttgcacgtcaagacacactcgtcctttgagaaacagaaaactcagtgacccccccccccccatccccaaagttccagtgacttttgctgatgggaaaagaaagtttcaggctgggcaccctgtgccagcagcctgtgccaaggctgtggtttcattagctcttgcctccctcttcccagaaaaccattccgcccttagatgtaatgggatgtgctcaagatatcagtgtcttggctgtgattgatcgattcccaacacagttccacacccctgtgtcctgggaggcaccttctgcttactggtgttatttcgtgccctgctgggggctccagatggggaggcaggaccctcagacccaacctatcccagggtgggggacgtgactgtctaggtgaggctgggtctcttcatgctgctggtaaattgatgacttcctattctcctccaccaaactgttccccagcccctggctgtggtcactgacacccagatagatgtggtaacaatcctattccgtgtgtggggctgggtgggggtgagagcggctgggcctctctgtgttaccagaagaagctcactagatatgcaggtgatcctccccccccctcccccccgcgaggtcttcatttccttctggaatgcccctcgacacctcctgacacacagaggggctagagtcttgtcacataaagaaaaaaaattactttatttccaattttccatctcacacactcactcattttctttattaggtgcactatggatattagagagagagaaaatgacatttctgccgtgaattcaaagcgcgggcccctgctttgcatagtagcttatactgattggcaggaggggcccctgggtctggagccttcagggtgctgcttggtccatgcctgggtaccctgatgctgtgtgttctctgcccaggaacccatttcttcccacgtaaccgctcctcgctcggttctgtcgnnnnnnnnnnnnnnnnnnnnnnnnnnnnnnnnnnnnnnnnnnnnnnnnnnnnnnnnnnnnnnnnnnnnnnnnnnnnnnnnnnnnnnnnnnnnnnnnnnnnnnnnnnnnnnnnnnnnnnnnnnnnnnnnnnnnnnnnnnnnnnnnnnnatggtaggatctgttctctaaggggtggggactgaacacctccaaaacacccggcaagtgaggtaccaaagtaggtgtctcgtctcctccatccagagaagcctcgtgatcttttagagttgcaggtgtgcactctggccatcttcagggctcagtttcacttgtaagaacctcgggacctcgtcatatcgtcccatttcaccagacacccacatacactctgacaaggcggacatttccctagggtgcttcagacttccagagaccttgagggtggacactctcctgttgccttagcttccggggccgggcatggtcaggaaaggaggctagggggttagctgacaatgtcctgacactgcaagctctctgggagccagctttgggtgatgatggaggacaggttgctgccggttgcagagtgggtcagcccacctggtgcgtaccgacggggagtagggtgggtgggaggggggggtcagggtgtttaaatgctgtccccatctcctttgtgagatctggaaaagatatttgcagccagtaggcacagtgcaaagaaggcgaccatcctcctttgcctgtgtagaggaacttgggaacctttctttcccctggttgcctggttacaagatcatctgtcacgtgttcctggagaagggtgcttggctggggagatgtggcaggcggtgtgtgtgtgggggggggggtggcgggggaggcgccgggagatagtgtctgctgtgggaatcaatgggcaccttcgatcatatcacaatcccattcctattacacaggacagccccactgcccagctgccctctcaaagcctcggaccgctggggcttttttgatgcatgaatgaagactgggaagtgggccaggacttggctcctgggcttcttcatcatttattagctcctagttttaattgtttctcgacttctttccagatatttatctaggagaaattgtcagaccttgccgcgtggtgcggacacgcagggcagggcgggtactgactgcagaatctgaacagcctctctgatgagtccggctggaattgcttgggtacctactgtgtgctatgtgcagtctcctgcccatgaaagactagtcttcctgggggtgcagacaaaggaatagtatttgggttgtgttttgagtgtgcctgtggcagagctcctgggacggaggtgaactctgatccctgaaaggtcgccttatgtcctggggctttgcactctcagactggaatctaaagtggttgaaccttacacgaggttgctaaaggcgcttggaactgctcagcaaccctcaggtgggggcagagcactgagggtgttgagctcacagaagtgtcctggggtggagtaggaccaggtgaggatgctgggagtgccttcttcctctgagctctagcagcagtgggagagagaagtataatggagaataccacagaggaagccagggggactttgggggaggagccattgaagggggaggagccattgaagaccttttcccttctttctatgaactaagctgtgtgtgggtcagagtggacgctgttggtgcttacggttgttttgctgagcaggactcaggtgtaagtcggggagcccaggctggctcactcagcacacgtcggaggacatctgcccttgctttggcagacagagaactcttttcaatggaggagcagggttctagggcctgagacttagatcggccaccttggaagtcattttgcattaggtagtgtcaatttctccttctgcgctctccagggagagattctgagccacggccagctagagtgggaagggcgggctccgttccactagaaaccctgtcaatggtgttcgttaagtaagcctcactcttgtgctttggctccactgcaccccttgggagccatggtagatggaattgccatgtgagcatggtgaggtgcctcatcttcatgactggctgttagcttcctccatgggctattgccatggaaggtagcatgccccttggttaaaaggctggctcgtgagtacatcctccatgcctggacctggctgcctccatcccttcctctaggactagctcccagaaaccctttgagtctctctatctccccctccccaacctccaaggctcctttatagataaggaatttcacaaccaggggcagactaagatgttaggtgggttgcccaggtcactgagctgtggtatcaaattctttacaggtcacatgggctggggttctaagaggctcagagagcagaaatagtgtgatgatgtactgaccacaccccaggccccttcctggtgccactgtctcgggtctgtcctaccataccagcacagggaaactagagagtcaagcttacaactagccttaggctgagcctatgtggaggggagacagatctatgctagcagtgggctctagagacctgtgtgcgccccactgtctcctccacaacaagttggacgcttgtttcgactgtcctgggcttgaccgcagtcattcactttacatcagtggaagggaagtctttttacagtgtgtaagtgcactggggggaggtcgcccctttgcttcttttccaccgtgtttgagaggaccacagagctccagatgcattatgggtcaggcctatgctcagctcccccaaaaacccccgtcttttgagtacggtcagattcccaggttgctttggggccttgtggatgggcagagaccatcctgcactctggggcctgaagttgtatcgacccacatcaggaccaacgaactggatgcatctgggggggcatgaaaaaagatttgtttttgtttttgtttttgttttcgagacagggtttctctgtgtagccctggctgtcctggaactcactttgtagaccaggctggcctcaaactcagaaatctgcccgcctctgcctccagagtgctgggattaaaggcgtgtgccaccatgctcggcatgaagaaaaatttggagtgatgggggagagggggagaatggaagggagatgacttgcccactggcttctcggatagtcagctcaaatccagtctggcttgggagacagagctcttctggaatttgcactcaaattatttaaaagaatatcatcaccaggagtgaacttgggatgctagcaattaagcacttctcctgtggcctggcacttctgctagcagtgggctctaagacctgtgtgcgccccattgtcctctccacactggacgcttgttctgattgtcctgggcttggccacagtcttccactttacatctgtggacgggaagtatttttacagcgtgtaagtgcattgggggaggtcgcccctctgctgccggaacctgagttccaggcgcattgtgccaagcggtggttattatttcccccagaataatgtccttttttttccctctcttgcttttaacgtcctgcccttggcatctgttccaggcattgtggacgaacggagactgtgttctgacaatgggttaaagcaagctcttattgaaaagcattctctacttaattacgtttccttcttctggaagctattttaattttttttttataatcacatgttaattgtgtattagcggggcctttctgattagttgaaaacataatgaaacctttgtaaacaacacagagagagaaagaaaagggaatgtgtgaaacagagcgggtagtgacgagccagctccaagaggcccaaagagcgacatttcttgatgcggcagagggatggaaattgtacctgcaagtcttgctttgaatttgcaagtctcccagttgcagggccaagtgggacaaacaggccagtggtggagagagaggttcacagagtttgcccaccaggagttgtgagatgggacccggtagtcctgccccactggtctgcatctactcacacattcgttaattcaccgctgaaccattctcgcggccaatcacaattttactctggttccctccctccttccctcattcattcattcattcattcattcattcactccatgatagtcttagagcaggagctgtgtctacagaacattgaccggatgcaacccctcacatgccttttctgccgtcttccttacatcttcagtacaggtattagttgcgttgtggctgaggagactagagctcactcattcagattcagctaaggaaaggaagcaagtgagccaggtctgttccccgccccccacaagtgattggggatcctggcatctgttgggatggcatgatgctctaaggagtcagtgagtgagtgtgtgtgtgtgtgtgagtgtgtgagtgtgtgtgtgtgtgtgtgtgtgtgtgtgtgtgtcaggacggagatgagagttagcctgtggctgtcatcagaaagtttgctggtattgttttgttttccacttttaatgggagccttgtttctggacagaaggcctgaatctaagtccctgttgtggcaagccggccccagagccctgctctgttccctatttaaagggctgggctcaccaggttttttttttttgcagttcccaggctgttattagggaagcgtggctggggcgcttcaaatgaaagtgctactgtgtgtgcgagccaggttcaccgtgcgcactccaaggaaatgctgccaagacagtcttatgaacaggcgccaagcaaaacacgcgtgctccgtccagaggagccagctcacttctgcaaatagaggaaaaattgactttctgatttggagtgtttttacaactaagaagaatcacttcagtgattgttctaaaaatagcccggcagcagcacactctggaaggccccgggatggtgagcgtcctttaattgtgccttttatgtaatctctctagatcattttttttttctttttaaatcacttatgcttgcgtggtcatcccccccacctccccgtatgtaactcggagatgcgagagtggtctacacagcagaaaccgtatttttatcttttcggcttcaggaagtgtatttgggttttcgtctcctgcggcagccgctgcatggctcgcagctgagctgccaaatctagggcagctccaccgccctgccctggtggtggcccagctctgaagggaggcgtccctcacacatgggtgtgcttggtggcagtgtcactgacgccgggtcaggatatcggcctgcttttgctgttcaagctgcaggcacctttccaaagcacggaggcttcaaggttgccatcagccctgagcttggccacccaaggggagatgatgcagcctcctgtgcatgcgctgtcttcccctgctgcccctcggaacctctccttcccttctctctcctcacctctgccttcatttttctacgtcactctgttccgttacatgtgggagccagtatggaagctgaagagtccagtgcaggactcctcgtccaccgggctgcatacctggggctgggtcactctacgtgtgtgggaggaatgacctgtccaccatggcctccctggcctttgcctaagagatgcctgaagcccccttcacttccttgtgggcatgacaatcaaaatgtctccagattaatgctggggggggggtctgtgaaattgaacactggtggtctagcctgtcttccaagagtagacaagactgatttctactgccaaattttacatccagagcatattttaacatataatatgattgaccctggcttaagggtgaccttgatgtgtcccacacaggcatcagggttctcaggtggcaagctggctgtcacaggcatcacctatgaacttgtgtggtcaggaggccaggagtttataatcaagttgggtttctctgccatcttcccattctaagcccctaagacaatgctgggagaattggttctctttcttttttagccagggcaagacaaagtctctctaaaacaggccaccctagaacttactatgtagcccaagctaccctttaattcacaatagccctcctgcctcccaggtgttgggatgacagttagaagccagttttcttgatgagtagactttgtaggactgtagattgtcctctggaacttgcttggttccctctttccccacttccttttcctcctctccctccttccttggatacaccccttctccccccacccccctttgcctgggagcagacttggcctgctcccaggcaaagcctgttctaatgacccatacagtaaccacctctaagaatcatgttctgtctttaaattgattcatcactgtgaggttggatagggccaggtgtcaggtgtcaccgcctccctctgggggctcatcttcaagaaatctagaattgggtggtcaatgggttttgtgcccagcttctttggaataccatgtgactactcaagagtgatttcctagtcctagccaaaactctggcttccactggctgctctcagccagctggtcagccagccagcctgagggtatgtagacatgtggaatccaccggaccccacatgccccagggtctgggctttatggtttccggttctctgatacagcatccaggtccagggaccttctggcctcagacctatggttccaggctgtgattccacagccccgccccttccaacctcctttgtcaccgggccagccctcctggctgcccgtgtacatttactcctattctagggtgatggacagggtgctgggtggaccagtgggcacagctggtgtgggttacaggccatgactggacatagatgctaagctacccagcaaccgtactggggctgttagtggttggaggaggatatgttgtaagaatggctgtgatcactgtgtgagattaatttctttccttgttagtgcccgagtttgtgtgtgtgtgttcttgtgtccgtgtccgtgtgtgtgtgtctgnnnnnnnnnnnnnnnnnnnnttttttttttttgtttttttttttttgtttttttgtttttgttttttttttttttttatgtgagcgtgcacttaacttctgtcttcccatggtggcgatgttggcccgcatccgagccctctgattttctaacggctcatctgggccatcggaaactccagtgctgtcgggctgtgcctggtgaggatgaccacagcccggctgccggcagagggctggaggaagcttggcacggaggcagagggaaagctgtgcagaagagccgcaggtttttcatatggaaatgtgaaataatggggtgattaaatagagctgtatattaaagtacatctgacatcagaattaccataatgtgctgtagccttaggctgactactttatttgccatctgcgtcggcccaaaatcccccggggaagcgctaaaatattctgaataaactcagctccagttcttattgagagtaaaataccatttgtggcacgtcgtattgattcgtcttaattgtggtgcaaaaaaagagcagtcaccggcttgatgacttttgtgcttggtgacaagctggctagagttactccttacactgtagttggttaacctgggtcgactggcagccaggaccaggtgggcacctggactgctgcagagagtcacaacgccacccctgtccccgccccaggctgtgggcacagctggggctctctgccaacccctcctgggggaagggaatatggcggaagtgggggggagaggaaattcatccagtcctctgaacctccttctcacacccagcctgtcatctcctgagccacacagcagcaccggcaccagctctgagaggagccgtgcgcctcagcttccatctgggggttagacacactgcataccgaaggaagcagaactggagaggaggggggcgggcacctacccaggcaaagccaagtctagctggtccctgctcagtggctgtggaatgtggcgtttacctcagcccttgggagaggggggagagcgggtggcagtgcttacaaaatgcattgaagataaaaagagtcattgcagggggcttgtgggggagcactctgtgatccacaccgtgcccccccattcacaaggtccagtttttaccctataattgcctatcattatacacaatttaaatattcaaacattctccacaaaccctgggctagcatgtttttattacaaattcagaacaagggaataacctttaacttcagagacaaatgagacaaatttacaagtgcgtatctgctgttttctcgcgctttatcaatccccgtggaccggagcactttcgctataacaccactcagaacaatatacatatattacgacttgtttgtagtgtgtcggtaatgagtcccctctgcattagctaacctatataactcggcgttgaggctctccataacgccaattatctcctcacagctaaacgtacactccattaaaacgagatttactgccctggccatacttcttggggtagaaagtggagatttttgtgggtttaaggaaaggaaggaaggatggagagtttcctgggaaggaagccatgacacataagaacatcctgtgtctcctagaaggatagaaagccgcatggggtgaggttcacttgccgtgtgagagaacggggtgcagacgtggaggctcccacacacctacagggctgtccctgccttttccattcgcttcctgagttcactacattttggccactaaatgatgagtatgatttatctgtttctggcacattctcgaaacccacgccgggtcggggtggcacggaacgacacagccactctggtgagtttgtccatcagcacctcagatctcccaggaggggcctggggagacggcacagttggtagagctcttgctcacaagcctgaggacctgccgttgatttctagaacctatgttaaaaaacaaaaaacaaacaaacaaacaaaaaacaaaaccaaaaaatgccaggcacggtggcatgaacctgtgatctcagggctgaggagatcgagacaggtggtccctggagtgctctggtgagccacttgggcctgttcggtaaaatctaggccagtgagaggccctgtctccaaaggaaacaacctgaatccaagatggctggctcccgaggaaccatcatggctcgtcctctggcctctgcactgacagactttgagtacctcactacacacttgcacctgcttatacaagaacgtgtgtgcatacccccacacgcatgaagaaaagcccactggagacatgtggttcagagaggcctgcgacacgcaggttgcccggggtctgactatgtagaaaccttaggtgatcttccatgaatgtgaaggtttcgtgggaggccagggttctgagggtgaccaactgtagttgtagacactccgggggaaccgtcgtcatttgtaagatcacctgtgccctttgccctgtcctcccccactctctgtgacaaacccctctgttctcaccctcctcggatcagcccctcggtcagcaatttctctttgtttcggggctgggtggctgtttctcccagcctgaccttgcacacctggtctgaccacaaaattgaacggttgaaagaaggctgtgttgggacccatggggcgcatggcgtctgcacccgaacttctctttcactttgcttagaccaccctggccctgaagctgtgggttcacagttctcagctgtcaaatgagaggcttgttgccataaccaacctgcttgagaggcggatagagggctacctcctacgttacaggccttcacggattggtgtttgtttttattgtgcttttgacatttgtgaaattgttgttgttggtggtggtggtggcagatcatccagttggaaactccatggattttctttacctgcatcctttgctgtagtgagatttttgctagacaaatcagttcttgtcttgaatgggcttgaaattctttttctttttctttttctttctttatttttgtagaaattggaatttgttttatattcagctaagttattttctttaacacacattttctgtccttccccagacaggctccaaacctgttttcaagttccgcctccagggtttcccctctgcattgagggtcccatctccatgcgttggactcctttcttctaccagcctgtccttgctttccttcctaaagtcagcattagggtgttctcagagggccttccctagggctcccaagttgctaggactcacctttcttatggactcgatacttgaaccctcgctggaaatcacgtaatcaccgatgtcttgctgactgtggttccgtgaaagcagcccttctcctgctccatggccctggctcacagtgcttcatcagtctctgcagtgtagagagcgaggcaggtggccacacaaggataaagggtactgggaagttgctgcgagcatttgcgtgaaggaacagttttccttcccagacatggtgtgaccttggagacagaactcctgggaacagaccgattcttaatgttcagcatttagtttagttcgggaggcagagtgggtgggcagggccagccctccacccaaggctctggaatgcaaagctggattctgtggggtggctgtggcatcttctgcatgcctctcccacagcaggcagagctgtgtcttccatcatggctacctgccctgcatctaggtgcgttcagaaagtctcccttgcaggcggcctgcctctgccttgctggactctgtctctctcctcacctcagcacctctggttctttcatgtttggcttgactacagcctctagacccacccctaatctttctgcttcttcccttggtatttctgaagtccacttagtcaatttgggtcagcctgacagtattctgggtctaatgcttaactggacaccatgtgcataccccagactgtgagctcctggaggtgagggaagcaagagtcactgacatttccagtaagatgtgtctgtttaggggactatggcaattggtttgccactgtggtgaaggcggtaagcacagagctttttctcccagggcgagttaacacttggtggatgaaaccacgtggtcacctatgtggcacaggtcccacacaaggaaagagaataatattttctcaaaattatatctgcttcaccatttcctacacttgaacctgactacttggcttctctgattgtccggctctctggtgttgacaggggcaggtgggaagattatgcattgcctggtccgagccccttttagggccagtgagagtcaacacttcttttgtgacaggggtcgccagctgtgagtaacgacgcgaagtgagccagatcgggcccggtctgaatgtgaatcccaggttttccagtcagcaggctgtggggattgtgggccctactcacctgtgatgagatttgatttcctttttcctaagaagtctgaaaagactcctcctcgcgtgtggttcagatataaaaagaccaaggtcagagaatggtgatccagcctggtgtccatcattaaaagggcctgacagcatgtggaagctcaggcagggaggaaacagggattccatgaaacctggtggtggcactttctgtgacacataccatggggaaacacacagaacatgttggcagggtgtatgttttctgtgtctcccgagtcacctgctgtgcactcaggaagtagaagataggggaccccatcttgggcaatttaccacaacaaacaacccaggaaggcctcccccttcctaatgagaagtccatgctttcttgctgtccagcaacttgactgcagtgtcaagtctgaagggaacagaagtgtctgcttgcaaaagctaaggaaacgccccagactagattgaactgcaggaccacaggacagagacgttaaagcatacccatgattctcactgccatggggcctgcagtcctagtacttgacaagataagcttggaatccagccacaagatggagtctgaacagtcagtctggcctgcaatacctctaatctcttctgtagatggtcagggtgagcagttatgggtgtgtaggacagaagtcggtgtaatgcagactctaatccttaatgcggctaagcccttggatctttagtcaggactctaaattttccctcagcaccgttcatacaactgtctctctctctctctctctctctctctctctctctctctctctctctctctctctctgtgtgtgtgtgagagagagagagagagagagagagagagagagagagagagagagagagtatgcatgtgtgtgtgttcgtgtgcatgtgcgtgcgctaaatcattaagaggtgacctgtagcccctggactgtgagctgccggaggagcatgaagcatgtagggtacccaggcagtgagataaaggcccacggtgacaggaagaacacatttgttcagtcctttctgtcctggttcccactgtttgagctcccgtgtgtgggtcccacggatggcagaggggcccaggctccctgtatttgctcagggttctctgaagcacagagcagagaggattccgcagtttgcagggagagtcaatggatagatctgtctgtaagactgaggccagctgagcctgtcactaagtgtcaatagccctacatagcctccccacagccaccgtcagagccaccactctatcactcccttctgcgggtcggcacggagtcagttaccacagttctagcctaaagcaactcatcttgactttttgttcccgctgagatggaaggtcaaatacaaagacacacgtgcctcacccctatcctaggcccttgaacttcaggcacttctctcctgagcaacttttctccttacagtgcaccacatagacaccgccacttgccagccggggaacgtcaggcagatctcctcatctcttccagtcctcagtttcttcatctgtaaaatggaactgatggcagttgcagtttctgagctgtgggcgcgatgcacgaagcctgtagtgtccttagctcattgctgcccatggtagagatttcttaccgtctgtcgctacctctgctctactttctgcctcccagagctgaggtccgagtgatgacttgggtaccagcaggatgcttatggatttgtagatggctataagcgctcaaggagccccggttgacattttctctgtgacattgtgaaagatgtttttagtttttgtttttgtttttattttattttattttattttttgagtgctggaagatatggggattggcaagtactctatcactgggacgctgaaatacacctccagccggagggggggcagtttaatttaatttaatttttagattcatttgtattttattctgtgtgtatgggtgttttgcctgcttgtgtgtttgtgtggcatgtgcataccacgcctacagaacccagaagaaagcatcagatctgctagatctgaacttacagacagatagctgtgacctgctgcgcggatgctgggaacggaaccagcgtcctatgaaagagcaatcaatgctcttcaccgctgagccacctctccagccccatggggagggggacagtttttaagtgaacatgagatgtacttgtcacctgaataatggttgtactggttgtcatcatgaaactgtggagagagcactcttagcagttatagggggtgtgcgtctcaggggttggggtggggtttaagtgatgaagcaagacaagaccagccttctgtttgggttcggggtgaggaggatcactgtgagacacccaggggtaccaattactgtcccaggttcagccacctcactgccatgtggtcccttcactaggtctcccaagcagcatatgtcaccaatatgctttttggctctgtaaaatgactcccgtattccaccctagagtgaatgcctgccacagggtagacataatgggagactgtccagggacaatcagtggccttccatgagagggcactgtcaacatggaaccattgacaatgtgacacacgcagggaggcctgggaaggtggtgatggcacggtgattctctaaactgctgtccccgtggtctagcatgatcatgtgatcatgatcctcacttggcttccctcagaggtgttagtgaacaagggtgacatgagctgaggtagcgataatgctgagtgagccgtgcagtgctttgtggtttactgaggagcccgggcggcccagaccagttcccctgcttgatcagaggtgtcctttaacatttgctgcttttgagtcaagctacattactcttcttccaggccttaaaccaaaaggcatccctgaaacactcagagccacatacaaggatgggtaacaaacccgcagtatataacacctactgccacatttatacagcagtgagcggtggatagagggaggacctcacagtccccaggccaagtaggaagcaaggctcagagaggtgacatctcatgtttggctacaccctttagagatcaagttccaagtgttcagtgatgctcctatggggggtggggagtcttgtcagaagagatctggggtaggagtctgcgtttgaaactcctcagacaacatactgaaagaacaaagaaggctcagtgtgtgttctaaagatctatgaaagtaaggagggaggaagcaagaaaagacaccgcagggccctctctgggttctgagctgccccgtgtgatttagtgagacaaacgcaactgacatttctaggtctgtaggccaggattggtgcttctgaagtcatttggacccagcagttagcatcattagctgcagccgctacagcagtgtaaggctagtggaccctgtcccagccattagcaaagcagccaccgcccactgcagggcacgcactgggccacctgcgtgcaggtatctctctgagttcgatgcagcaaggacgggtttgggatgagctaagcaagccctgagtctgacgcaacctgctgtctaaggctcttcttgtctaaaagcaagccatctgtgcctgtgctgtgtctataaaatacttattcagttcctgaatagaaagacgttccaagtggctcgccagagactctctgacgttgttcagttcttaaaagtgagcagccccatactcagggctatttgtaggcgagagagagccatgaggtcgtcacatgtaaacgaacattttattttaaaaaagaagggggtggctggaaagagagttgtcaagggagggccttcaagggctgggggatttattttttctttctgtcaggtactgggggaggctgctgcctatagtgagtgaagcctagagttctgtagagggacacttaggggctctgatgaagatagctctcaccccagggtgacaagtggccctgaaatctgaccggacaagtagtcagccccctttctcctcacagtttaactatggaggtgacatctgggttctagagcatgcaggtcagaatatgtgtgcccttctctctgcttttctaaaacatggaatcggttatggctacctagttacatagtctgctttggacttcggtatttgttggatagaacagtctagaaaaacatgtggccaccagataaagagacaggaagtacttcagagcaactcaaggaaatggagatgctgagaagagatgggccccaacttaagaacaccccagatctcagcaaccatcctctgtaaatccattacttagaatgactggggcccagagaagggtacagaaacacctttaatttgatatgtgacctcctaggacatggtacttcatttgtgttgatagctccaatgtgtctgaaagggacttgtatttaccttcttaagaaacacatacacacacacacacacacacacacacacgatgtgaggaagagtctgaacctgtcttctggccagcattagctaataagctgagtatggagcagtcagggctttggagaggcacggctcctgttagcctaacagtctagtcacaagcatcgtggctacccagaccttgtgaaaccaggctagaacagaagattctcgctagaggtcatgttgcccaacacagacccacccagacaggctgggacagctggcgagagcagtagcctctgttctcccagactgtttctgtttgttgtcgttttgtttagttctgctggagggtctggtgtggaggactgtaccaagggcctcatatgctaggcaagccctgtatcctgagctctctggtggcagtttaaaggatggagtaaggcctggagagacggctttctgtaaaggaatgctgtgcaggttcgagaacccgagttccaaccctaggatgcacataagaaacaaggagtggtgtcatttactcctattctcaggatgggggatgtgggagaggacctccaggacacactggccagccggtccagcctagtctgtgggctccaggtcccagtgagagaccctgtctcaaaaaagggaagatggcgcctgatggagaacaacactggaagttgtcctcaagcttcctcatgcatgtatatatacacacattcatgcacacatgaacactcatgtacagcagaatgaggctggacttccaggattctcttatttccgtccgtccttctctgctttgctcccctccacaccaaacccacagatgcagtatcaggggatgtcgggaaaatccctggcttgcaaaagcatgtcttggattccagggctatttgccctgggcctgctggtgcaatggtccaagtgaatcccaatgctgccccaggttgacacggtacttctctgtgagtcctggccggctggcaaacctaacttagagaggtgcatgctgggaacagaggcttcagaacatacacacactgtgggggtagggggtgcagcgtcctatgaagtgtcgttagctgacaggaagtgaagatgttgtctacccaggattgtagaagccccaggttaggctggtggtacagcaaaggtggtggcttcttaggtccatttccacagccctgtctactgtagggtatggtaacagcgtttgtattggctttgccggggagtttgaagctactgacttagtgtcagtgttgatatctgtttgatagaggcaagtttaaacggaggagacgggcttttcaagactcaggctgccatactatgtgccaggtctgaaataagaggcctgttcctaccgctttggagatgttacatcccatgatggtacacaggcctgtccatgcctgtcttgctcctttaaactattaggaaggttctggcaagtggaatgtggcctcatgtcaaggtcaacagctccagacaagagattcggcttccatattgtggccggcccgattgaccgacaaatctgtagtattttggctcagggccaccagtgtccactgcgatttcttactgatgtcacccgagccagttgtaacaaatcaacacgtgtggctgctcatcctgactgctgtcacatttggtggctgcctttctgtccctgtgttttctggcagaagacaccaaaccgctcttttagactagagtcccatcccccaccccctgccctgcttggggggctggggcgctgatttccacacagtgggtgtgtgaggccattggtaagggtgggtagcgggctcttgccctgtgctaatcttgcttcacctacctgggtttctatcggacagtattttctgcacaacactggcccatgaaacgggaatctcctgtggctaaaaatctcaaacgtaggcaaggtatcatggtgctgtgtgaatgtctgtctctagcattcctggggactgggcttgagtcctcagacacgctaagcaagcattccacgacggagcatcatagccatttttgttaatttttttttctttttttttttaagtttgcaaagcaacagagtcagtagttgccaaggggaggatgcagtggagtgattttcatcccagaggaggcctttcatgacgagcatacttttctgtctgcaccactggagggtggggtattagcattgactatgtggaggctctccaccccccttttgccccagcagtgaattatgagggtggggtctccatgtcaccagtgactgagtcaataaacctgggcgacatggtgaggaggtgacgcttataccctgtctcttacacaatgtagccattgtcactgtctcccatccagcccccaaaatgatgaaaataagaacacctacaggggacgccggacctagtaaatgcaagctagtcccaggtgatccagaacctgctcatagatcccgtgtttccttgccgtcgggggaggctcgtctactgcacaagtgactccaaggattccccaggcctgctcctcatagatcttgttttctctgggtggatgcggtgaagccggtccacccctgtggccatcccagctccccccgcaactgctcacgctcagcctttcttctttatgtttccccaggtaaagatgagccttccagctacatttgcacaacatgcaagcagcccttcaacagcgcctggttcctgctgcagcacgcacagaacacgcatggcttccgaatctacctggagcctgggccggccagcacctcgctcacgcccaggctcaccatcccgccaccgctcgggccggagaccgtggcgcagtccccactcatgaatttcctgggggacagcaatcctttcaacctgctgcgcatgacgggccccatcctgcgggaccaccctggcttcggtgagggccgcttgccaggtacgccaccgctcttcagcccaccgccacgccatcacttggacccacaccgcctcagtgcagaggagatggggctcgtggcccagcaccccagtgccttcgaccgagtcatgcgcctgaaccccatggccatagactctcctgccatggacttctcccggcggctgcgagaactggccggcaacagctccacgccgccgcccgtgtccccaggccgtggcaaccctatgcaccggctgctgaaccctttccagcccagtcccaagtccccgttcctcagcacgccaccgctgccacccatgcctgcgggcacaccgccaccgcagccgcctgccaagagcaagtcctgtgagttctgcggcaagaccttcaagttccagagcaatctcatcgtgcaccggcgcagccacacgggcgagaagccctacaagtgccagctgtgcgaccatgcgtgctcgcaggcgagcaagctcaagcgccacatgaagacgcacatgcacaaggcgggctctctggctggccgctcagacgacgggctctcagctgccagctcccctgagccgggcaccagcgagctgccaggtgacctgaaagcggccgatggcgacttccgccaccatgagagcgacccatctctgggccccgagcctgaggacgacgaggacgaggaggaggaagaagaggagctgctgctggagaacgagagccggcctgagtcgagcttcagcatggactcggagctgggccgtggccgcgagaacggaggtggcgtgccaccgggggtggcgggcgcaggggctgcagctgcggctctggcggatgagaaggctctggccctgggcaaggtgatggaggacgcagggctgggcgcactgccgcagtatggggagaagcggggcgccttcctgaagcgtgcaggcgacacgggtgatgccggagctgttggctgtggggacgcgggtgcaccgggtgcagtgaacgggcgcggcggggccttcgcgccaggcgcagagccctttccagctctcttcccacgcaagccagcaccgctgcccagccctgggctcggtggtcccgcgctgcacgcggccaagcgcatcaaggtggagaaagacctggagctgccacctgccgccctcatcccatctgagaacgtgtactcgcagtggctcgtgggctacgcagcatcgcgccacttcatgaaggacccattcctgggcttcacggatgcgcgccagtcgcctttcgccacatcgtcggaacattcctctgagaacggcagcctgcgcttctcaacgccacccggggacctgctggacggcgggctgtccgggcgcagtggcacggcgagcgggggcagcacacctcacctgggtggtccgggtcctgggaggccgagctccaaggagggccgccgcagcgacacatgtgagtactgcggcaaggtcttcaagaactgtagcaacctgacggtgcaccggaggagccacaccggcgagcggccttacaagtgcgagctgtgcaactacgcgtgtgcgcagagcagcaagctcacgcgccacatgaagacgcacgggcagatcggcaaggaggtgtaccgctgcgacatctgccagatgcccttcagcgtctacagcaccctggagaaacacatgaaaaagtggcacggtgaacacttgctgactaatgatgtcaaaatcgagcaggctgagaggagctaagcgcatacgtgggggacactgcgtgcgtgcgtctgtacagcgtgaccatcgccaaccttcgccaacgggaccggtgaccggactggcctctgcatccccggggcccagggaggcggcagtccaacctaacctgtgtctgcgaagtcctatggaaacctgagggttgattaaggcagtaaaaaattaaaaaaaaaaaaaacaaaaaaacaaaaaaatttgtggagccttttaactgtgcaataatttctgtatttattgggttttgtaatttttttggcatgtacgtgcaggtacctattattattattatttctgtttaaattcctttaaaagattttgttgagtatccatcccttcatttttttttttaataacccagtagtagtctgagcaatgactcgcaagtgacgtagagggaagctatcttttaaattataattttgtgtgtgtgtgtggggggggtgctgcttttttgaaatttaagctaagcatgtgtaatttcttgtcaagaagccaacacttaaatgacttttaaagttgtttgcgttttcatcatttactttgtcctgaaatgaaaagtggcatgtgggatttttttccgggggggaggggtggctttcaaaaccattttttttttttccgggaggtggatgtacagcggattacaatctttaaaattgtagcactttgtcttagcatcgcattggagagttagcactgatgtcctcctgagccacagaggcgtctctgtgtggaattcaactttcatgctatggaaggaaaatgttgaggggggcgtggcaaacgagcctctcccccacttgggaccccgagaatcttttccagggtgactctaggaacagcccccacatcnnnnnnnnnnnnnnnnnnnnaacagccccccacatcctgcaattgtgtgttaccaggagatatgataatgtccttttctgggggagcttggcgtattgggaagccgcctctgccctttgctgtagatttggctgcataaaatgggccgaggatacccactgggtagacagctgtggcctgtagtggcgggaaagaagagactaacaatgttctctcaggcttctcctggcaagatggcttctcttttcagcccccagcctacagataaatcccaggtgtccattgctacagtggtaacttgactgtgtcccaagcagacaactggccctgatggtgaactggagaagttagctgcggggtcgctcatctcacgctgataggcactgtagggcaaaggaatctcacccgttctctcttcccggaggagctggtaagagttctgtccaaggtgccccacgctgcttccgtttctgtgttttgtcttttccttcctccaattaagttgggacatactatacattggacttgttgggatttgatgtttgaattctgttgacccgcactttaaagcttttgtttgcatttaaattaaatggcttctaaacaagaaattgcagcatattcttgtctttggcccagaggtgggttaaactgtaagggacagctgagattgagtgtcagtgttgctaagcgtggcattcacaatactggcactataaagaacaaaattaaataatttattggacagtttctctactgccattcaatttgatgtgcgtgccttgaaaaccgatcttcctatttgagtctcttgagacaaatgcaaaactctcttttttttttgagatgaaaaaaaaaagactttttaaaaagcaaacaagagaagtacattctttagaaacaaagccacatttactttaaattaaaaaaaaaaatcctggttgaagagagaggacgggaaaatgccataagaccagtcaaatgaagaaataaacccagcacagccctggacatctattagcagaatcgttttcagacccccctcccccttttttggggcaacgctgcttagatatggagtggaggtgacttactgctgaattaaaactcacgtgacacaagccgatattgttgaatgaaaaaacaaacaacaacaacaacaacaaaaaacaattcaggaacaatggctgattttttttttcctcctaaatttaaatttagtgcactctgtcttaaaaatacgtttacagtattggatacatacaagggtaaaataaatcgtgtgtatgtgtgttggagcgatctttttattttattttattttcaaagtctgcttaataggttatacagaatgccacaatggctaggtgtatattgttttcttttggtgatggggttttagtatacattatatatattgaaatttcttgattactgtcaaagtggaccagtatttgtaataattgagactgcctgggcattttacaaaatgagaagaaaaaaaagtcctttttcttttccttgaaaccgttacagtaagttttaaatggtgggtctataaaatctgctctgtcacagcaacctgtaaagtcggagttttagtaaatttttttctgccttgggtgttgaatttttattttgaaaacaaaatgtatagaaacttgtatttggggtttaaagggggattgctgcaatgtgtagaaaaagtatgtagagaaagtgcttaatattgttactgctttgcagaagaagaaaaaaaaaatcacacttctgacctgtgcgtatttttctctcccacctccctctggaatggatctattggtcggttcatatgatgtaggctctcgctgtatttttaactggagcttgtaattttttaactgtaagcttgtccttttaaagggatttaaatgtacctttttgttagtgaatttggaaataaaaagagaaaaaaaaaacaaaaacaaacaggctgccataatatatttttttaatttggcaggataaaatattacaaaaaaaaaatcccccacaaaacaacaaacaaacaaaaatcccacccacatttgtatgttaagtcctcttgtatggggtggggggagggttgtttgacaaccttcaagagaaaaagacacagaaagagacatgctttgattcacaagtcattttagttgtatatagtctgtcagaattggcctactcaaaaagaactgttggctttgggctttcattcgaatgccccaactttgcatctggcctccttggtgaggccacagccgacttgatggcaagtccttacttgtgttgagtggagaaaagaaagcccttcctccaagaggcagtctataagatggtagcgcggtgagagagcaagggaggttaccttctccgctgtggctactgcggccaccccctccaccccctggccacgctcaggagcagagagaatcgacagctgcttttgtccttgagcaaacctggatggagcagcgaagcttctgagaggagcagctgggcccaggggagcctctgccactgagactggtgcaggcgggacagaggagagccttgcacgcaggtcctgttcccttggaatgtctgctccattttccccctctgtctctctgcttttctctgcaattccatccgtttcagaccagtgaggcctggaatgaaggaattctgtgccttcccatctatgttccctccgtcctccccaggctctgcctactctttgtggactcctctttaattttcttcctcctttgccccctctccccaaaccctcttttctcttcctttcttctctccttcttttcttcctcctcctcctcttcttcttcttcctcctcctcctcctcctgctcctcctcctcctcttcttcttcttcttcttcttcttcttcttcttcttctttttcttcttctcctcctccttcttttttttttttttttttgtaaagccaagtagctttaagataataaaatggttgtttattggatgagggaataatgatacactccacaaatacctatatcaggaagccattttttttttaatttcaggaaatgtaagaaaccatcatttcaggttatgaaagcgtgattgtgcatctttccaggcagatctttactaaatgcagagtctgtctcactgtttcccatttgacacagttaaaagatgggggcctagtgggaggccaggcctaagtctcagtgtcctgcatgcctgccctacggcccagggttaccctgcccttttgacaccctgcctctctgctacctgggagcctctgtgtggttctcctgtgctcataaaagctagccagtgctcaccagctcacctatcaccagaatgccaggactaagccatcctaaagcacaaggacttgtgtgtctctgtcaactgcagagagaagaggatttttgcttctcttatcaaagagaaaaatcaaccaaccaacctacccgaagcaggtgacccagcctaagggctctaccgcgggtgacccagccgacctcaggtcgggttccacactgccacaactttacccaaagttgctccctattggaacctgccacttgccattggagggtcatgggggggtggggggagaggagactggattactcgaagcaaaatgtgaaccctgaagcgaacacagccttccacctggccctccccgtccgaggtttgattccgtgattttggtgctttctgtgtctgccctgcatagccaaggcacattgatctctgcggtttgcttttgtactggcaaggcggaatatttttattaccttttctattacgtatcgtatgagcttttgttgtttgcctagagggtttgtctcttacagcaagtttggagctatttattattgcttggtatttgtgctctgcttttaagaatgggcacttggttttatttttgtttgtttgtttttttgttgttttttaattatggataaaatgttgagatgacaaaaggtcatttcaatatggcttagtaaaaatatttattgtttcttctctgtacaagattttgggcctcttttttcccccttaatgtcacaatgttgagttcagcatgtgtctgccatttcatttgttcaaaaccaagtttgttctggtttcaagttatgaaaataaattgggacatttaacttgatctccaaaccttgtccttttctgtgtcttttaaaggtgggggatggacagcttatttctaagaggggattgaaggtctctgttttcccttctgatttacgctttaagtccatggccaggaagagagagagagaaaaaaaaaccacttccaggaagcagagaggtttggaaaggctcttagccccggctatacaccatgtgcatacacagtgaggccttgcctcaagaacaaacagcaaaattaaaatgaagaggggaaacggctatgaaaagcagttcacggcagcccagggtaactctggtaatcacggatcttccatgctatgctcccttctcagtcatggtcaagcacctctgccgtgggtttagcagatgctgtgaccatatcctgagttcagttaaatcccgggttgggccacgtgaaaccacttatttatgttttgcctgggaggcggggaatatggtctctaagctctgcattctggaagcagtagccaggtctcaagtctgaggttaacctgggttctaatattggggtccaggccagcttggggtgtatagcaagatcatgtatgagaaagagagataaagagaaagatgggggaagaaggaaagagagaagatggggggaggggagaaaggaaaggagaggaaggaaagaggaagacaggaaggaggaacaaaggaagaaaagtggcaggcagagactcagaactggaaaccagtgtattgggtcccagacagcttctctgtgcacttgagcagctgctcttggctttccaggtcctgaatgagggttcaaggtcagacagcggctctgatggccacaaggggaggattccctcccctcccctcccgccccctcctcttcccttctcttcccttctttatgcaaggcgttaacaagtggaagaaacaatctctggggttcaccagtgtcaagccttgcacagtgaaagagtctggaacttttggttcacatgcagagcagcctgatggaagatgtcggggttctgtaggcttctgggtgtgtctgcacgggtgaagttacgctttcctaactccacgtgagctacatggaaagaaggaaaggtcctcctgggttcctgatctcaaagcgacaagggaattccacctgaaatcacccaccagtctcatcatgagctgagtgctgtgctagtgagtgttcactgggagcgcggaaggaagggagggaaatgtaggagcctcatggccaaggcgctctgtgggttccgcccacggaggctgaggcgaccagacaaccaggacgatgtgctaccctccatcacgtctttagcccaaaccagacaatgtcctcccaagaagcagtcacatgacagaacaggaagaacaatttgaaccgctgcaccggaagtggagcagagcactgcttggtgatggggagcaggagagaagggcaggcccgagtgctttctagagcccaaggaacaagaattcccagggaagacgttttgtttgtttgttttgcttatttttcccacagcctttccctcagttggcttagaaacacaggctttaagccttagtacttcttacccagagggatagtggagctgaaatggtccaatctcttaccttaagaactcagagagtgagctcttttggggaggtggggaggggagaagagacactctcctctttaagccaggggaacaaatgcttagggttgagtcatggaaattgttcagatgaacaagttagcgaatgctcaggcttacaacaaaccgagggccatggggcaaataggggacaatgtagggcaaagaaagggcttgatggagtctcaatcggtttccttggtaactttttatgatctcaggtcagtctcttcccttttctgggcctatagcaaagggttaaggcaacagggctgaaccattttgccctcagacactaaaggtgataccagatgcctgggttccaccaacagagcaagcttgacagcagaatatcccggttgctggctgcgactgaaggtttcccccgagatataaatcctgggatctctgcagtttccaatcgtcccgttgtggtttggggcatctctgaagtttctggacagctttagtcaccccattctgagctgcaaggtccagcaattaaaatgagaaaaattcccttgtctgctttggagataaaaccagaggaacgggactttttatgttaatgtgatggagatacataacgaatctcatgtaactttcaagccgggaggatgaaaacgctgacgctccgtgcaggtgatgccttagccactaattgcctgccctgaatagtcttcaaaacggctccatcggattctgattgcagaccatctaggatgcttaaaagacgtctaaacaggctcaacctggaaaccaatttagctccaaggcagggactgagctgaatgtcatgtgtgtgaacgcagggagggctcggcttgtctcctcgctcccaaggagagaagcaggagaggcagaatttttcccgggctaggtggtgtgggtagcaaaggagtgaagaagagggaggagtggaccagccatgaggcaggagggccaggaaactgtgctgttccttcagagaggaatcaccagcaagatgagaaccgagggagagatggtgcctcttacagagggcaggagggagaaacttcacagcgcttggaagagcagagtcaagttcatagagaagcagaatcccagagatggctggcatccttacaattcatttagcatattcctagctaatccatccatccatccatctacccacccacccacccacccaaccatccatccatccatccacccatccatccatccatccatccatccatccatccatccatccatccacccatccatccacccatccacccacccatccatccacccatccatccatccatccatccatccatccatccatccatccatccatccatctatctacccatccatccacccatccaccatccatccatcttctatattgtttgtaccattgaatctttcaaacacctccattgtcctccacagccagcgtgtcctatcttcctgtttgattcccacagtactgaaaaaacaggaacttctgtggataagcacttcattctccagtaactccatcactgtcttaatctgagagtctgtgactacttagacaccctcagcaaggtgtgaggtggtgagcgacattagtcccttgcctgaggttccagccattttctccctcacctgtgacctagctgtacggtattctgccccagctgtacaaggtcttgggaagtgcgagagtaccttgagtgttgagggttaatagaaatagggaacccatctacgcagctatggggggagtcatcacttatgccagggtcacctacactcctacaagcaacccggcacccatacttctggaagccagttcaggacactcattagctgtccaggatggacttggtgtgtggctttggcgactttaggtgcgttgcaaagtgttacattgctctgtcattgatgccctgcccaagggagtagacagtgcttgtgtctcctaggaagagttccagcaacaaccccaagaacccagtgtcgaaagacagcaggactctgtacctcactcctactatgtggccatcctgcctgctgctctgttctcatcttggcctttaattccagcactcaggaggcagagacaggcagatctctgtgagtttgaggctagcctgatctacagagctagttccaggacagccaagacgacacagagaaatcctgtctctgaaaacctaaataacctgatatagctgtctcccgagaggctctgccagtgcctgacaaatacagaagtgggtgttcacagcctaccatcggactgagcacagggtccccaatgaaggagctagagtaaggacccaaggagctgaaggggtttgcagcctcataggaggaacatcaatatgaactaaccagtaccccccactgagctccctgggactaaaccaccaatcaaagaaaacacatggtgggactcatggctctagctgcatatgtagcagaggatggccttgttggacatcaatgggaggagaggccttggtcctgtgaaggttctatgccccagtataggggaatgccaggacagggaagtgggagtnnnnnnnnnnnnnnnnnnnnatccattcatccccccacccactcactcattcaaacagctactcacccacccacccacccacgtgcttcttcacttcacaaacattgaagacacatgctgtgtcgcagacacggatggaagttaggggcaagtcaaattctcattgcctttcaggaagttctctttcagtgggcagaacaacttatgtatacattcactcatccaactacctgcccacccacctactcatcattcctttccaactctggagttaccacctctggcctacatgtacaggccttgtcatggagtcactccattttggatgggaatgccacgggacaacaggtaaatagggcttggaatgttgaccaataggcttcagtgggaggttggagcaagggttctccatacccaggtctctctttttactatggtttatttttcagatcacattgaaaaggaaattgtatttttgtactctcttataattaaaaacaataataaaaaaaaggaactgtctggcttaggacacagtgtagtttgtgatcctcgggaccttgtctagaacaaggagaaggacttttatctgttcaaatcccaaatggtgctgctgtgtagctcttggtccagactatggaagagtttttggctccaagtgcactgaagactgcaatttccaaaggcttggctagcatctcagtcaatgaaggagacctgggttagggacagtgccacccaccctctttccctattatcatggagacgctgccaagtgctgtgcaagtcctgtgcagtgtggtggggaatgcagaactgctgggttcaaagtgaacctaggaagcccaagcagtagtcagcaggtatcatgcacccaaacatcttccacactgggtgcggccccgccctttgcctgtgttgggactatgactgagaattggctttatcatctgt

SEQ ID NO: 32 - DNA, 2697 bp, Mus musculus
ggcggcggcggctcagaccccctccccggcccgcatctgtgcagctttccgggcgatgccagaatagatgccggggcaatgtcccgccgcaaacagggcaacccgcagcacttgtcccagagggaactcatcacgccagaggctgaccatgtggaggctaccatcctcgaggaagacgagggtctggagatagaggagcctagcagcctggggctgatggtgggaggccccgaccctgatctactcacctgtggccagtgtcagatgaacttcccgctgggggacatcctggtttttatagagcacaagaagaaacagtgtggaggcctgggcccctgctacgacaaggtcctggacaagagcagtccacctccctcctctcgctctgagctcaggagagtatctgagccagtggagatcgggatccaggtcacccctgatgaagatgaccacctactgtcacccacgaaaggcatctgtccaagcaggagaacattgcaggtaaagatgagccttccagctcatttgcacaacatgcaaagcagccttcaacaagcgcctggttcctgctgcagcacgcacagaacacacatggcttccgaatctacctggagctgggccgggcagcacctcgttacgcccaggctaacatccggggcacgagcaccgctcgggccggagaccgtggcgcagtccccactcatgaatttcctgggggacagcaatcctttcaacctgctgcgcatgacgggccccatcctgcgggaccaccctggcttcggtgagggccgcttgccaggtacgccaccgctcttcagcccaccgccacgccatcacttggacccacaccgcctcagtgcagaggagatggggctcgtggcccagcaccccagtgccttcgaccgagtcatgcgcctgaaccccatggccatagactctcctgccatggacttctcccggcggctgcgagaactggccggcaacagctccacgccgccgtccgtgtccccaggccgtggcaaccctatgcaccggctgctgaaccctttccagcccagtcccaagtccccgttcctcagcacgccaccgctgccacccatgcctgcgggcacaccgccaccgcagccgcctgccaagagcaagtcctgtgagttctgcggcaagaccttcaagttccagagcaatctcatcgtgcaccggcgcagccacacgggcgagaagccctacaagtgccagctgtgcgaccatgcgtgctcgcaggcgagcaagctcaagcgccacatgaagacgcacatgcacaaggcgggctctctggctggccgctcagacgacgggctctcagctgccagctcccctgagccgggcaccagcgagctgccaggtgacctgaaagcggccgatggcgacttccgccaccatgagagcgacccatctctgggccccgagcctgaggacgacgaggacgaggaggaggaagaagaggagctgctgctggagaacgagagccggcctgagtcgagcttcagcatggactcggagctgggccgtggccgcgagaacggaggtggtgtgccaccgggggtggcgggcgcaggggctgcagctgcggctctggcggatgagaaggctctggccctgggcaaggtgatggaggacgcagggctgggcgcactgccgcagtatggggagaagcggggcgccttcctgaagcgtgcaggcgacacgggtgatgccggagctgttggctgtggggacgcgggtgcaccgggtgcagtgaacgggcgcggcggggccttcgcgccaggcgcagagccctttccagctctcttcccacgcaagccagcaccgctgcccagccctgggctcggtggtcccgcgctgcacgcggccaagcgcatcaaggtggagaaagacctggagctgccacctgccgccctcatcccatctgagaacgtgtactcgcagtggctcgtgggctacgcagcatcgcgccacttcatgaaggacccattcctgggcttcacggatgcgcgccagtcgcctttcgccacatcgtcggaacattcctctgagaacggcagcctgcgcttctcaacgccacccggggacctgctggacggcgggctgtccgggcgcagtggcacggcgagcgggggcagcacacctcacctgggtggtccgggtcctgggaggccgagctccaaggagggccgccgcagcgacacatgtgagtactgcggcaaggtcttcaagaactgtagcaacctgacggtgcaccggaagaaccacaccggcgagcggccttacaagtgcgagctgtgcaactacgcgtgcgcgcagagcagcaagctcacgcgccacatgaagacgcacgggcagatcggcaaggaggtgtaccgctgcgacatctgccagatgcccttcagcgtctacagcaccctggagaaacacatgaaaaagtggcacggtgaacacttgctgactaatgatgtcaaaatcgagcaggctgagaggagctaagcgcatacgtgggggacactgcgtgcgtgcgtctgtacagcgtgaccatcgccaaccttcgccaacgggaccggtgaccggactggcctctgcatccccggggcccagggaggcggcagtccagcctaacctgtgtctgcgaagtcctatggaaacctgagggttgattaaggcagt

SEQ ID NO: 33 - DNA, 2442 bp, Mus musculus
atgtcccgccgcaaacagggcaacccgcagcacttgtcccagagggaactcatcacgccagaggctgaccatgtggaggctaccatcctcgaggaagacgagggtctggagatagaggagcctagcagcctggggctgatggtgggaggccccgaccctgatctactcacctgtggccagtgtcagatgaacttcccgctgggggacatcctggtttttatagagcacaagaagaaacagtgtggaggcctgggcccctgctacgacaaggtcctggacaagagcagtccacctccctcctctcgctctgagctcaggagagtatctgagccagtggagatcgggatccaggtcacccctgatgaagatgaccacctactgtcacccacgaaaggcatctgtccaagcaggagaacattgcaggtaaagatgagccttccagctcatttgcacaacatgcaaagcagccttcaacaagcgcctggttcctgctgcagcacgcacagaacacacatggcttccgaatctacctggagctgggccgggcagcacctcgttacgcccaggctaacatccggggcacgagcaccgctcgggccggagaccgtggcgcagtccccactcatgaatttcctgggggacagcaatcctttcaacctgctgcgcatgacgggccccatcctgcgggaccaccctggcttcggtgagggccgcttgccaggtacgccaccgctcttcagcccaccgccacgccatcacttggacccacaccgcctcagtgcagaggagatggggctcgtggcccagcaccccagtgccttcgaccgagtcatgcgcctgaaccccatggccatagactctcctgccatggacttctcccggcggctgcgagaactggccggcaacagctccacgccgccgtccgtgtccccaggccgtggcaaccctatgcaccggctgctgaaccctttccagcccagtcccaagtccccgttcctcagcacgccaccgctgccacccatgcctgcgggcacaccgccaccgcagccgcctgccaagagcaagtcctgtgagttctgcggcaagaccttcaagttccagagcaatctcatcgtgcaccggcgcagccacacgggcgagaagccctacaagtgccagctgtgcgaccatgcgtgctcgcaggcgagcaagctcaagcgccacatgaagacgcacatgcacaaggcgggctctctggctggccgctcagacgacgggctctcagctgccagctcccctgagccgggcaccagcgagctgccaggtgacctgaaagcggccgatggcgacttccgccaccatgagagcgacccatctctgggccccgagcctgaggacgacgaggacgaggaggaggaagaagaggagctgctgctggagaacgagagccggcctgagtcgagcttcagcatggactcggagctgggccgtggccgcgagaacggaggtggtgtgccaccgggggtggcgggcgcaggggctgcagctgcggctctggcggatgagaaggctctggccctgggcaaggtgatggaggacgcagggctgggcgcactgccgcagtatggggagaagcggggcgccttcctgaagcgtgcaggcgacacgggtgatgccggagctgttggctgtggggacgcgggtgcaccgggtgcagtgaacgggcgcggcggggccttcgcgccaggcgcagagccctttccagctctcttcccacgcaagccagcaccgctgcccagccctgggctcggtggtcccgcgctgcacgcggccaagcgcatcaaggtggagaaagacctggagctgccacctgccgccctcatcccatctgagaacgtgtactcgcagtggctcgtgggctacgcagcatcgcgccacttcatgaaggacccattcctgggcttcacggatgcgcgccagtcgcctttcgccacatcgtcggaacattcctctgagaacggcagcctgcgcttctcaacgccacccggggacctgctggacggcgggctgtccgggcgcagtggcacggcgagcgggggcagcacacctcacctgggtggtccgggtcctgggaggccgagctccaaggagggccgccgcagcgacacatgtgagtactgcggcaaggtcttcaagaactgtagcaacctgacggtgcaccggaagaaccacaccggcgagcggccttacaagtgcgagctgtgcaactacgcgtgcgcgcagagcagcaagctcacgcgccacatgaagacgcacgggcagatcggcaaggaggtgtaccgctgcgacatctgccagatgcccttcagcgtctacagcaccctggagaaacacatgaaaaagtggcacggtgaacacttgctgactaatgatgtcaaaatcgagcaggctgagaggagctaa

SEQ ID NO: 34 - DNA, 44323 bp, Homo sapiens
aaaacaacacagtggcaatcgtgccgaggggaggttaagggggatcggctgaccacgcagaggaaagggccagagcccgctgtgccagacagggccagggtgaagggaagagtacttaaatccaagaaggagcttgatgctttctgaagagaccaaggaaaataagatgtccacggtaaactgcgtaaccccagtcaaggtgattttctcaacaacccaccaacaggtttcctaggaagattagtaattttccgtatgaattcacgattttgtaaaacaactagagacccaagcaagattcaatgcaaaagttaggctaactgtgttaattccatggttaccttttgaattaggttttgctgtagctgtgtgttttgaaggcagcggtgctcacaattatcttaactccccagggtagagtatatctccagtggtccacatgtctttcagaattgggcctccgataaatttcataagacatagccctctttttttttttttggttagttggtggggggggggtgaagttcctctcccttctgcacagaagggaaccccatatcattagaagtgtgatataagtcagctgctctgattcaatgggagaataaaaacgtgttcaccaaaggtgttatgccaggctgattttattcatttgtaattcacacctgagagaaaacagccgtgagcatattttaacagcccctaatatttttaaagggtcttttttccctacctgaatgatatgatgtacatatgcatatttcttttcttttcttttcttttctttttttttgatggggaggttgctatctgcctgtgcttggccttggcgattttttgtctggcctttgaaatatttcataacagaaaactaggcatttctgaagtgctggggtgaatgcagttgcttttgtgaagccggccttagagacatcgaggctgggttagctggttgggtgtgttgtgtcagtgaccagtgtggagggctaagtgggtcctactcaacccaagggaaggccaactttgggtgcatttgagaataattagaattgtgtctcaggtgagacggaagcacagaaaacagtcgtttacagataccagtttctagcgccttctcagaatggagttcttggcactgtcttatagcttagaacacggcttgcaccagccttcacttatccccttttcatctcctatctcgattgctttgcattctctgttgcttgttgtgataaaatactttccaaaataaactttcagttgaattggcttttggttgatggcaagctgaaacgccgagccgcgcctagcgccacttggcagctagggggagctcggtgcccgtgtcatggcttggcgcctccgctacaatgggctaggaacgggcttccatcagcagcggcggcagtttacgttgctgcaaaataccttaagtgtgaagttgtaatattgattttccagcagagattcgtgcaggacaaaatgagaatataagtttgagaaatctattttcaagctatcgccattgatttacaagccctcacttggcagatgggggcattttctttttctttgattttctttctttcttttttaacaattaaaattgtgagttttgaatgggtgtgttttccctgattcgtccgtggtcttgacgttctgaaaattctgctgcgttattaaggcgctggtgatcgggctggggaggtctggggaaggcgtactgctcatttctgtcttgcatgtcacagacccagggaacagtcgagagttgctgcttttgggagtcgtgtacctaaaacagcttgatgaatggaaatccttttagctcaaattttatgacacttggattctcaattccatttattaggtaatgttcccactgaactaagggaaatagcaccgttccccaaagatttaaaatgccgactcaaataacatgtaaaactttgtttggaaagagtatgtgattgctagagccagtcttgatcacatctttcaccccaaacagttgtcctttatggatggcttttaatgagaggatttctcccctaaacatgtaatctagtgatggggaatatatgtgcttttgatcataggatttctagatttataatgtcttctttcccaagttgaagaaatctgcagactgcaccctgagtcttatgctagagttcaatatatgagcagaagaggttaccctgcgacaggaaagagtgctttattctaacctgaaagagaaataaattaggtcagacaaaagcctagcgctgtcgtcagctggagaaagagccttcactctccagtacacagggccagcaatttatctgatgatttctctacttcatttaatgtttgaatcgagccagttgtaagcatgtagtggcagcgagctcactggaccactcagagatgaagaggcacggtgacctcgaagtcttgggccggacggtggtctctgagctgcagaaaaccgttaaaaatcagtttagcaatctccaatcctttgccttagaactcaggggagtttcacaagctgtaactaaacacagatcatagataagacaatgcaggaaaaaatatatgggggagggaatgggagggggtcaggttcttgtccgttggagactctccttcatctcccatggcttaaggatggaccttctggctgcctggttaggcctcacctttagctgaaactctccaaagactttggcctcgaggttaatgttggcttcacatctggggaggacaaggagaaagtaaatggtctttggggactgtaccctgcaccacatggttgagttattgataccggctgagcatctttctctgaagacggtgttagctgtagatacacttttgtatttattaatggggaagggtacagaagacactaggaatgaatgtctgtgtcatccagctgccgtgagtatgctttgtcactttgcggcactcttttgactcaggccatttggcctgaggtcctgtgcggcactcttttgactcaggccatttggcctgaggtcctgtgtgctctgtcctgtccctactccctgatcccactcagcttccttccggtcccagggagccaaatgtcagggagatgtgctcaggctcggtccccctcttgctccatccctccccaagaaacgccgtgtgctgactgcctcccttgagcaagtatgtttcccagggcgtgggtaaaaagtgccgagagcaggctatttggagacgcgtggaaagagaaggacacatttcttgcgtcttctgcacaagccagtgaggagggtgagcagagcagccttgttttttgctggcaaaagtgacactagatggaggcttgatgaatggtgccacattcacgggatgttggtccagcattttgacatatgctagtcttttgtgcagttgctgaaaatcaagaaattcattcttttttctttttcttgtggcagctgataatttgcttgggtgttgaatagccagcctgagctattttactgtaatgaaatcccagaccacacaaaattaagtcacttcaaagtaaaaaaagaaaaaaaaaatcctctcttttacataacttcttttttatggcccccttccacttattttattgaaatacaaataaatacatttgtgaaatgttctaatgagttttctactaaaacaacacgcagaaatgactcaagaaaagttgagtgccaatattattgtgattaacatgtgcctcagaaatggatgcactgctaagaattaaaaaaaagggggggggcggtgtcatgtttaaattcctaccttggaaaagagatgtcgaaagcactcctgcccttgctatttgctgttggcctcagataatccaaactcctccagctaaagccttgaggtccagtgtcctgtgtggaagcccttcttttcttccgcacctttgaaaaaagcataatgttaaataaaaacaaatctcttcatttgcccacaaagagtgcttttttatcacatcgttaggagcccgttgtggctctgaagattgaaggcatttgcagttttatagaacctgctaaatgtgttgagaaggattgctattgtggtaaatcttttccttttctttttctttaaagcgcctattttatttgtcaagacttttatttgtaaccttttagtaatggctgagacctgtgaatatacctgagtatgttttccttattcacttgttcttttttctgctcttgtgctggggagacccaggctcctgggctcagtttttggggttctggagaggtgtgtgcattattcttttttctgctcttgtgctggggagacccagactcctgggctcagtttttggggttctggagaggtgtgtgcagtgggggagagaaggcggttggactccatagagcaactgaggatatttttcagggagctgcttaagcatcctaaaattaggctggagtcctgcaaacaatctgtacacagggagaccctccccaaacattcgactttcccgcctggagtctgtagaccagaaggtatgggagtgagcctcttcctgcatctaaaacctcttcacggatctggagtttccacctcctggcctgcaggccaggcccaaagtttccgctgctggcggagtcagcgggaccctggtcattttcctgggaagcccacactgggaagcatgttttgcaccggccgccttcccttgctctccctctcacatgtcagaaacggcgatcgaggtgtgtgcctcagctgaggaggggcagacaggacctcatggggtggtggctgtggtatgtatctgtccctccagggaggcagcctttggagggtgtcaggagggtgcagagctgacctggagcaggctggactcctctgactgtctgctgagagggtcgagggtcaggacagagaggtgtgatctgggtcttgcttcctgcttcagactccgcctggctgtgccttcccagggtccccacccccaacttgtgtcctaataacccttcgagaccccctgtggacatcctcctgacaccagcctccctcttatctccatttccttctctgccaggcacttcattattccctccgttaggggaacttcataaaatctcttgtcgtgcctttaagcgtcatctagtcatagattattttctccaccaagaattgattcctgctctctccccctccacccttctcctcccccctccctacggttgttattttctcttggatccaataaattaaaaatggatggcagctcagaaagtgttgtgctccgtcgagtgtgcgtgtggtggcgtttccgtgtcgcctggagtcccagcccctccccaagtgttcacggagaggagatgaaaagatctcttcgtagattatgggtaagcatgggctcgctggcaagagctccctcttcgtaggaagcaggtgtaaagtctccagtcggatgcagagctcgggcggatggatgctgaacatttcttgtaaacatgcgtacacatcatgatggcggttgtgacgttggtggcacacgattttaagagcctgggacccatccccccacatccttccctttcccacccccgtcatcactgaaacaataattctgtgtatgtttctcctggactgtagcttagccattaaagataagagagttggatttgaattaatgcagggtaaggaggagcagcagcccacgtactgtgtatgtagcaatgcacatgtgtgtgtgcaggcagccacgcacatgcctgtgctctggggacagcaggcagcagacctctcggctggagttcccctaagggcaggtgcatgggcagttgttagagatgggccagggagggcggggtccttggcaccctgtgtgtgggggagtcactggccaggtaaggccctgctgaaagcttgcagctgctgggggcttgttggctgcttggctgggcctgtgttaacgatgtctttccatttctttcttctgactcaaattccttcccagcaaagccgaggcatggggaagtttgtcttgggatcaagtgcttcccctttcacttaacaacgatgtccattattatttgtgattgcttctaaatgcatttaccagctgggaggaggcctggccttgtaaataaaatgtggttttgttgtaaaagaaaatctaactcgtgtgtttgtgtgtgtgtgtgtgtaaatacagatttgtccctgcactttaggatttagcatttcagaatccgcctcagccctctgatatctgcctttcgaacaagttgtctgctgcatccattcatttttcctcttaatgagtcaaacatttcagcaattgctctactttattcggctcataatatattgagagcagcaatattctgcagggctgcccgacacttggggagcttttcatgaaagcagagatcatctcagaggaaaacctcatcttggctttatttttttaaggcccgagtttgctggacaaggctgcatgaggggctggcctgtagggtctgggaatttgaaagactgttttcattggtctttttcctggtgctttttcgtctctgggtggcaggttggaccactctgcctgttagaacagaggcctggctctctgaggctgtgcagagccgggagactcaggtgtccatagggcagagaaagaggggtgtcactttgcccttcccagggcttggctttctccttttatttcttccattatcgatacagttctaaggagggacacatgcacacatatgcaggcaccctacacgcctagcttggtatctgcctgccagcggaagtgaaaccacagtctttgggggtgtctacaaaggccttgaacgtgagctttcaggcccacttggtccacttactctgacccagaaatttggggctgggggtgactctgctgcctgatgttgagggtgaccttgctaccttcctgggaagtgtcgcacacagcaggccaaggcacagcgccacagcctgggtggtggggagaggaaaccccgttctttggaatcgggtgaacaccctgtcatctcaggggtttaactttcaacgctgaaagtgggaggggaaggagatattttttgtttgtttcttttcctcccagactcccttagaggcagtgagttggatctctggtctgggacgtggagatcccagctcagaactgagccctggaggcctggataatcccggggctgtctcggggacgccaacagggcctggctcccaggttggttggctgttaggacttgacgcagaaatcagagctgcagcacagcaaacggctttggacaccttcaaactcaattacgggggctcgcagggctgctgcatgaggaaagtgaaaaggcagagactgccaaaaaaaggaaagaataccagatgttaccaaaaataaaaaaataaaaaaaagaggagagaaaggaaaaagtgctggtacatagtcttggcaaaagacgaagctgaggaggaggggtgcttgcgaacaggcacgtgtgacctctgctaatttttaaattcatctgtgtttcttttgaattagaaaatgagtttgaaattatgtagttgaaaacctcctagcagagaggagatatttaggcttgctagaactcctactcaggagggcggacgaggctgaaaaagttaataaaaaagcaaacaaaaaagtaaaccgaagattaaattaaaaaaaccaagaagacctcttcgccctcagaaaggacggtccagctggccatgtggatttgtcgttgtacgtttttatcaaatcttccactgatgcaggagtttgccaggcctggacagggtggtatttaaaatagtaccaggtaccgcacctcgcccctgtttcctttgaattctcaatttcattatgtccttttttgcttttcagctcatttcttttgtgcctctctctctattttttaacaaaacaatattttgacatcctcctcccatttattagagcaccttctgtaaaaatggcgcacaatacatccttatatttctaaagaactgtttttacagtgctctcctttggctctgaaattatgtatatgtaattggtaattaaaggtgcgagcttttcaatataaacagtattgctcaatgttagatcattaaagggaaaaagaggcaccaaataattaccttttacattctgacaaaccgttcacaggaatccagtcttccctagaacctctgttcggtgggaaggttgtgattacattttaaccatagcaaagcatcttttcataaaataaattggtaaattaattacgtggcattgtcttcaaacccatttttaagtaaactcctatttctttctaaagtgtaattaatggtttctgggaccggctttgtgaggactgtttctttaccttgtaggttctttttcttagagagatgcagacaacagatttaggatttcctcgtctgcggggcgtttctgtactgccacatttctgatgcattctgcatttaattcatcgagggctctgtctgcttttctgtaaccacaggtgggatctcaaattgtagtttctcttctcagcgatacctacgtcgctacctattcacacatagttcatacgtgcgcgttgtacgtcttacatcgtcgtatattctgtattcagtttcacacatggactctcctaggccctgcataggctcgtgttcagaaaatagagaacagtgatttatgtgtaggatgggagatgccacagaattttttccttaaattatctgttctttggctctggcacttcaataacttcactgccacggaatgtattttcctccctcccattccttctcgccgttcctctgtggttttcattatccttccctaaataccatacaacttaaaatttacctgcctcctcgggtttcagacctttggctgccctctggcttccctgaagaccccgccactcgtgtcttctctacgactactgacatttgctctcgaaaaattccagcccgaatttgctcagaccccgaggggaatatgaaacctccacactgtccacttctctttatttatgacacttttggctgccgagtcttccaattttcccttgaggaggttgctgctttttgaggcatttattagcttccaaatatttgggtcctaggctccctactccctcccccacaaaaaaaacccaagagaaatctatcggctgctaaagaaatataaaaacatacagtccattgaaagtgtggtttgatatcttccaagaaatgcttttggagtctggagaattttctttctttcatttttctgggagtgaaaataaaatcaacaaacagaaaaggacagtggggagttgatgagtgtgggggaaatctacagagaaatggaagtctgaccgggcctcgggtgcttggcaggagagcctgcttcccgactctgcaagccggttccagcctcccttctgctgcagtgctttctcctaagatatttttttggaacctgacactcacttgttgctttctgagcatgtgggcttccttctctcctaaggacgggcccttagacgcccatctgggtttctgttttctagtttggtgtgtggccaggtcccaggtagaggaatgtgagtgggattcgcatgaatggggagggcatgaatgaaggtgtaagggatgggaggggtggggctccagcccagcagggggaaagggctccagctcactggttctcggccctggctgcccattggaatcacctggggagtctgaaagactattccgatgtttgttcccagtgtaactggtcaggggtgctgcctgcgccttgggatttttcaaaccctccaggtgattctcagatactggaaactttgagagacacatcacgacctcatgctgtcagcagccagggtgtgtgtgtatgcacgtgtgtccgtgtgtgttcttatactacgttggggagaaactggcagaaaataaactagaatgcagtaagatcggcactacttacgtggcaatgcccagggggcacgacgttgctcctagagcctcagtgtgcccatctgtcctgtgggggatgctcaccagcccccaaccccggggaggacctggtgagctctggcagccagcagcagagggggctgcttcttggcggggaaggggtggaccggaagttgggtgctgtgaccgcctaagcccatctctatcttctctgccccttccctttcttctttctgtctccagcagaggctgaccatgtggaggccgccatcctcgaagaagacgagggtctggagatagaggagccaagtggcctggggctgatggtgggtggccccgaccctgacctgctcacctgtggccagtgtcaaatgaacttccccttgggggacatcctggtttttatagagcacaaaaggaagcagtgtggcggcagcttgggtgcctgctatgacaaggccctggacaaggacagcccgccaccctcctcacgctccgagctcaggaaagtgtccgagccggtggagatcgggatccaagtcacccccgacgaagatgaccacctgctctcacccacgaaaggcatctgtcccaagcaggagaacattgcaggtatgggatgctgcgcttgcctggttgctgtggaagccacctcctgggtcccatgccctctgcctgagtgtgctggtgcaggggaaggcccaggggcttccaggatggcctctgggccaccagccggggctccccctttctgagggtccaccatccaggtgaccttcaggaggagacaggcctggggctcggggaggcccaaatggctgatggctgcttgcttttggtgaggggactctgtctcgggggctaatccagaggtggtcagaagcacagaatgaaaatttggaagtctggttggccctctctttgctactgatcttggcttagtccctgattttgaagctagacagttttgggttagagtttgtcttcacaacttggacatgttagtttgcccatctgtgaaatggagctaaggaaacccacctcattagggttgctgtgaggacgaatgagctgttgcatgcggcatgacctggtaggcacttaggaatgggagtgctcattctctcccctctcctttctctctggactcagtttcccatgtgtgaaatgaggagttaggccccctgatctcagaggttgcttctgacattgcccgaccccaggggccggtcccaggcaggggtgtgggaacttgttggagcactgtgcccgttgggggaggttggatatgccctttgacatgctcactcatttgaccactgggacagctggttttaccaccttgagaacaggtctagggcccctctgtccccaggcgtgggtctgctcaccacagtgagttagcatgaagtccctccctcttggccagcaccatggcatgctggagcctcttccagggagccgctgctctctgtgcaaaccagagtgtttgtttctggtttatacttctgagcccaggaggcctgggggagaaaggagggcctggccagcctgggttccctaaaaagcagcagcctgtgctggagcaagatgggcatcagagtttatgcagacgagtgttcaaatcctgatggttgactttggattagccacttcatgggtccgagcctcagtttccccatctgtcaacagaaagtgataatagcagcaggcctggtgtgaggattagatgagcaggggctcttaatcagtcttttgcccgtggcacttctctctcagaggtctcgtctggctctgcggtgtgcaagtaggtggctggctggggaaacgagtgcattgatcgttaccatgcttccatcatggaaggtagcatgggctctggagggactcaggctttcgatgcttctaggagggtgagatggatgggcatgggcactgatcaagacccatcacccaggacgcagtcagggtaatgctgcaagcctgtctcccccacgtctccaaagctttgtgacgctgagcctcactttgctcacctgcacaaggggcttagtgagccctctcttttgtggggagactgtggtggtatgcagagtcctgcagcctcatgccaggcactggggagacatcagtgaaccagattggcctctgggccttgccttctgatgggtgccctagcatgaagtgtctcatacactttccaagatgcaaggggctttgagacatgtccaggccaccggcatgtaaacactggcttctcagagtgctatgtgcacctgagcagcgtctcttcaccgggctgagccatcaggcgagagaggtgctgggtcccttttgtctttgttggtccacattccagggacagttttacctgtagtatcgacgcctggcctcagtgcacatcgatctttcaggggtggccttgctagggagactcgggccgcctatttatgtttccatggaaagatttgctgcttttgccaaaaacatccaaatcctcatttcacattgaaggcatttcccaatgagaggctgcagatcactgtggcaggtttgtttaagaaagtgactaaatgtgatttcataaaaggcaaagctaatctccaaggcagctttgtcctcatccttccaccccctggcccccctgttttgttttttttttttttttttttttttccaggttgtgatactgcagcagcctacagtatctttattttatgtgtgacgaaagatattcttggcctttctgttcagcaacaggacgaatggatttcttcattctagaagaaatatgtaaaataatcccttagaagtctaaagagatatgtttgttcaaagcatttaaaatgttattttaatcaaaggcacaaaacagtctacatgctgtgtcagctgaagacgaccatcccattttaacagcacacatgcgcctgccttctagttcccattcctcctatttccctgcctacttgggcagcaacttttctttttttatttaataaaaaggaaagattaaagaagaaaacttcagtggctcaaatgtataaagtaatttaatatggtgggagcattaattattttagcttaattgaattccgaggactgcagtagttgcatttttgtagacaagccctgtttattatttctctgtgtagattaacagtaaaggaaacacagataactttcagttatttattgtaaaataaatgtgtcaattcatgtgtaaagcaagctgctcagagataattgagtctttatattttaagagggggactaggaatcacgggcacttctccgcccaggcttccggaaacccgtccagctgctgcccacgctcctggcccccgggccggctgtccctccaggcttctgcctcctggccggggctccaaggagtcctccaatccctccatgacctgctattgtccccagggcctcgctggccccggccagtagctggtgagcgggtggctgttaattcttggactctgcctctggctttggctgtccaggctcagaggagtccagggtgaggtgacctcgagggtcctggtggctgtgagggtcctgccttttccagggccagcaaccttcctgatacccaggcaggtccccgctcttccttgctaccaggtgcttctagaagtggggactccagaggcagacccgaagggggttcctcccacccttaagggagatcccagggtgagaactgcagggggattctgtcagtcatcacactaggtcggggaccccatatcagctgtttcctcgggatagtcattctggagagtaattactgttattttttatttttggtaaatgatagagaagtaggaaggtagagggaggaagtttctgaagctttgttttctggagggcattcattcattcattcagcaactgagcacctggggcccatcctccgccctgggtgtccccacctggatccccaggtaaacagcccccagaggagggagcgggcgtccaacatggggataatgggcagagtgtgagctggcagcagccctgctcttgacgtgtgcattctggatccagggctccactccctgctgagcattcgctgtggacggaggaggtccttggaaatttgtttcaggcctctctggggatggggcgaagctggtcagaggcagggtctttagctggtggtctgactcagggcagctatggtgcctctgatacatcgctgcctataggtttacattctttatgtttcttaaggttcctgcctgtggcattctccctgcctctgtgggagttcaggggagcacaggacccatcctttgggggagctgagaggtgttccaggttttgcaaagagcacgtggcgctgccaagccgttatctgggaggggtgttttgaggaggggtgaggagaaaggggctttcagggtgtttggggtttgaaggctgtctgttgctgtgtgggaaagaacacagcccgagtcagagccccaccctgctccctgccagcctccggcagccacttgaccttctgagccgcggtttcctcatctgtcattgtgacatttatgatgagtgcctggcacacggtgggggtaggtgtgctgcaaataggagcttttcctggcgctcggctttccctcctccgccgcattttcaggcgttagagcagcttgcaccggtcttcttggcaatgggctcctgtcagggttgggacaaaccgccactgggttgtgggactaaatccaccatcacaggcagtgtcagcatggagtagactctctcccgtccattctgccttttgttaggtgactgtcccttgaggatctctttgctggcggtgcactctgaggagccggcggggggtttcaggtgagggagcacaggctttggcatctcccgggtggaatcccagccccatcactcactgctggccacctgtgtgagtcacttcacttttcttggcctccgtttcctcgtctgcacctcctttttgggttatgctgaggatgaaatgaggaagcacccacctggcaccggttgggcctgaggcagatgatcaagaagtggatgcttctagaaagccaaacacaggaaagtgtggaccctgcttggcagcatgccgagtacgtgtttttcttggtcaaaaccatgatcacttacctgggatctctctcacggtgatttcctacaggttcctccatataattctcacttgatagtcactgaaggggaggcgcttgatcaccaggaatttggttttgcctgttttcagcccttccataaccaaatgaagctacagagggaggaattaactatcagctgtcactcataggcctgcctccgtaaccctccaagtcctgaatgtcagttttctggagaagtgcggagacaggcagcaggtgacaggaggtggcagatccctctgggcttggaggtggcaggcagccctggctgcgatgtccctgcccacttgatatgtcttcatccacaacctagggaggacgtgggatctacctgggagattctcttagcaggtggggcacagataagggtttggtttggggccccagtgacccattgctaagcaaaatgtgtgagagaaaaggacttctgacgagcccagggatttacgtgctgctttgggaatgttctctccagacttttaaaaataaataaaataaacgtgaaaaaaaatattagcttggctagtgagagaaactaaataacttgcttgtgctggaaactggagataaaccccactcgcaggttgccttaaaaaacttgcacttgatctatttagagttgttattttcccttcaaattaagatgcgttaaatccatgtgtgttgtggcatggattatctttttttattattaaatcatgacagctaattattagttctgtctgcaccgaggaatagtgcagtgttctgtctgagggacatggccctgggctcaggctggggtttgggtgttgggatggctgaacagggcagagtttgggctgggctggtgggtggtggggaagaggggcgctacctggtattcctcattgtgctagatgcttttcttgggttatctcacttaattcttcaaccttgaaatatatatttctaaccctactttgaactggggctcagagaggttaagggagttgctgaaggtcacacagcaaagcagagtcagactcagtcaggcctagtttccttggatagcaaggggtgtggaggattttggggatgggtattctaactctgtctgtctggctggtggggccttgatggcgggcaccacctctgaccccatccaaaatggtctttgaagcccatcccagatatgaccctgtggatacagccagaagtcctcagacccccagggaccatggccttcagtctgtggcttttgtatatactgtcctgtacttcctaatgagggcattggagagatgggtggtgacaaagaatgaagtacagtgtaaattcaggtgcacctgggccagaattttagattttttcccatatatatgattatttcttttattttatattcactgttgcatagacttttcccccataaatacaaattatttgttttattttgtggaattgtggttttgccagggtcttgctatgtgactgtcagccaactgtttgcctccccaggtctcggtacctataactggagataatgttccttgtgttttgggcttgttataaggtttgattcagacaaggtatacatagaacaggttcctgtgggttttagctgttgttgataatggagatcctgccggtgggatccagaggaagggtctggcttcctagcctcctggaaggaccttgctgccaactcttcccttctcacctgctcagtgacttgtctgaacttacataactagttactggcagagctgagtccagaccccaattatctcgagtcaggacaggtgactttttgccatcccagggtgcccacccctgtagcttgaggccatctcccctggtggagtcccagtttcctcagctgagaaagggggtgagcccttcctgtcccactggccttccagggaggcggtggacccacctgccatgtgaactgtgcaaaccagagtcaagagtgtgtgccgctaacatggtgacatcagcaccgattgtagttgaaagttttattggattaaaaaaaagagagacaatactggtcacataaatgggtgtttttttttttctcttaaggtttgaggccttatttattgttttatgtacgtagttccatacttccagcagtaattcaggaaacaggagagagagataaggtaagaaaaagagagaaaggcagctgggctcccaaggggtgaacttaaccaacattcagcctgagttaatattattattcttagtttgtctatttgacagtaaatagttagtattgactaaagtttttttaatcaggcatttgacagcttttttgagtggttgttgctcatttgcatgcttggctaatgaattaaccaccaggtctagaatctgttaggagtgggctctgctgataatctatagaaataaggctgactggctgtcaccctgtgcctttggggtcatcttttcactgaggaaacaaagagatggagtttttcctaatttcatgtaaaatttatttatttatttttgagacagagtctcgctgtcgcccaggctggagtgcaagggcgcgatctcagctcaccaaaacctctgcctcctaggttcaagagattctcctgctgggcacgggggctcacgcctgtaatctcaggactttgggaggccgaggcggggggatcatgaggtcaggtgatcgagaccatcctggctaacacggtgaaactccgtctcgactaaaaatacaaaaaattagctgggcatggtggcgggtgcctgtagtcccagctactcaggaggctgaggcaggagaatggtgtgaacccaggaggtggagcttgcagtgagccgagatcatgccactgtactccagcctgggcgacagaaggagattccatctcaaaaaaaaaaaaaaaaaaaagattctcctgtctcagcctcctgagtagttgggattacaggcgcctgcctggctaatttttgtagttttagtgagatggggttttgccatgttggccaggctggtctcaaactcctgtattcaggtgatccacccgcctcggcctcccaaactgttgggattacaggcacgagccaccgcacccagcctgatgttaaatttaactcatacttactagatcttactgtgtgccagacactattctaaagactctgcagatactaactggtgtaatcctccctatgaccttatgatatgctaatatcagccccactttatagaagaggaaactgaagcccagagatgttaagttatttacccaaggtcacacagcggtgagtagggtcccagggtgtcaactccggcagttatgttcttcactgtggtcataactgtgcctacattccctccacctctctgccccacgagggtggtaaatcaggtattcctttcattttgcagatgaggcaactgagtcatagagaggtaccttgcacagttgtccggtgagtcaccagctcagttgcgcctagagaccaggctcctgggagggagagcattaggaaaaatagctaatgcatgctgggcttaatacctaggcgatgggttggtaggtgcagcaaaccaccatggcacacgtttacccatgtaacaaacctgcacaccctgcacatgtaccccagaacttaaaattaaaattaaaataaaaaaagaggacaggctcctgacttcccagggaggccctgggtcttcactgtgtcatgtcccaggagcccaggcctcgtgggatcctgtgttcttgaactgtggctggtgcaggccctttctgctcctggctgggcaatgagtgatttccactctgaggtcgaatcttggtgatgggacttgggttccagagtggggtgaaagaaccaagacagtaggcacccacctgtcctgcacacatctgtggtttcatgttgactgcattttgggaggagctggcccccacctcgtcatgagttacaggcaagtggccctgttgagtccagagtggggagaggcaggcacagtggactctggctcgagacctaggatggcatcctactgtggctggcatgctgtgtgaccttgagcagacagatcttccccgtctctggggctgagcctgctgggctgaaatgtgagatggagccaccagtggtttctaacagctgcaagagccaggcagaaggtcgtgcatttcccacctcaattcctttcccacccagtagttcccccaactttcctcatttttcacattaatgaggcttaggagtcagttttctctgaagaaactggtggtgaaaatgaaaactgttagattgaaagcttaggtctttctgccccaggctgtgaagatccttatgggagaatttggtccactcaccgtgaggtaaacagttgaagctcagagccccttgtgtgaccaggccctgtccctaatgtccctgtgtggtttggcattcttttctttgtgatgagtgtaccctgaattgtataaacctcgggccctgcaagatctggacccaccctggcccagagcctgctgggggcggccagtgacctctgggcacacagggagtgggagcctcctcaggggagggtgtgatcaggacttgcaagcctcgagttggacccagggaagaagaggccttgctggagaaggcaaggcacccgaggcttcattttattttgtttttgagttttcttgacgccttcttgctggtccgctggttttggtctggagggccctggggtgtctcagaaaggaggagtctgtgctgagggttgggagaggagagcagggagggagggaggagggagcccttgatcagccacaggtctgggaaagcatctgcccctcgctgctcagacagctgggaaactgggaccacagcctcctctgggcggaaaaatagtaacaaaatagcctttttgttggaggtgaaaagtcagactcccccactcctggtgtggagaaaaggcagcagccaagggcagggtgagccccccagcccaggaccgcctgctctgtctctaagccaaggcaatgtttgatcagggctgttttccccccatcccctgccctgggggctgagtgcctgggcagcttccatggccttcaggttgcgggtgtggacacaacctcaaaggtgcaggcaaacaggtgcgtgggtcagcgtctgctgaagatgaatccagaggcacagagccctaggagctggtagccccagtgcctaggctgtgcctctagtgatatggcacagatgaagccatccgtccaatccacaagagtgtccagaaaacacgcgtctacctcctgatgactgcaggtgccaaaggcatcctggaaaggagtggagaaggtggctttatttcaaagcctttttcagggtagagcacacctcctggagagtgtagccagccaaccagggattccaggctcctcccttggggtttgagggcagagactggctgtcctgggctcagagagacaacaactgtctgaattcttctctgttcgggagaaaatgggacaaaccttcagtgactccctgccaccttcagcagctggctaaaaactgttggagttggtaaacccagcaaaactaagttttcctggggctggagcgggttcttttctcctcccacctcaagttcaaagccagccaattaagaaagctaaacagtgtggtcttctctctgcatcattggcttgtaaaactttccctgcaaactaggcgactttatttgttgggaaaacgaagtatataattttcctgacctggcctttgctttggggagaaggggaaagagagaaagaagtcatttccagaaacagacgggccccgaggagcaaaacaaggtccacactccagcgtcagggcagcgtagactgcagcgctgtggtctggaacgctgaaaacagcgtgttgcggggaggcgggacgcgaggctccaggctgcggagccctctggggcctgggtcactgtctgcgaggtggacatcgaagtcctcccaattctgctttcgaacctctgggcgccacctgcctccccgctactgcaattttccggtttccccgacgtttgcaacttgcaagtctcctctcacttccttccatctccagcagcccctcctcaagcttggcctcctcccctccccgcgacggtgcctatcccgagcaaatcatacccatcctctccgccgcccgcaagacagcctcccccgccctgcccgagggggacttcaggcccctccctccaagggctcaatggttggggtccatagcccccttcattgccacacaggagaacacaatggccttccccgaggccaggggcgcagagctccgcgggggcggctgcatctcccggaccccgcacccggcacggcgcggacactttggcaacttcaaaactgcgcgggggcctcccctgcgagcggtgcccctttcccggctggccctggccgggtcgggaggctcctcggcactgttcccaggcctgcgggcgcgcctggcccccgcctggccgccggcctctgattcgcccacggccttgcgcccatcgtccacctccttccctctctctttgacccgcgcccgctgcgcacgttgattgtgccttggtggggcgggagggccgagagggctcaaggtccatgcataattcgggggcttaatggagcagctgcctgagccgggcggcgaggggcgggcggaggcgcagctgacccagcccgcgtctggcctcgctgggaaggcgcgctcctttcttcctcccctgacactcccctcccccactcggcctgggtccgaggaaggcggggggtgggcgagtcgaagggctagctttgggaaggggtttccctcgtgcatccgtgcaacttttgctttggggggcggggggcatgcagtgaatcggagccgcctcgggaccggctcctgaaggtggtggaatgcaggcttcctcggagcactctgcagccctggagtcttttttcccggctcctttcccccccgcccccgtcggtccccagcccagcagcagcccagcgagcacgcctctggccccgggccagcccccttccctggcagccggcggagatggatggaggcggagacccaaggtcaagggcggggagcctgccggccccgggcccctttgtgcgcacggggccgcccctcctccaccagtcgcctcctctctggcccttgggcgctctcccgggtgggtgaccttctcgggcatggggaatgtggaagtggtcccctccccgaaaccgctgcgcgccggtcgggtcgcttcgccggggtggcattcgtcccgggtgctgggggcgcacggggatccctcttccgcccgccgccattgccctgatgagtggcgccgtcttcctcagcccaccttggcgggacagagcgggcggttcccgggatccaggtgaggccgggacggaaggagcctccgggagttcccttgtacaaaaatgtgatcatccaggggcaacagccccatctcaaagtggggatttcgtggggaccttagtttctttccgagtgggagaagagtaagcccgcttttctcaaggacaaaagtgttttcccaattgtgtgggaatggaaccctccactggagtgggacaccgaagctcctggaattacagggatttaatgtcagtcctcctttcagcctgacttctcttaggataacctcttccaacaagaatttgtatgcaaatcgtcaccttgctaggagtctctagttttgtgtgttaaaaattggcctccaattgtttaaagcacttcaacaggcccttaaaggcccagaaaagcagtggttggacgcccagcctgtccaccacaaagctcttaagaaaatgttcaaacattttcccaaagctgttactctggaaataaaactgtatactgttcgcctgtagccgattaaaagtttaccttcactgtgacagcttttccaggctaggattggacccacatctctattttccatttttcagaaataaatctaaaccaggcagaattgatttgctataacaagagtcaaggtagtattaaaaatatgcgtatacctatatacttataatatgaaacagtatgttacacttgctgggctctcaaggcgagtattgtgtaaacggcaccgtcatggcgttttgagtaagagttgattttaaaatctcagatttagctaacccgaactttgagcagccagcttttctggtagaggaatctgaaggcatttgtcaatttattttttgcaagccctccggaaaaggtaacaaattcaacacttgggagctcaaagctactgccagtcctggacaggaaggttttcatatctgtctgaacttgctcgctgatttctcagacgtccatttataacagtgggtctaacaagatagaatccgcctttgaatatctgtaaatacgggtaaagatcacagtccagcactcataatggtccaaaacgaactggcagattctcgtgtttgattaatatttatgttaccggattcctttacagaaagaaagatgaaacgctaattatgtgtgtgtgtgtttgacgggccccatcctaggtctctgcagttcatttaaagggatgtacattttaggatttttggagactaggggtgtgtgtgtgtgtgaggggggggtaattgttcatgttttgcttgaaagacaggtaacctgtggttggctgaagtattggctggtacactgagggagaggctgacttttcattttccttttctttattttgacggctcaacagtgatcagaattacgcgtgatttctccctgtatgtttgggctaaggcttggacagtgtggtggaaggctcttgttcaggatcttcctcgaggagaactggtagcccccagggtgctctggcgtctttgcagggcacactttctgcgcctgagtggcagggtaggctgccctgcagtgtgtgcttccgagccctgccatgtgtctgtagggcactttccttgctttttttttttaggagcaatgtgtgggagatttgcctggaaatggggggttctgtcagctggatcatgttgaaataccagtgcaattggtagccaaagggatcctggagaagcctccttcggaggtgctgtgttaagcatcttcaattttattgctttgagaagcctagatttttgtataggatttcctacaagggtgcttccagagtggcacctgagtcctgcttagaggttcaataatatttgttgttgctggagcgtcaggggccgtgtcgttgttaaagccgcagaatctagaggttggcatgtggtgtcggatagtctcgaatgcattgacttcctaaacagcccagggcaaaccagttcatctgttagttgcttcatctataaaatggggctagccaattgtttacttccctgtccctgtccagatatgaaaacaaacccataggtaggagtgaagcaattgctgatttcaaagacatcataaaaatggagaactgttattgttcagtccgtgggggcagggtgactaatttgcaaaagggaaaggaatcaaatagccgcttctagagggtgtaattttttactgcaaggaagaagaattaggggctttgggaggaggtttatgtggggaggggggcacttggtttttcaatttagtaacctgataccaataggaaactcccccacttccccattcattttagaggagtgttcccccaccccagctccttgttattgttgggactgtcacatgattcagaatcttgatactgaatagtgtcactgctgctcttgacctgaataccctagaaaaggtattttttcctgatatttggtctcaggccccagaaggagaggagctggacaggggacatgtagacttggattagggaggaatgcatacagcaagcagtctttaaatgcacaggcttgctaggtgccggtgaggaaggaactcaaagcggaccagtgaggaaattctcaccgcctctcagagctaacaaaaattggcacttatccccatggagcacacagctgtctgctatgaaatggtaccttcactagggaagccagagggcctaagtgtcctattggggctccattttactttttggttgttgcttttctttggaagtgtcttgatttcttttttccagcaaaagctggattacttgaattagatttttcataaaataacctctggcagggtccaaaacctctggattagtcttgttagttaggaaatacagaagctttctttatgtatttggtttgttcaccctggctgggccaagactttgggctggagttgtggggtaggggtgggagagtgtggtcctctcctttccccatgggggccttgacccagcccctgttcactggcattggggctggagtggggaacggcagatacctggagtctgcgatggtgcaggcttggagccaggagctgtctggtgcttcttaattgaatacagatctaagtaaattccacgtgggcatgcaaggctgggcaaggaaggccgtgatattcccctctccacggctggactcgtaaccctcccaacctgacgggcctctccgcctgtcgctgtacccagcccacatggtttgcgagaaaaggtagggaagcagggggacaagatcatgcaacgcccatgtaaatattgtctgtatgaactgggtcttccatcttttgttagtggcagctcgttaattaaccagcagattagtgctgccttcttttgacacatgcatgtattttggggtagaggattcttgttctcctaaaactctgaaccgaaccgctcagaaagtcttccttcagcgccgcctgcccctgctccctctccctgatgtcctccccactccccttttcctgtccccttctacccaccctttccttaaacccaagtgggcttgtagtcgagtggaggacagacacgttaaacacagctaaataaatcatgtttacgcttggcgtcttcggtagtgaaaaatctgttggctgtttttacttccttatttctcagcatttgcttcctacctgcttttgaccacatgcccagaaatagtagttttgtcaaatgaggggataatgccagccagcctttctcgctgccaaggaagctgctggattttgcaaaacagagtgacgttttttttagtgacactgatgtttttttcaaagaaattaggatgtagaataagggtattaaaatgcacttagggaagggggaaaaaagcgacatcgtcccccctacagcacagggacacgtagcaagcaggtttagagaagaaaggtctcatttttgtttgcacttggccgctccaagggcaggaggcagctgtcagaggcggaggagctgagtcaggttcccttcgtctcagccccaagacttaatttttctgccattttggtgatgtggtgcgaagatttttttttttctttttcttttgggttttgtgtctgtttagtctctgaggcctcctgagcgatgcttgctgctttcttcctctgagattacagctagattctcgccccgatctggaattggagctcgttgggatcctggctacactatgattgtttatgtgtaagagtggccccggaggcctccccgcctctgggctcttatctacaatgttgttttggggtatatttcatgatggggtgctgggcagagaacttcctgggtaattacagccaaacagaggctgtagatttaaaaaaaataataaaaaaacagtttcaaaaccaagtaagtggcatataaatactgggcactcctgtagggagaagaggcttgtcttatcgcgggatctttgcagggtttctgcagtcaattctgtctgaggtccagcacatcagctctgtttcaaagacagctgaggaaaaaaaaaaattacaacaaaatcaaagtcagcgtgctatgatttcccccaatttctaatgggaatagtctgcaatagaaatgatatttccattgaggactgcgctgccggtttctttaattacattaaatagcggtataaacctcagctgaatgtaaacctctgttacagcggcgtctcgcgcgtggctagatgaatcgtaaggagcaatattcctagcgttaatgtgctaacaatctttattaaattagtcccgcgaagtgttaatttttacacattttgttgtgcacgcactgcacgtcaccgctagtgtgttaggagatgaaaacggatttcacgtcaaaaaataagtaagaaggtggctgtcagacagctcccttagaagaaaatttgtgatttttgccatcaaatgttacctgtgctgaaaagaaggcttacgatatgtatattaaatgccatctacatacagaaaactcagttaaaggaactactttgttgaaagtaattacaggcctgttcaattttttagtcagtgacatttcagacttggcttaggaacataaagaggccatagaaaagattttgttcttatgtaatgcaaagcactgaacctcggtcttctataagtccattaggaaaaggaaaaaaaatgaaagggagaaaagagatttagtcataaacaaaatccaggggagagctgtattttttttattacaatagtagaaatcaattgcctataattctatcaaatgcaacccaaaacaaaatgtgcatttaaactatagcagggtcctcctttttacaatttgatttcttttctctctcttcctttctttctttccttttttctttctttttaaccttctactaaccaaatttatttctgttccatctgaaacaagaaaccctgctggccctgtggttgtctgttcccttatggctcaggtagagttttatggtctgatcttaaaaaggttgatgatgcttacattcctcatatccatgactccatctgcacctgaaatttctgttcccttttctggctgcttcgggcttgagtcatcccaataacctccttgctgggcactccgttttctttatgttctttttattggctgtgctgtttattttcattcttaattctccgggattctcgcagctcagccttcctccttctgtttattccattgcactgtctgtacatggccgttgagcaaaagccagcattggagttcatgggaccttggaaccacaacttcctgaactccccagtttgtaaacatgttttagggagggccagattcttaacacgtgtcaggattcagtgttttccgggtcattcctcaaaggtcaggcacagtggatgctgaggggatagaaaaaggtgtccttagtttaaaactcactgtaggcacccaatctgaagatgagtttcctggtttttgccttgtgtgacatgtgagttctatcttaactgtgtatttccactcccacccccagctctaaattaatgaagaaataggaacatatctgagggatgcctggccaagcttgtcattggagtctggcccctaagttccatctgggaaagggctacagggtcccaacccgaagtcccacattctttatgcttggtatccagatgatttatctaacactttacttcggtttgcagcctgccttcactcttcgttgagttattcttcatgcagatgacatgtagtatactgtttgtggctctggacgcaactggagagaaaattactgaaggatcttgaattaaattgtcttagaaaacagagactgctgaaggttgaagcagctaccacacctctgatcagaaaacctaaattgagaggaaaaggggcaattcctccattaggtattgactggctgattttgctggtgagatttggagaatctctcagttgcaatttgtccttgccctctgtggactctggttggatgcgcgcaagacatcttaacatgtccacgttgctgatagatgagtgtttgtgtgtgtatgtgcatatgcatatgtatatgtatatagaacctctcttatagataatagaagtgcatgcacacatttttctaaccagtgcgacacatggcttcaccttctgttgtcctcaggcctgcccattccaggatggtgggccccaatttggtggaccctgcctgcctgaggtcacccagaggagttatattcatttttgtatctgtgtcctgaagccgtgatgcctaggagcaaaggaatgatcagcgtcccggctggaggacaagtgtttgtggtttatttgcatttcagtagttcggaacactgcaggattttccccgagagacaagcaaaagaagagtccaagctgcgtgtccctcactgcgcccccctaccccctgcaaatgcccacttaggggctggaacggccagccccctccacctccgtggttcacagaagatggctgagggatgcccttcctccccatcaacattgaagtgtcctctgctccctcacaggggccttggtgttggaatttgtgatgtaacttcaccagtccttgggtcagggtgcagaaaggggatcagcagccctggagtatttcagctgcctgcatcttgaggaaattggagttggcagtcaatgaaacaggtgcttttggacctggggaaggggtgtgcccaagcgtgcctgcctctaaattgcaagaggcagctgctggggaggatgttccctttccaatctctggtggaaggaggagaaaggttttggtagtgtcggtgggggacgcgatcattccttggctctgcctctccattttctgggatgagatttcggaagtgctccaagaggaggagcttagagtagggcagcctggctcagggtgctccctgaggtgtgcttctagtctccctcacggccaagccttctcacggtgggtgcaggtggataccctggtggccacacagggtcgtgggtggcctgtggggaatctctggatggccgtttgtggaagtgatggtagaagtggtctcaacccaaagatgagcagttgcccatgttcctggaggcccctggtgaacccacctcacttcctgcagcctggcactcctcagtgaccctctctggatccattagggcctagatggttgatgaaggatgctggacaggctctttcacctgcatttgaattcttaccctcctcagccacctgcaaggactgctgtctttcagctagccgcccacatagaggccaaacgtagattcgaactgtttttatgtctcccgtgtaatgaccccgaaggaactctttaaacacagctgtgcaaacccttgtgagacctgactttcccttttcgttgctcttctttccaaggacacctacatgttcacccccaagccaaaacccgtggcaacaagggactagagacccgtaatggccatcgggtgcccagacaaaacagtggtgtctgatggagaatgagaatccaggagtgggaggtggggcctggggagctccatcgccctgcctggcatttctaggtcccccagatgctctggggcagtgagctgagccacgtggcacacccactccctctctggtcctgccttggggacccaccctagacttgcagcttttcatggtaacctgcgtgttcacttaaatgctttgctttccctttctgctttatgatgatgattgttggtatatattttacaatgaaatggaaaacaagttccagtcattgctggttcctagaccttggtaattaaaagctaaaaaaaaaaaaaaagaaaaaaaaagaaatgaaataatacctgtggagtgaaggaatttattttttgagtcaccctcaaccccaaagacctgtgtagctctgaaattgagcaaacgaagaagtctccctagaattgttcttctctattcctgctgtctcagccactccccctctacaccccccacagccccccaaaaaaagggattgagagaaagacaaatgatgagagaaggccagtcttgtcaggtgaacacccagttcctgtctcatttaaggttgcactccacttctttcaaataggaaattgccaaaatggatgtcatgggctgctaattagatgtattttaactgcaggatcattttaccagctaatactgttattatgtgcttcaatgtgaacccatggtggagctgttaaaatatgagcgtgcagtcttagcagacagctcttggagccgttgggatgggtggagggcgcttttcctcacggccctgaagatccccgggccaggccctgtgctgaagatcagagccctttcagcttctcaagaggtgccccctgctctcctaaagaccatcttctccttgtgtttagaccagggcctgagcctccaggaggcctgagctctccagcgtcacatcccctgccctctagacatcagggttccctctggaccagcctagaagtgccagatgaccacagttcatgcctgtgcctacccagaacaggcaggcctgaatctcacacactggagtttcaagtctgtgctggcttctcctccatcttccctctgtagcaaaccggaaaaagaatcctaatttcccgttggggtgggaggagatgagctaggatcaggataatgatttttaaatgtgagccaggcatttgacttcacgttatttcttttccccctcacgctcttaatacttagcattttttttctatcatccttaagacaaagtagctggcaaaatatttaagtgatcagaaaaaaatatttttatttgcccgcgtgcgaattgggttatctgcctatcttgtttatgaaatttggcgctgcctttcctgcacagtacgttcgcctctcaaatctttcccggctcccatttccatatttctgcgtgcttgttctttgttaatcacttggcaagcgcttatttgaatattaaaaatttctttaatcatcaaaggcaggagcacagtctcatgaatattcatatttttccccctcctcagactggattctagttcattaccctgcagtaaaagccaaacagccatcaatcgccctcattacaggctctggcgttttgattggctgcctgctgcccagagctttttttaatttttttaattttttcccccttctcctatgagctgtcttgtacctgccaacaaccaaaaaaaagaaaaaaaaatcaacaatgcaagaataaatttctctggttggaaaacaactttgcaaacttgtcaaacagtccttgtggcttgctgctgccaccgctgtagcgtccaccagcgccacctccttccccccgctgtccttcccccaccaaaaaaagaaaaaagaaaaaaaaaagaagcccaagataaaagagaggggggagagaaaaataaataaataaataaataaaaagggagaaacttgagcctcagagatgaatatttgtcaagagagttgacgtaagtttcatttgcataatgactttgtacttctgcattaataaaatttgcatatgaagccatgttaattactcctgatcatgctttttgcattcatgcatagtaattttctccgacttgtgagaattaatgtcttggcatggggggagggggcgcggggactgtcaggttcccttgccagtgtccctcactcacacgcgctgcctccctggctgtctccttccttgatctatgactcatttctgcactatcagtaggagttctcagcttaaaaaaatgtatcaattgaaaggcaccagtagggagaaaaatactcgtctcctgcacagtgtattccagaccacctctctccagctctgaacatggaatctgtaatcctcccatttgggaggggacgccccagaggcttcaggggtggggaaggctcgaattccccctgaaaccgggatggggcttttccaggcgtttttgtgtctccacgctcctcggcggtgggcgtgttcgctgggtgagtgcgcatgtgtgaggaacggagcaggagcctctgcaaagtccctctagaagagagacgggtgacagacccctgtggaatgcttaaacccatgaaggcatcaagaatgagcttatctagcattgccctgttttggagcctaagaagaggcattttaggggccttatttttagactttttttttttttttttttttttttgtgcatagacctccaaagccagcgtttttttgggagtgtcttgcaggtctttgcagggcgctttgctatgctcagagaacatcctcttgctttcttcgctgggcagcgatgatgccttggaaaggaccatagggagtggggaaagtttcagaatggaaagcaagagaatgatagtgaccgtttggtgagtttcctggatctccggctctggctcagggctgacctgacccttcctttaaagttgagggagctgaggctctgagaaagtgactcaccttcagtcacgaggccaggagacagccgaggaggaatttgaatccagtcctctcggtcctcaaggctgtgcggcctgggagctctggtggcttcctctgtgcgtgtgtgggtgcataccctgtcccacatctcaagcgctccttaagtgctttctggatttcccagcttcacttttaaaggcaaatacccctcctctgaggaaggatgggggctgggaggtagcctgggacaggtactgaggctgttttttcaagttgaggtaagagtcacatgatgtacaattgaccattttaaagtgtacaatcagtggttttggatctattcacaatgtcgtgcagccgtcactcctgtctaagtcccgagcattttcatcaccccccgaagaaactctgtgcccattagccacccctcacacccctactggctccccccagcccctggcaactgctactttctgtgtccgtggatttgcctcttatgaacatttcgtatccatggagtcatgccgtaggtggctcctttcatcactttgggcttttgcagtagcttcagatttcttgagttccacccttgggaagggctctgggtttgagctgccccgtgtggaaacctctcccagtgtagaaggtgctctgggagccccagagaggccctgtagagcttgggatttgaagcccctctcccggctgcccccctcccctgcctcagttgagccggtccctggagcaggtggacttcagcaaggtcacaattgctaatgagactctggggaaacctgtccagggcggcctaccccctgacccctatgcagggaacaacgtgtggtgtgtgacatcgcctttacagaccctggtctgagccccaccttggacgtttccaggagaagggtgtggccagatgcctgttttctacctgctctgcaacggttcctcccaccacggagacagagtcagcttcttagcacctgggacaacccttaccaggcctcgagctgcttctgctggtttctcagtagtgataaatggtgctggctgtgtcgtggcctcacccagaacccaggaaccagagcctgggtttggcctttgcagcttccaatggctggattgagcccagggatctcagacttccgcccactatgtggccgttgctctagagatcccaggacccctggtcacttacccagctgcagccctagagggaagcagagcattgcgggcttcggggacacaactgggttccagtctcagatctccctaagcctcagttttcccccagtggaatgtggatcttttctgagcgaggtggctgtcatgatgatggatgacccagagccctcggtggtctgcagggaaggcctacatagggatttgagaccaccagtggacaggatcaaatgcagtgtccagtgctggaaggttcaggctagggcaggcttccaggaggaggcaggtcctgaccttccttgagggatggcactaaatctagcatggccttcccctcagcatctgaggctgaaactgtttactggttcctcagccacatccttccagggctatccccagctcagaaataccctgggcccgaggcctcacctagtatgaggtctttgttggttcagggggttccgagcagtgttggtgttagctttgacctcttgacaggacactgacagcttgcaatccctaagcagggggtcttcttaaatgccctgatgccttgatcctggataacccatgttttagagaaaccagggctacagagaaagagccctggttctggggccagacagctggggtttggatggggctgctgatgtctgcagttttctgcagtcacgccatcagtttcctggtctgtgcaatgggtattctaagccccagttcccgtcagtgtgttaggaagttcagtccaatgaagactgacaggctcctggctcctggtggcttgcagggtcctgtggctctccttgcgatgggggaatccacttgggggccctggagtgggcagactcccacccgtgcagacctgtgctgggcctccctggcaaagccggctgggcccagctgcccatcctcttgttgacgtttcctttttgtctctctgatgcttccctgctcaattatttacccagggaatttgggcttcttcacttgtggttttggcaagggcttcacacaaatgttttgccctggtggtctcttagccatttaagataaacggctaaatcaaatgcaggccttgctgtggagctgagcgagctgtggggctgggcagaggcggggccggccctggccctgtgtccttgctgtcacatggcgggaggcctcccaagccaggccgagacgttaggagggggtgagcagcgccagggttttcttggggtgtggtaggggggtgtgaaagccttctgaagggcattgcgttttgggtgcagcacgctcagtgcttggggctggagagagcccccagctggtggtctgccagacaggaggctaacagagcccagacacctggaggcggacccaaggctggaggcggacccaaggtgtcccgggcctgtaggaacagcccatcctgatacagcaaacaggggaggctgtgagcttcccagctcttccagggaggggtagcccgaagttttggaaacaaatccccaaatggaacctatttgattgctccagaggcccccacgtggggggtccttcctgagagtgggtcctcacagcccccgttcacccagccccctgcaccaggcccccagaggcggggtcctgcctccccgacagcccagcctggcagctgtggaaaccgggccctccccagtgccccctgcccacctccccgagcccattccctcgcctgtgtcccgattgccttccctgcagggcctggcaccccgggggcctcccacccccgaagggtggcctgagcagagccccacgccccgagccccgtcccaccccgtgcccctcacacagtccagggcccgactgaccagtcttttctattgttttttctccagggccgtgcaggcctgcccagctgccagcggtggcccccatagctgcctcctcccaccctcactcatccgtgatcacttcacctctgcgtgccctgggcgctctcccgccctgcctccccctgccgtgctgcagcgcgcgcccggtctcgggtgacgggactcagggtgagggtcagacggaggctccctttggatgccagtgtcagttgtcaggtaacagacgacgccgcggtggggggcgggcccccgggatggcggggtgtgccatgggcagcgctggagcaaggtggggacccagggaggaagggcagctcccacccagaaggctttttggggtgccaggggaagtggtaaagaatgttcgctgaactatgagccagggcccggtgcccctcggtcaggagtcccccacggtgcccccacccgttctgagagtcttgctcccagaatgcattccccagcctcccaatcccgcttctttgggttgtttagcgacagcttaattggataacacttaacatctgaggttttcttcggcccttgccactgccaccccctcccccaccccagacaatcccctgccccgccaagaccaggctaggggaagattccttggttgactgtgtacattgctggagccgtccaaaatgctgagtttctctttgggagaatgtgttgcccattagctttgaaaaagaaaaaaagtggctcaaaaggagcctcttaaaaagctgtggccacgagagggagtgaaacactgtgaggtgtgtgaggggtgggggcgggggctgagtacctgctgtgcgtccggctctgggccagacccagacacagctgtttgtgccgactcatcctgctctcccgggcgggcggtgtggctgcccattctacagatgggcagatgggccggtgtggtgacacaaactggcctctacctgccctgcttctccccaagtggaacccaagatcttattctgcctagggtctctgggaatccttggggtccttgggaattcaagggcaaagggccctctcacaagtctgtccccccggcatctcggcagggcctggcgtgaaagcactgtggccacgcaaaccaggatgctgacacagacacatgtggtgagcagccgtggcctggtttctgtggcaggggcaggaaaggagaaggggggtgcagagctggggcagatttgattggtccctgctttgtcaccaggcatgttgcaggctttctctcgacttgaattgtgaaaggaaaactatttttattgggcaggttgtgtttttaattgaagctgtccccacaggcggtccctgatggagccacagctctgcaaaagccatggccacagctctgtaaaaggccacaggcagcccctgctccagggtccagagcttcctgggctccagagctccctagtagggtggcctggagctttagtgtaccctccctgctgtgacaggtggtgacatcataggatctggcttccaaaagggagttctggtttcttactggacttgtgccttaaaggcacaaagcaaaacccaaaatctcctgggaaggagtcggaaccacttgcaaagacgccggctcccttttctgggctgtgctggtccccaggtgctcaggcctcctgtcctggttcagtagatctgttctgtgagtctgtggaaggccctgcttgctgagcagggggtgcctgctctgtctgggtggttgccttgctctcgtggcttcctgtcattagcgctgcagcctcggcaaccactgggggggccatgctatcaaagatcagcctgagtgtttattactggacgcggtcaagttccgtggcacagaaatctgatctcaccagaggctcacccagggctttgcttaaccctctgttggccctacttagaagttgctgaagtagatgagactcagctagaggactgagccgctccctcatgtggccaggcctgcttagcatctttgtatggtgctgaccaggagctgttaccatccccattttgcagatggagaagcaagggcttggggagggagagtggctagccagggtggcagaactgggatttgtccttggttgcctcctgaaaggccacccctcttcctgtggagccacgctgcctctgccgacatccacgggaggtcgaatgagctttccactgccttggctctggggggctctgccatcagcaagtcctcatacatgccactaggatccttatgaggactgtgtatggagggcctgctatgtgctgcattgtgctgggcatgtgtgccttcttgaatttaaccctcacagcaaccctaatactttattctcctcactttgcagatgagaaaatgatgttcagagatgttgagttctcacagctcacgtctatccgtccgtccatccatccatccatccatccatccatccatccatgtatccatccatccatccatctatccatccatccatccatccatccatccatccatccatccatccatccattcatccatgtagccatccatccatccatgcatccatccatgcatccatccatccacccatccgttcatccatccatccatccatccatttattcattctttagcttgaagccatttggaaggcacctagcttgtagcactgtgcacacacaggaagagtcggcaggcaggtccctgccctcgtgcagcttgcagtctggtggtggggaggacagggagtggggacctgcagaaggggaaggaggagcagggagggagggagtggtggaggtgggatttgatcccaggctctccatccagcacctgccacatctttggctttggctcttcttctggcattaaaggcctttttagattttaggccttgagagctgccaggactcagagcctgtgagcaaccagtgcttgattgcagtgctctgggagggacgtgaggaagggcagtgtcctgttcctggggctgggactgcaggaggctgagcccctaggactgctccaggagacccttctaaggggcctgctcttacctcctgccctctgccaccatgtctggtacagttctcttttttcattcggtcccagttcattggccctcaccagcttgcaccaccatgtttcccgatcaatttgaatacctgaaactatcctattctggtgttttttgtccctttgtgatttgtgtccctggcactgggctgtttgcttaagtgtttttagtgcctgtttaattagtagttggaatggagtcattaagttcccagtaacccgttaggaagaagcaggcctttgtaaagatggaatgggcctgctgtccttacctggttttgtcccttttcggatcaggatgcattgaacccatctcttcaagttaacatggagaaccccagtgtaaacgtgtttcacacaggttaattgcgtgcctgttaccgcatctgcagttatttatagaaggatgtgattttacggggggagaaaaccacacaggtatgtgtgtttgtgcacaccctgggctggcagcatcccagggggccctgcctcccgggaccccaaccctagacctctttccaatggtcgcagtggggagaagggactcgggggtcctgactctttttgactctgctgaaggaaggtggggctttgagtctaggcgttcctgggaactgaaatttcttccctgagaaatttcacatagaggatttggcacagtggctgtggggtcaagagcctcagactgtgttcctggtctgtgcttcagctggccaggggccctaaagaagtcattgcctcagtttccccttctgtaaaaatacacgtatgtatgtatatgtgtatgtatgcaacatttgaaaacgaggctcgtgttattttctgagacaggtcagtgtggagctgctgtgggtggagtgagcatggggctagctaggtttccagggcagggcgtgggacattcagagaatggtttggacactcctgggctttgtgccccgcatgccagaatccttccctgttctgaggcttccatgattggaaagcggtggtcaagtgtatgagactgcttgggggtgaaggctgttctgccccatgtagtcatttcccctctccatccctcagtttccccatctataaaatggagctaaggataggacaggctctgaagggtcgttctggggatcgtgtgagatcatacgggccaggtgctgagaacaacaccatgtgctgagtgagccctgtcgaagttagagtccatgcacgagcggaatgggattcacgacattgagactctgtcaggtctcacttcaagctggatcttcgctttccattcttaaaagtatttagccttttggctggctcagatcatgtaccagctttgggaggtggaataggaactgagacacttcattgcatatttaaaagctgcaaatggtcatcagccacagtgattaatatgtgtacttggtgaagttcaaggtctcacacaagaacacacaggatcccagctcagggaagtggaagtgtttggctttaatagagggagtcagttgcagtcattagtatatgctgaaatcacagggcaatcttgtaaagttaaattcaatttacttttctactgaaattgtgcttgctgtgttatttaactagtctggggtttcttggcatgggttaaagggacaataaagataaaagaatacctgtaagtaaatagtagggtttaaccatagaatctatccttttctcctccttcaattatatcccagtgttcattttgtgttggttttataaccagagccgtccaatggggcgccgtggattagaccacgctagctgtggaagcctgatgcaattaatgcagtctgcctggaaagtggccttatttctggaagttttgtgttaatgatatggtctgtgctttgcacatttcataccaaacaagaagcaagctgtagtttcattctggactgggttcgattaacaccggaggatccatgggaagccaaacggtgatacggacagagatggtagcctcaccaggcccctgctgatgcgtcgccttgattctggtgcagggggtgccagagacactccaggagggtgttagatcggccactgagactggagggaggggtgagtatgggggtgaagacaaaaaaagaaccgtgtgagtgagcgtgtgtggacagcagagctccgtcgtgggaaggttggaaaacatgctcatgggattccctttgcaaagtaacgtttgttgttaggatccttctgggctaaccagacaggtcctagtgttgatgggggctggctccatgtaggaaaagggctttcaggggagttattaaaaatttagagagtcatctgtatgccttgcaatgtctacatcgcccaagggccggtggtcccagcatctgcaacccagtcttcacagtgctgttgctcttcctggcgtgcaagcgctgttgattccaccctagcacctgcctgcttcttgaggtcacgctgctgcagaggctgtccatgcccgactgccttgagaacccagacgcctctttctgtgaccggaggaagtgccaggagaggccatggagagctgcaggccccccagttgggggaagccccccagttggggcacctaccagcatgactgtccttagataaaagaggccccagcaaatccctgagtggagatcgctgcagcctcgccagattccatttcactctctgagttggcccttcagacgttctgaaggcagagctaaatcaaagaattctgttcaaatccatacaagatgttgctgtttttctgctctgacaggagaggcatttggaagtgcagtttctttctttctttctttttttccctttttttttaatagctgtcttaaaaaggagtttggctgtttagcacagctggtgctcattacattatgcactggcaataagatagcatgtgtaattaatttttaatgcagtgctggatgcagcgctttcaagcagttagtggatgtgaagaagcagcactggccaaggacatcagagacctcagagcaaggcagccccgttctcctttaaagggactcggaaagtggcagaggaggcttgcattgccctctgtgtggagcggactggcccagaaatgggttcttctcgggtgacctgaggtcaagtcagtctataacaatctaagaccagggatcccaagagatcatctcctccaacctcttcattatataaatggggaaaccaaggcagagagtggggatgaagccatgacacatgggtggcagagctgactcatacctgggtctgcccactaggccatactacctctcttgagtttttattgaaaaccagaaaaggaagttcgtcgcccagtggaagccacttaaagattgatttctgcctgaccatgaggcttggtgtgaaccctgcaatgagattggtagcaggtagagctctgatgttgaggagccccacgttgggtgccttggacttcagctctgctatctgcagtgggagcccaccagacacatcctgggtttgagactctggggttgtgctttgacagctggctgccctgtccctgtggggctctgtggcatggatgtgtgtttgaagttaaatgtcattgtggacccgtgttagactgcaggcattgtgggaagctctagagatggggccatcctcggtccttcccttgcagtgaatgggagtgagtatgtgatcccaggctagccacttacttcctctctccaatcttcagtgtccccacctgtaaaatggggacactgaagtacttgcttaccatccctctactggcaggtcccatgaacagctaccatctgggcgtggccacagcccatgaccagcacctgggggaatcagagggaaaaggccggtgggaagggaaggagggagaaagctgagatgccggaaagccttttgagactctggccttgggtaatcggcaccccagtgacgacttagctcttggaaagccacttgcctgggagagtttcttagtgtgaatgaaggcagaggaagggccaacatcatcagtgttcctggggcttgccactgtttgctaaagggccggctcagtcctaggcatgacatctcatcgttgtaacgctcccaagaagaggcactcccccacccttttgcttatgaggatattggggctcagagaggccacacaacccaccaggggtcacacagcacacaaatagcagaacttggacagagagtctcaaaacagagattcagactcaggtctggccagcctcccagctgtacttggagctctcccgtctggcttcccactgggctgtagtggacaacagagaaggagctgctggtagaaaaccaaatcaaactctgatatggtacctgggagggtcctgaaggtcttccttcatgcactggtcatccttgtgccagaccctgggctggactgagggatccggaaatgggcatgacggggtccttgccctagaggaactcaccgtggtgggggtgcccatggagggccttctcactcagtggatgtgaaatgcatgtccccatggcgcctttctctgtttgaaaaaaatgaatcaattggctgctgctcgggtgctccctcacttattgccatggtgcagctcaagagcagatctcaggatggagaggtgtcccacctgaggacagcttgtccttgtggtcgcattgctgagaggtggggggtaccttctgtgaggatttttacctgaatgaagcacaagtggtgcctgactgcattggaatccacgtgattattggcgtgtttttgactctcattttatccagtggtgcat

SEQ ID NO: 35 - DNA, 7603 bp, Homo sapiens
ttttcttgcttttcttcccttttttttctttttgcaaacaaaacaaaaaacagcatagaagaaagagcaaaataaagaagaagaagaggaggaagagagggaaagagaggaagggaaaaaaaacaccaacccgggcagaggaggaggtgcggcggcggcggcggcggcggcagcggcggcagcggcgcggcggcggctcggaccccctcccccggctccccccatcagtgcagctctccgggcgatgccagaatagatgccggggcaatgtcccgccgcaaacagggcaacccgcagcacttgtcccagagggagctcatcaccccagaggctgaccatgtggaggccgccatcctcgaagaagacgagggtctggagatagaggagccaagtggcctggggctgatggtgggtggccccgaccctgacctgctcacctgtggccagtgtcaaatgaacttccccttgggggacatcctggtttttatagagcacaaaaggaagcagtgtggcggcagcttgggtgcctgctatgacaaggccctggacaaggacagcccgccaccctcctcacgctccgagctcaggaaagtgtccgagccggtggagatcgggatccaagtcacccccgacgaagatgaccacctgctctcacccacgaaaggcatctgtcccaagcaggagaacattgcaggtaaagatgagccttccagctacatttgcacaacatgcaagcagcccttcaacagcgcgtggttcctgctgcagcacgcgcagaacacgcacggcttccgcatctacctggagcccgggccggccagcagctcgctcacgccgcggctcaccatcccgccgccgctcgggccggaggccgtggcgcagtccccgctcatgaatttcctgggcgacagcaaccccttcaacctgctgcgcatgacgggccccatcctgcgggaccacccgggcttcggcgagggccgcctgccgggcacgccgcctctcttcagtcccccgccgcgccaccacctggacccgcaccgcctcagtgccgaggagatggggctcgtcgcccagcaccccagtgccttcgaccgagtcatgcgcctgaaccccatggccatcgactcgcccgccatggacttctcgcggcggctccgcgagctggcgggcaacagctccacgccgccgcccgtgtccccgggccgcggcaaccctatgcaccggctcctgaaccccttccagcccagccccaagtccccgttcctgagcacgccgccgctgccgcccatgccccctggcggcacgccgcccccgcagccgccagccaagagcaagtcgtgcgagttctgcggcaagaccttcaagttccagagcaatctcatcgtgcaccggcgcagtcacacgggcgagaagccctacaagtgccagctgtgcgaccacgcgtgctcgcaggccagcaagctcaagcgccacatgaagacgcacatgcacaaggccggctcgctggccggccgctccgacgacgggctctcggccgccagctcccccgagcccggcaccagcgagctggcgggcgagggcctcaaggcggccgacggtgacttccgccaccacgagagcgacccgtcgctgggccacgagccggaggaggaggacgaggaggaggaggaggaggaggaggagctgctactggagaacgagagccggcccgagtcgagcttcagcatggactcggagctgagccgcaaccgcgagaacggcggtggtggggtgcccggggtcccgggcgcggggggcggcgcggccaaggcgctggctgacgagaaggcgctggtgctgggcaaggtcatggagaacgtgggcctaggcgcactgccgcagtacggcgagctcctggccgacaagcagaagcgcggcgccttcctgaagcgtgcggcgggcggcggggacgcgggcgacgacgacgacgcgggcggctgcggggacgcgggcgcgggcggcgcggtcaacgggcgcgggggcggcttcgcgccaggcaccgagcccttccccgggctcttcccgcgcaagcccgcgccgctgcccagccccgggctcaacagcgccgccaagcgcatcaaggtggagaaggacctggagctgccgcccgccgcgctcatcccgtccgagaacgtgtactcgcagtggctggtgggctacgcggcgtcgcggcacttcatgaaggaccccttcctgggcttcacggacgcacgacagtcgcccttcgccacgtcgtccgagcactcgtccgagaacggcagcctgcgcttctccacgccgcccggggacctgctggacggcggcctctcgggccgcagcggcacggccagcggaggcagcaccccgcacctgggcggcccgggccccgggcggcccagctccaaggagggccgccgcagcgacacgtgcgagtactgcggcaaggtgttcaagaactgcagcaacttgacggtgcaccggcggagccacaccggcgagcggccttacaagtgcgagctgtgcaactacgcgtgcgcgcagagcagcaagctcacgcgccacatgaagacgcacgggcagatcggcaaggaggtgtaccgctgcgacatctgccagatgcccttcagcgtctacagcaccctggagaaacacatgaaaaagtggcacggcgagcacttgctgactaacgacgtcaaaatcgagcaggccgagaggagctaagcgcgcgggccccggcgccccgcacctgtacagtggaaccgttgccaaccgagagaatgctgacctgacttgcctccgtgtcaccgccaccccgcaccccgcgtgtccccggggcccaggggaggcggcactccaacctaacctgtgtctgcgaagtcctatggaaacccgagggttgattaaggcagtacaaattgtggagccttttaactgtgcaataatttctgtatttattgggttttgtaatttttttggcatgtgcaggtactttttattattattttttctgtttgaattcctttaagagattttgttgggtatccatcccttctttgttttttttttaacccggtagtagcctgagcaatgactcgcaagcaatgttagaggggaagcatatcttttaaattataatttggggggaggggtggtgctgcttttttgaaatttaagctaagcatgtgtaatttcttgtgaagaagccaacactcaaatgacttttaaagttgtttactttttcattccttccttttttttgtcctgaaataaaaagtggcatgcagttttttttttaattattttttaattttttttttggtttttgtttttggggtggggggtgtggatgtacagcggataacaatctttcaagtcgtagcactttgtttcagaactggaatggagatgtagcactcatgtcgtcccgagtcaagcggccttttctgtgttgatttcggctttcatattacataagggaaaccttgagtggtggtgctgggggaggcaccccacagactcagcgccgccagagatagggtttttggagggctcctctgggaaatggcccgacagcattctgaggttgtgcatgaccagcagatactatcctgttggtgtgccctggggtgccatggctgctattcgctgtagattaggctacataaaatgggctgagggtacctttttggggagatggggtggcctgcagtgacacagaaaggaagaaactagcggtgttcttttaggcgttttctggcttgacggcttctctctttttttaaatcacccccaccacataaatctcaaatcctatgttgctacaaggggtcatccatcatttcccaagcagacgaatgccctaattaattgaagttagtgttctctcatttaatgcacactgatgatattgtagggatgggtggggtggggatcttgcaaatttctattctcttttactgaaaaagcaggggatgagttccatcagaaggtgcccagcgctacttcccaggtttttattttttttttcctatctcattaggttggaaggtactaaatattgaactgttaagattagacatttgaattctgttgacccgcactttaaagcttttgtttgcatttaaattaaatggcttctaaacaagaaattgcagcatattcttctctttggcccagaggtgggttaaactgtaagggacagctgagattgagtgtcagtattgctaagcgtggcattcacaatactggcactataaagaacaaaataaaataataatttataggacagtttttctactgccattcaatttgatgtgagtgccttgaaaactgatcttcctatttgagtctcttgagacaaatgcaaaactttttttttgaaatgaaaagactttttaaaaaagtaaaacaagaaaagtacattctttagaaactaacaaagccacatttactttaagtaaaaaaaaaaaaaattctggttgaagatagaggatatgaaatgccataagacccaatcaaatgaagaaataaacccagcacaaccttggacatccattagctgaattatcctcagccccttttgtttttgggacaacgctgcttagatatggagtggaggtgatttactgctgaattaaaactcaagtgacacaagttacaagttgatatcgttgaatgaaaagcaaaacaaaaacaattcaggaacaacggctaattttttctaaagttaaatttagtgcactctgtcttaaaaatacgtttacagtattgggtacatacaagggtaaaaaaaaaattgtgtgtatgtgtgttggagcgatctttttttttcaaagtttgcttaataggttatacaaaaatgccacagtggccgcgtgtatattgttttcttttggtgacggggttttagtatatattatatatattaaaatttcttgattactgtaaaagtggaccagtatttgtaataatcgagaatgcctgggcattttacaaaacaagaaaaaaaatacccttttcttttccttgaaaatgttgcagtaaaatttaaatggtgggtctataaatttgttcttgttacagtaactgtaaagtcggagttttagtaaatttttttctgccttgggtgttgaatttttatttcaaaaaaaatgtatagaaacttgtatttggggattcaaaggggattgctacaccatgtagaaaaagtatgtagaaaaaaagtgcttaatattgttattgctttgcagaaaaaaaaaaaatcacatttctgacctgtacttatttttctcttcccgcctccctctggaatggatatattggttggttcatatgatgtaggcacttgctgtatttttactggagctcgtaattttttaactgtaagcttgtccttttaaagggatttaatgtacctttttgttagtgaatttggaaataaaaagaaaaaaaaaacaaaaacaaacaggctgccataatatatttttttaatttggcaggataaaatattgcaaaaaaaacacatttgtatgttaagtcctattgtacaggagaaaaagggttgtttgacaacctttgagaaaaagaaacaaaaggaagtagttaaatgctttggttcacaaatcatttagttgtatatattttttgtcggaattggcctacacagagaaccgttcgtgttgggcttctctctgaacgccccgaaccttgcatcaaggctccttggtgtggccacagcagaccagatgggaaattatttgtgttgagtggaaaaaaatcagtttttgtaaagatgtcagtaacattccacatcgtcctccctttctctaagaggccatctctaagatgtcagatgtagaggagagagagcgagagaacatcttccttctctaccatcactcctgtggcggtcaccaccaccacctctcccgcccttaccagcagaaagcaatgcaaactgagctgctttagtccttgagaaattgtgaaacaaacacaaatatcataaaaggagctggtgattcagctgggtccaggtgaagtgacctgctgttgagaccggtacaaattggatttcaggaaggagactccatcacagccaggacctttcgtgccatggagagtgttggcctcttgtctttcttccctgctttgctgctttgctctctgaaacctacattccgtcagtttccgaatgcgagggcctgggatgaatttggtgcctttccatatctcgttctctctccttcccctgcgtttcctctccatccttcatcctccattggtcctttttttttctttcattttttatttaatttcttttcttcctgtctgttcctcccctaatcctctattttatttttattttttgtaaagccaagtagctttaagataaagtggtggtcttttggatgagggaataatgcatttttaaataaaataccaatatcaggaagccattttttatttcaggaaatgtaagaaaccattatttcaggttatgaaagtataaccaagcatccttttgggcaattccttaccaaatgcagaagcttttctgttcgatgcactctttcctccttgccacttacctttgcaaagttaaaaaaaaggggggagggaatgggagagaaagctgagatttcagtttcctactgcagtttcctacctgcagatccaggggctgctgttgcctttggatgccccactgaggtcctagagtgcctccagggtggtcttcctgtagtcataacagctagccagtgctcaccagcttaccagattgccaggactaagccatcccaaagcacaagcattgtgtgtctctgtgactgcagagaagagagaattttgcttctgttttgtgtttaaaaaaccaacacggaagcagatgatcccgagagagaggcctctagcatgggtgacccagccgacctcaggccggtttccgcactgccacaactttgttcaaagttgcccccaattggaacctgccacttggcattagagggtctttcatggggagagaaggagactgaattactctaagcaaaatgtgaaaagtaaggaaatcagcctttcatcccggtcctaagtaaccgtcagccgaaggtctcgtggaacacaggcaaacccgtgattttggtgctccttgtaactcagccctgcaaagcaaagtcccattgatttaagttgtttgcatttgtactggcaaggcaaaatatttttattaccttttctattacttattgtatgagcttttgttgtttacttggaggttttgtcttttactacaagtttggaactatttattattgcttggtatttgtgctctgtttaagaaacaggcacttttttttattatggataaaatgttgagatgacaggaggtcatttcaatatggcttagtaaaatatttattgttcctttattctctgtacaagattttgggcctctttttttccttaatgtcacaatgttgagttcagcatgtgtctgccatttcatttgtacgcttgttcaaaaccaagtttgttctggtttcaagttataaaaataaattggacatttaacttgatctccaaa

SEQ ID NO: 36 - DNA, 2472 bp, Homo sapiens
atgtcccgccgcaaacagggcaacccgcagcacttgtcccagagggagctcatcaccccagaggctgaccatgtggaggccgccatcctcgaagaagacgagggtctggagatagaggagccaagtggcctggggctgatggtgggtggccccgaccctgacctgctcacctgtggccagtgtcaaatgaacttccccttgggggacatcctggtttttatagagcacaaaaggaagcagtgtggcggcagcttgggtgcctgctatgacaaggccctggacaaggacagcccgccaccctcctcacgctccgagctcaggaaagtgtccgagccggtggagatcgggatccaagtcacccccgacgaagatgaccacctgctctcacccacgaaaggcatctgtcccaagcaggagaacattgcaggtaaagatgagccttccagctacatttgcacaacatgcaagcagcccttcaacagcgcgtggttcctgctgcagcacgcgcagaacacgcacggcttccgcatctacctggagcccgggccggccagcagctcgctcacgccgcggctcaccatcccgccgccgctcgggccggaggccgtggcgcagtccccgctcatgaatttcctgggcgacagcaaccccttcaacctgctgcgcatgacgggccccatcctgcgggaccacccgggcttcggcgagggccgcctgccgggcacgccgcctctcttcagtcccccgccgcgccaccacctggacccgcaccgcctcagtgccgaggagatggggctcgtcgcccagcaccccagtgccttcgaccgagtcatgcgcctgaaccccatggccatcgactcgcccgccatggacttctcgcggcggctccgcgagctggcgggcaacagctccacgccgccgcccgtgtccccgggccgcggcaaccctatgcaccggctcctgaaccccttccagcccagccccaagtccccgttcctgagcacgccgccgctgccgcccatgccccctggcggcacgccgcccccgcagccgccagccaagagcaagtcgtgcgagttctgcggcaagaccttcaagttccagagcaatctcatcgtgcaccggcgcagtcacacgggcgagaagccctacaagtgccagctgtgcgaccacgcgtgctcgcaggccagcaagctcaagcgccacatgaagacgcacatgcacaaggccggctcgctggccggccgctccgacgacgggctctcggccgccagctcccccgagcccggcaccagcgagctggcgggcgagggcctcaaggcggccgacggtgacttccgccaccacgagagcgacccgtcgctgggccacgagccggaggaggaggacgaggaggaggaggaggaggaggaggagctgctactggagaacgagagccggcccgagtcgagcttcagcatggactcggagctgagccgcaaccgcgagaacggcggtggtggggtgcccggggtcccgggcgcggggggcggcgcggccaaggcgctggctgacgagaaggcgctggtgctgggcaaggtcatggagaacgtgggcctaggcgcactgccgcagtacggcgagctcctggccgacaagcagaagcgcggcgccttcctgaagcgtgcggcgggcggcggggacgcgggcgacgacgacgacgcgggcggctgcggggacgcgggcgcgggcggcgcggtcaacgggcgcgggggcggcttcgcgccaggcaccgagcccttccccgggctcttcccgcgcaagcccgcgccgctgcccagccccgggctcaacagcgccgccaagcgcatcaaggtggagaaggacctggagctgccgcccgccgcgctcatcccgtccgagaacgtgtactcgcagtggctggtgggctacgcggcgtcgcggcacttcatgaaggaccccttcctgggcttcacggacgcacgacagtcgcccttcgccacgtcgtccgagcactcgtccgagaacggcagcctgcgcttctccacgccgcccggggacctgctggacggcggcctctcgggccgcagcggcacggccagcggaggcagcaccccgcacctgggcggcccgggccccgggcggcccagctccaaggagggccgccgcagcgacacgtgcgagtactgcggcaaggtgttcaagaactgcagcaacttgacggtgcaccggcggagccacaccggcgagcggccttacaagtgcgagctgtgcaactacgcgtgcgcgcagagcagcaagctcacgcgccacatgaagacgcacgggcagatcggcaaggaggtgtaccgctgcgacatctgccagatgcccttcagcgtctacagcaccctggagaaacacatgaaaaagtggcacggcgagcacttgctgactaacgacgtcaaaatcgagcaggccgagaggagctaa

SEQ ID NO: 37 - DNA, 43793 bp, Mus musculus
  misc_feature (2690)..(2776): "n" at positions 2690 through 2776 can be any base.
  misc_feature (7970)..(8296): "n" at positions 7970 through 8296 can be any base.
  misc_feature (9906)..(9932): "n" at positions 9906 through 9932 can be any base.
  misc_feature (12180)..(12199): "n" at positions 12180 through 12199 can be any base.
  misc_feature (13667)..(13793): "n" at positions 13667 through 13793 can be any base.
  misc_feature (21988)..(23113): "n" at positions 21988 through 23113 can be any base.
  misc_feature (25771)..(25790): "n" at positions 25771 through 25790 can be any base.
  misc_feature (38708)..(38727): "n" at positions 38708 through 38727 can be any base.
  misc_feature (40651)..(40861): "n" at positions 40651 through 40861 can be any base.
ttaacatgctcttaacatctctctagcccctatttggggggttgttctgtctgtctgtttgtttgtctaactgtctgtgtcagggtcttgttgtatagctctggctatcctggaattcatgacagttctcctgcctctacctcccttttgctgttttgatttgatttggtttgggggtatttgtattgttttgttttgttttgttttgttttttgtttttgtctgaggccaagtctgcagaacaggctgacttggaacttgcctttatcctgtctcaaactctggaattataggtatatgccaatacacctaatttaataaatgtatttttgtcctgtctttacatatgtgaaaatcacctaactacttacagtatctcaaaagctcatttcccattcagacctcatttcagactcttgttagttaacatttttaatttatttatgttctgtgtatggttgctttgtctacatatgtctgtgcaccatgcataggcccggtgcccacagaggcaagaaaaggacctggaattagctggaagctgccctatgggtgctggtggtcaaacacaggtcgtctggagattacaggagcaggccaccacacccacctgatgttttctttttactcactcttgtgtgcacacacatctgtgtgcttgcccttgccagtatagagaacatgtggaggctgaaggctgactgcaaatgtcttccccactctcctcacccatcccctttcttgtttttgttttgtttttccagacaggatttttctgtgttgccttggctgttcgggaactcattctgaggaccaccaggctggtcttaaactcacagagattcacctgcctctccctcctgaatgctgatgctgggataaaaggtgtgcactactatctggctttaaagaaatgtttacgaatgcttttagtttgttttgttttgttttttagatttatttagtatttatatgtatgtttgtgaaccaccatgtgaatgataaagacttaaacctagttcctcatcaagaaaaacaatacagagacaaagtttggagctgagatacagagacaaagtttggagctgagacaaaaggatggaccatctagagactgccatacctggggatccatcccataatcagcctccaaacgttgacaccattgcatacaccttttcagcaagattttgctgaaaggaccctgatatagctgtctcttgtgagactattcttgggcctagcaaacacagaagtggatgcccatagtcatttataggatggatcacagggcccctaacggaggagctagagaaagtacccaaggagctaaagggatctgcaaccctataggtggaacaacaatatgaactaaccagtaccccccagagctcatgactctagctgcatatgtatcagaagatggcctagtcagccatcagtggaaagagaggcccattggtcttgcaaattttatatgcctaagtacaggggaatgccagggccaagaagtgagagtggggggaagggcatgggggacttttgggatagcattggaaatgtaaatgaagaaaatacctaatttaaaaaaaaaaaaaaaaaaacaagtggcagggcggtggtggcacatgcctttaatcccagcccttggggaggcaaaggcaggcagatttctgagtttgaggccagcctggtctacagagtaagttccaggacagccaggagtatacagagaaaccctgtcttgaaaaactaaaagaaagaaagaaagaaagaaagaaagaaagaaagaaagaaagacaagtggtcttaaccactgagccatccaacccctcatctttttgtttgtttggttggttggttgtttttttggcttcttgtgaagtcataacttccagttctttggaaacatcaaatgatgttttgctggtgcacacaggtgaaaggatatttggatatagtaaacacatggaaggacctgtgatgatgttatataaatatgacccccagactgtggaagatgagcactgagccttggtttggtttgctccacctggttattcttccctaatgacatgcatgcatggattgattcgctttacatagtgctgttgagctccacttatggaaaacaccgatattgagaaaaacttgcccaagaactactcgtgaggttcctgcctctggagtgctaggactaaaatcacgtatcaccactgcccagctaattcctcacctttgaaagaaaacaaaaaaacaggctctcctcactggacccagagctcaatatactggccagactggctggcctgtgagccaacttgctgtttccactgccttgccgtaggccagtgggtgaacccggtggtttctacaggattaaactatggctgcctggtgtctgcttgctgagaaggactggactgcagctgctggttcgtgtctggtgtctgcagctgctgagctgtatttggtgtttgctaagggactgaactgctgacaaagaaaatggacctcacctccaaagaacaattgctgagcaggtccacttcccccacatcctaataacttttctcttccactaccactattggtggtgggctagaagagagattgacccgtattaaaagtaggttgcattaggaggcagaggcaggtgaatttctgagttccaggctagcctggtctannnnnnnnnnnnnnnnnnnnnnnnnnnnnnnnnnnnnnnnnnnnnnnnnnnnnnnnnnnnnnnnnnnnnnnnnnnnnnnnnnnnnnncctcaaactcagagatttgcctgtttctgcctctggagttctaggactaaaatcatgtatcaccactgcccagctaattcctcacctttgaaagaaaacaaaaaacaggctctcctcactggacccagagctcaatatactggccagactggctggcctgtgagctcactgttgtcctctccccttgctccatagtctgacagtttcttatgtagccccggctagcctcttgattcattactctgagcctcccaaaatctggaatcagagtcatgagccatcaccgcacatcagccacatacactgtacagcactgggcaagtgacctctcccccctcactgagcctcagtttcctgtcaagtggagggtggtctctgccctattgagaggaggacataaaagaacttcaagacgagggtgtcattcagcagcagagcagtcacctagaacgcgtgaggccccagatgtcgtctcttacactgcaagacaaaatttgctaggcatggcggagcgcatctgtaaccacggcactcagaagaaggcagagccaagagcatcaggacatcaagagcatcctcagaggggggggggggggggttgggggggggaatgattgactcagtagtcaggagcacaggctgctcttgcagagaaccagggtttaattcccagcaccgacatggcgacttataactccatctcctaggggtctgtagccctcttccgtcctccacaagtaccaggcacacatacatgcggtacatgtgcatactatgtaagcaaacactcatatacattaaataaagcttcatcaggccgggcggtggtgacgcacgcctttaatcccagcacttgggagtcagaggcaggcagatttctgtgttcgaggccagcctggtctacagaatgagttccaggacagccagggctacacagagaaaccctgtctcgaaaaacaaaaacaaaacaaacaaacaaaagctccatcagttaaaaataatcaaacaaaggtggcaataaacaaaggactgttgtcacctgcatagtggatacaaggccaacccgtgctatatgaaaccctgtttcaaaaaaataaaagaaagagagagaaaaggtggtgggttagaaagaaagaggcagataggagtgataagttttgcccgatgttagtgagcgcagaagccaaagttgagagtagccgctgtggacctgcctgcagcaggtacccagaaccatggctcgccaggatcctttctcagggatcagtggtgatgaaccaggccttgaaccaccctctccccgaccccacgcactagagagagactcaagggaattgtggccagcccaggtgcagggcagttcctctccactcagagcccacacatatggcaaataaagggccaggagtaagggccactggagcccatctccggcacggctgaacaggaagtgaggcggagtttggagtggaatctggtacctcaaggctacggccacccaaactaaccgactcactgggagacgatgccagggggtctagaagccctcagagccctgcctctcctcctcttcttgtcatacgcctgtttgggtaatgtggccaaagggaaggtgcgggtggggcgggggtgttgcggctgacaggagaggtgcagagtggagtcagaaatggccaggcagggtgatgcataacgtggcatctcttaaagtaacgccagaactctaggaaactgaggaaggaggaacactgcatttgaggccagcctgggctacataatgagttctatctaggccaacctgggcaagttactgattaaaactgtctcaaaaagaaaaggagtgtggggagggaatcagggaaagccgtctgtagctagccacaggcttgagtaagtccactgttaggaccaacactaccttgccccacgacacacgaccttagctccacaggtcagaatgagaactgaggtaagtgttgactgaacaccacaccagtggaggtgtagcaatgggtgtcggtgagggaacgggttttatttgtttgtttgtttgtttgtttgtttgtttgttttttcctctgccttacatctggagggcaggcttgccatgtgaccacatagacccaggtttgcagtggaggtcttaggagcagggactggggccctgctctctgtgtcttaagcctgtgtgaccaggaactggctggggctctttcccctccctttctttcttcctcacttccgaccttcttcttttctgtcatgtccacaaaagggagctacaagccagtgtggagctggggaggctgagaacagggtggggggtggggggcgcggttcaagataaatacaagagcagacaccatagccaccagtccaccctcggctcttagcctcctccgatgccccagacagaactcagtcccagtgcctaggttaatactggtttctctgttttgttttgtttttcgagacagggcttctgtgtgcaactggaactcactctgttagaccaggcaggcctcaaactcccagagatctgcctgactctctctcctgagtgctgggattaaaggcatgtaccactactgcctggcaggtcgccacatttaaattacagagatgagaaacagcctaggcacaaaaaaacaaaaaaacaaacaaacaaacaaaaaaaacaaaaacaaaaaaaaaaacaagccaagcgcagtaaaggagagattcaggaaggtgggaattgggctctactatcttttccaatagcctggttactgctgagctgagccccaccgctgcatctaaggttctgccccaccttcaccccctccccgtgggggttcctaagagttgtaaggaatggggaccaatgggatggttttcatgaaagagtccctgggctgtttggggaacatcaaaatacaaaggggaaagggaagaaagaggccatagggtgtgcccccccccaagtctcccatcatctttttctaggtaccattaccattggtacggctccactcctgatgtgaaggggtctgggctagagcaatcatctccatctccaggctctgacccatctgtctcctctcctctctccacaggtcccggatgccaggccctgcgggtagaagggggtccaccatccctgacggtgaacttgggcgaggaggcccgcctcacctgtgaaaacaatggcaggaaccctaatatcacatggtggttcagccttcagtctaacatcacatggcccccagtgccactgggtcctggccagggtaccacaggccagctgttcttccccgaagtaaacaagaaccacaggggcttgtactggtgccaagtgatagaaaacaacatattaaaacgctcctgtggtacttacctccgcgtgcgcagtgagtagggagggcgctggcctccttgcgttccctgctccctctttcttccaaaacattaggagcagagctagctcctccctcctggacctgccaccagccacagagatggtggcttcagggctccctgacctcgcaagggtcagggctgggagaagaagggacaccagaatgctgagcagcaccctgtcttcacagatccagtccctaggcccttcctggacatgggggaaggtaccaagaaccgcatcatcacagcagaagggatcatcttgctgttctgtgcagtggtgccagggacgctgctgctattcagggtgagtctcccccaagtgacacccctcaagtcatcttggcttacctgggcctggactgtgactcccagtgtccagctggtcctctgaattccaaggtttgtccttccaagtttgggaggctgggaataaccaccaaaaggattcccaggggggtcagcgtgtccccacggccctcatagaaaccctctcacttctggcccgccaacgggagtcccctgcaaatgcagccaagacaagggaagaaggtgtgtcctcccagagcccctgcgtctccttaggccagaagacaacatttttcacccacattggggcttcattatgtagccctggctggccttgaactcacagagatctgcctatttctgcctcccaagtgctgctgggattaaagggccaccatgcctgcccttcttcctttctttaactttttcttttccccaccacctaaccccccaagactgggtctctctgtgtagccctggctgtcctagatataaggctggcctcagactcacagagatccacctgcctctgcctcctgagtgctgggattacagttgtgcacccctatcgccctgcactttatttatgtcttagtgtgtacgtgggcatgttgagtgtggaggtcgaagaacaactttcaggagttgattctttcctcccactgtgggattccgcacaccaaattcatatcctcaggtttgcatggcaatacacttaccagcttgagctatcatctggactttctttgctttcagtttttattttactttattttattttatttttttaaagctagatattagtctaggctagcctcaaacttgctatatcaccatggctggcctgattcctctttaccttccaagcactgaaattacaggcaggtggcaccaccagttttatttttgtttgttttaatttttgttttgtgttttgttttgtttttgtggggagggttagacagcattttgctatgtaattcaggctgggctagaactcactctatagatcatattggtctggaattcccaatcctcctgcctcagtttgccaagcactggaattacagatgtccagcaccactcactccctgctcgccgttctgcttgtcattgaggagcagtagagagctagcatggtggtgcacagctttgaccctagcagcactcaggaggcagaggcaggcggatctctcgggagccaaggccagcctggtccacgtactgagttcccaggtagttcttgctagatagagatcctcagagcatcagtggagtggcagggaggtgcagcagtccacttgagacagggagattgcttaaagtttgaggcccataaaaagaaagagaggagaggggcagagactagaatctgccaagatcctgatggtgggatctgccttgatggtggggagcacagtatccctcactctttctgataaagcacttgctagtaggagacagtctaaaaacccttcacctnnnnnnnnnnnnnnnnnnnnnnnnnnnnnnnnnnnnnnnnnnnnnnnnnnnnnnnnnnnnnnnnnnnnnnnnnnnnnnnnnnnnnnnnnnnnnnnnnnnnnnnnnnnnnnnnnnnnnnnnnnnnnnnnnnnnnnnnnnnnnnnnnnnnnnnnnnnnnnnnnnnnnnnnnnnnnnnnnnnnnnnnnnnnnnnnnnnnnnnnnnnnnnnnnnnnnnnnnnnnnnnnnnnnnnnnnnnnnnnnnnnnnnnnnnnnnnnnnnnnnnnnnnnnnnnnnnnnnnnnnnnnnnnnnnnnnnnnnnnnnnnnnnnnnnnnnnnnnnnnnnnnnnncatggggtgtggtgtctgccttgatctcaccctggattgactggacgctggggctccagctgtcagggtactgatgtctcctctctgacccctgcagggcctgaaccttgatgactgttctatgtatgaggacatctccaggggactccagggcacctaccaggatgtgggcaacctccacattggagatgcccagctggaaaagccatgactgacatgtcccacccttccctgcctgccatatgtctgactccagcatccctgcctccccactcttcccctggagtccccccttcccagtgcttgctccagccactcgagtggcctacccttgcctccaggctgccccaccctattctcccacctaatcttgtccttccccaagtccagctccctctctagtgggtaatgagcccttaatcgctgcctctaggggagctgattacagcagcctcgttagtgtcaccccccctcctcccagatctgtcatggccacttaagtgataataaatccttcccaaagcagcccttggcaggagtcatggatctcatgtagactgctcctcaacactgccagggaaccaggagcagaaaacccaagtcccctcccccctcagacccaggattctaggttcaagttctcacctgaccacttctgagatctgggaccagacagttcttgctgtctgtcttccccaaccccctccccccaaaataacaggaagtctcttggggaagtccccaccccaattgaaatgctggtttatctcccttatagggcctcaccctcctcatgtcccaaagcaagggggaaccagcccgggtgttaccaaatttttacctatatttaaactctgagaacacaagatattattttctggagtggggcctaattccctcatgggttcacttgcataaggcagatttggagagtttctgtcaagaaccggggggagggggatgacagagagagctagagtggtgtgacagtcattgggatgggaagagcagactcaggttgttaaaagacaggaggccaagaggagactcagtgggatccccagagacaaggatgcagagataaatagccaaaggaagaagcagacacaaactggctggcctgataataacagttgaggaaaggacaaagcctgaaatctcagagcatgagagagacagccaacagcaagaaatgggcccagcgtgatcaaggcacagaggagctgcagcagggagaagcaacagaggccagaaagcaaggagtgcctggatgggcccctgaccttgtgggcaggaaggccttcgagcttcgaaaaagagatcagggtggtggcgcgcacctttagctttaatctctctactccagaagcagagacacctgagttcgaatccagcccgccttacacaacaagttcgaggccagccagggctacatagggagcccttgtcgcaaactaagagaaagagagagtaagggccagggcaggagctgggcaacagcagggagggcggcggaggcggacaaaggcgaaggggagccgggcggggccgggtggggacgcgcccgcggggaaaggaggagccgcgcgggcggcgagaaggggaaggannnnnnnnnnnnnnnnnnnnnnnnnnngggcggcgggcgggggctccggaaaaacgccccgacttcctgcccgccaggagccaggaagccggagtcgggacaccgggcccgggatccccgagcccgacctcgggcgcctcgccggtcacctccccgcgcggacaccaggtacactgtccctggccccgcccggcctcctcctccagccgccgcagggaggagcagggaggggaccgggcgcggagggcctcccagggtgcgcccagtgaacctgcagccgcctttctctggcctcggttttctcatctgtcaaagagagcaaagagaaaacccggcgcgttggcgcccgcctgtcatcccaggagttgggaagcagagacaggaggattgccatgagttcgaggttagcttgggcgacctagcatgaacctgcctcaaaagaaaaaaaaaaaaaaaaacaaaacaaaacagagagagagagagagagagagagagagcacttgtcgagagcacaagtaggtagagatccaggctcccagcgaagaacgataacactcatttatcagcagggaaactgaggcccagggagtcggactgccttgtcgtagggacagagcatctgggacttgaactcaaagctgtttcctgtaaagagctgtccctgcgatcatggatgcttgattagagctccctaaaataaacaaatatctctgcagtacattttaaagccgagacttacagagcgttaaacacgtctcagaaagcttttttccttaccctctctgtggtattaattatactctgggagatggctgtaggggagagaaccggaaacatatcctcattgaacagatgggaagactgaggcctaaagggaagtcattgcattttgcaggttagtctatcagaagaaaatatatgctcgagcgcatgagtgttttatgcttttgtttgtgtgtgtgtgtgtgtgtgtgtgtgtgtgtgtgtgtctatctatgtgagggggttctgtttttgttttgttttttctttccaattacagcgggaggagttgacagtggtgacagagggtatacaagcatttggaatttaataggtccgagttggggaggtagagctcatgtgaggtcccgataggtgcttaggacctgagcgacttgaagtttctccgagattgagccctaaccaggcaatggaaccatgcaccactcctgctaagggggcggggcccaggagagtgacaggggcagtcgaaatacggaaacaagggtcctccaaggcagaccagagcggccctatcgggccagcgtggcgccgtgtattgcgatacccgccggcaggaggagtggagttgccgaggccggagagcggtaggaggcgggctagagcggccggagggaggagtggagctggacgcaaaggcggcctctggctcggctagagcgactctgcggcacgggtgggggaacctggagctcgagcgcggaggcttcggttcctgaggctgcagtggcttgcttctcttcccatccgacaggtgagataggcagcccttggttgccgtgaaacctgaccccacacgtcttccctgccacccacaccaccaccgctgcagaattagtgagcgcctgttgtagatcagccacgtcccacgtaagatttagggctcgtgaagacccgccacgttacataggtcaataagagctcacataccttccaggtttcaggaagcctttcacggagacctggcttttaacataagcataggcttctcatagatcaaggcagggccctacagaacccaccacacaccactatcgaggtcccataaaccattagttttccctttagaatcaccatctctctggattcttgaggcccactatatgtcaaatagaatgtggggttgtatacattccagggccctcgtagtttttttcaaggctcccagaagttcttggagacctaaataatccagtccaaaggcttgttgaatgtgagcccttaggacccaggcgcctttatgtgtttacttcttcaggacccccccacacacacacacacacatacacacacacacacacacacacacacacacacacacacactgcatagacctaaacctgccctgacttcccctgtccaccccacctccagagcctcaagtgcaaaatgctccctctgccggacagtagtggactttgtcagttgcttcattttgccagctttacctatgtctacttttcaaatcctcttgagcccaggtttctggagnnnnnnnnnnnnnnnnnnnntgtgtgtgtgtgtgtgtgtgtgtgtgtgtgtgtagcagtgttgtgtgctgaatgtttaaactgtggaaccagactgcctgaacctgaatcctggctctgactctcataagccatgcctcaatttccccctcctgtaaatcagcaataagaataatagtgacaccctcctctcctaaaacaaaccaaaataatgctggcctcattgggtcagtaagaggattaaattcattaacatctgtagacagaccctgaaccctgcatagaaactaagcctgtgtgtgctgtctttgctgtgtctgacacatactgagaacacgtgagtgtcagccattgttccttattactgtgatggggagtgtggaggcaatgcatgtgaactgtgaacaagagagtcagggtcttctggtgacaatttgttaaaatttcgtacctcccttggcttctcttttcttgggggggggagttaataaagatttaagcgtgagagttacgggggccactctgaatgatgtgtacaggccagtatggtggcacacgcctttgatcccagcattgggaaggaggagacaagtgactctcttgattcaaggctggcctgctctgcagagttccaggatagtcagggctacacagataaaccctgtctcctgtctaagaaagagagagagagagagagagagagagagagagagagagaatagaaggaaggaaggacaaacaagcattctgtcattgagctacatccccaagccctccttggctcctttggggtctgtcaggtgagtatatttcctgctaactgagatgagcatgggagttcctggtctgtgatcatggcttctaacctagaaggtctggctggctggaaagggtggtttttgaaggcatcttgtttctcaggggatgagtgcttgtagttggggaggtattgcagttgatgggactagacagagtgcttctctccaataatactagaactcaagagaccaagacagggggatgcccgcaagcttgaggccagtctacagagtgagatcctgtctagaaaaaagaaaagcaaaaactgagctgatatacccagaacagttcttacgcactagatgggcttgtttctcataagctgactttgttggcaagtgtatttattaaacgctcaccagtgttcacatcttgacattagctgagcttttatggtggacagatccagcttctgaggaagagtacaaatgatgcctgcttggtggaacccccggccatgacttctggacactacagaaagcatctttggcagaaatcagaatcatagcaacggttcattgagtgctagggaggaggctcctggaagagggagaagggcgggtctcgggcagccagagttataaatagctttggggtgtggggacccgccccctactggtccaccccacactctttccaccattccttccctcctgacactgatccacannnnnnnnnnnnnnnnnnnnnnnnnnnnnnnnnnnnnnnnnnnnnnnnnnnnnnnnnnnnnnnnnnnnnnnnnnnnnnnnnnnnnnnnnnnnnnnnnnnnnnnnnnnnnnnnnnnnnnnnnnnnnnntatgcagtgtggagctggaccgaaccaacaccagctgtggaaggacagctgtcctggggtgggggaggagagatagggaggcagaggaggggccagcagaggtgataggaaggatgaggtaggtctgggaggagaggtggagtcccggattcatattgaaggggagcagcatgcccctgagggcaggctgctgagccccacctcctccatcatctttcagggaccaaagctgggaactgtagggaaccatggggcccaagagctcagtgtgtctgacagagagggactcggttttgttttctcgtgtagagggcgttggaggttgggggttcaccattgacatttcctgtcacaggaaatggggctggtgggttcagaggcaacatcctggcccaggcccgccacagatcacagtgtatcaccttcccctactcttcctaccttctcctaagggctgtgcttttaattttgcttgtgccaaagtccctcccccttgagggctagccagccttctgggtccctggtccttccttctttagtgacccaaattagtggttttacccacagccacccagcccacccatggacccatgctcctggcctccagcacacgcccaccccgcttggtctctccgcctcagctgggctgagaagagctctttgtcgccacacagaggctccattgagcttaggaggctggggggtgggggtgtttactcaccttccgcacctgggccaggaatctgtgagtaactgcccagcctcgggcacttcctccccacccctaactgctcctcctctccgcagcccggcggagtcctggagatgggagaagtcgccggaggggcggtgagtgcggggagaagatctgagccaaggtgagggaggtctggtgctctgtgaggtagggagccctgtgaattgaaaccatgtgtccccttgcaggccccagggcctccccggtctggcctggtgtccatcatcatcggggcggaggatgaggattttgagaacgagctggaggcggtaagcagggtggggtgggagagtgtccaccaaggacccagttctccgtcctgggatgtgtcctccctgctcacattatcatctctcaccccatgtgtaactgtctacagtagtcccacccatctcactctaaccccagtttatcaccacccctcccccatttgactcacatcccttctcaggaccggctcaggaacatcaagtcttatcccttcttcccaacttcttgtccttactgtctgggttgtagcataggcccatccacccccatttccctgtcgtgaaaccattgagaggtgcaagaaactgggtagggcaagccttggatgtcccttctttccccttggcactcagctcccttgtccccaccctccagaactcagaagatcaaaacagccagttccagagcctagagcaagtgaagcgccgccctgcccacctcatggccctcctgcagcatgtggccctgcagttcgagccaggaccactggtgaggatggggcggtggggcagagcaggaatgaggctgggcaactaagaggtctggaaagtccagaacacagcatgagttatcgaaatagggccccagacaagatgggaaaagcaggcatatgatctagacaggtttgcagatgcccggtgagccgcagtaagcagggatcccaggcctgagtgcttacagcagaacccagcatcctgacagatgccatgtcctgcccttttcaagcatctccagctggtaacgctgaccttggcagtggggagggttggggggtggcagcaagaccatctcagcaggtgtcaccagtcctgcatcaaggagttggttcccttagccatctagacttagagaacacctcagaccttgatccaaatacccagacaaactccatgtggttgctaacctagaaacgtcctgagcctgccgtgataatacacacctgtgatcctaagcacattagacactgaggcaggaggatagccacaccttcatagtcagctaaggctgctacatggcaagactggacctcaaacaaaagaaacttccagggccaggcaggagacactggggagacacagataaagaactgtgtggtccagaaaccccagtccctgatttagcaagaagccaccgtactggctgggagtggggggctgtgtaggtaggtgcgtgggagcatggacggttaggcctcttcctaagaagactggataccacccagcacaagctacttggcaagggatgtccgagggtcttgcactacatgaaaatgcacgcagaatcccccccaaccaaaactaggagactaacagaaatcacaggcagggacacccggggtgaagaaagacggacacaggagggctggggatgtaactcaggtggtaggaagtatgcctatcgagtacagaggcctgggttagagcctggcattgcataaagcaagcatagtgatgcaggctggtgatcccagcactcggcagaagaggaggatcctcggctacttagcaactttaaggccagcctgggctacatgagaccttgtctcaagaaaaaggcatgaaatgaaacgctaggactagttgtcctgacaccaggctttagaaactagtggaaaattgatgcagtctctccatctacgttcttggaaaaagcagccatccctcctgggtacacagaggctgtccttgcctaggcgttggagctcaggagtttcctatcctagccctacttaactcaaggactgggaagtgctctgtttgacccaatggcttctggctgggaggagttgctcttatgcagcttcctcacccatcagagtatggggcaagaatggaaagagcagacatagatgtgtcaaccagtaaatgtaaaatgttctgctgccagtcagtggtggcttgtgccgttagtcccagcactcaggaggcagaggcaggcggatctctgactttgtaaggccagcctggtctacagaggaattccagacaactatagctacacagagaagtcctgtctcaagaaaccaaagacaaaaaaaaaaaaaaaaaaaaaaaaaggtctgcctgcacaggagtatccccaagcaccaccagaaatgacatgtcacttgccaggcagcagcatttccagtgtcacccaccaaagactggcacacaggcaacttcaggagatggcctggcaagaatgagtggaccccacttgtccacccgtctactgtctgtccctcaccgccctgcaccctaggcagattgccagagacagctgcctacatttgagcctggctttaccatgtgacattgagcagggatgtttattcattgttggtattggggattgaactcagggccttagctatgtgaggcaagcactctgccactgcctcccaagcccttgttatttttatcgtgtgtgatgtggtgtatgtgtgttcatttgggtatgtgcatgtatgtgtacatatgcattgtatgtagaagccaggggccaacatcaagattccttgatctctttccaccatattttctctctccttttaaaattttattccatgtatttgtttgtttgagacagggtctctctgttatgtagcctggtctcatagtgagctgcctgcttctgactcccaagtgttagaattaaagtcacgcaccactaacccccagctctgtctaaaactattcttattaaatacgaacatgtgtgtgggtgcctgtgtgtggatacatccatggcatagcactagtatggagatggtaggacagcctctaagaggtcataggacagcctctaggagtctctcctcccaccatggaattcccagggattgaactccagttgtcaggcctggtagtaggcagagctaagccatatctctggtcccaccttacttttgagacagggtctcctgaccagggagctcatctgattgagattggcaaggctgcggagcatgagctctgggaactgcccccaaggtctaaaggcacaggctgtcaggcttggtttgtacatcagagctggagatgcaacgatgctcaggattcatagcctgtgcttcccttctgagttagccctgtaacccatactctggtctttctttctttatttctttttttttttaagatttatttatttattatatgtaagtacattgtagctgtcttcagacactccagaagagggagtcagatcttgttacggatggttgtgagccaccatgtggttgctgggatttgaactccggaccttcggaagagtagtcaggtgctcttacccactgagccatctcaccagccctactctcgtctttctagagagggtcttatacagagccatgaacttgaaatggtcctcctgcttctgcttccgagcaagcgttgggaggtgccagcagtactggctttaccttgtattttgagataaggtttctctaagttgcccagggctgcccttgaaccttcgatcctttgaccatgaagcttaagctgttttctctctttccttttggtggtattttggtttttttttttttttttgtgacacagattttgaactcctccctggtcttcctgcctgaagtccccagggatggatgtgcaggccggtgccaaggcactgagctttgaactcccaattccacaccgttgtttttagaaacaggcaggatctcgtatagcctagcctggccccacactcacaagtgttcaaggatgaccttgaactcctgatcctcctgcttctgcctggaaagtgaggggaccatagtcatgcaccactatacctgggttcaaggttcccaccggcaaaatggtgataatggtggtctcagtgatggggcaggttcctaaataacctctggtgggccccagatcctcagaatagctagtagagataggtagtagtaagaattggaaaggaataagaaagtattcatagcaatgaccctggagagtctcaggagaccacctggacagctgggctagaagtcagagtgggcttcaccgaagaaggcatgtctgcaccccacaggcatacagtggtcacaaagctgcttaggctatccaaagagggagtgtggtggttggggccgggagaaagagtcccgctctgtgtgtccccagctctgctgcctgcatgcagacatgctgagctctctgggccccaaagaagccaagaaggccttccttgacttctatcacagtttcctggagaagactgcggtgagatacctcccagctgcccctgtccctctcccagtgtctatctgtggtggtgcctgccaatgtggggcctcttcagtgtcttccctcagacccttctcaccaaggtctcctgagatacatctgccaccttactcctttctcccctgagcaggttctacgggtgccggtccctcccagtgtcgcttttgaacttggtaagaagaggaggggtctgaggataagagaggctttctgaccctggagactcatgggatggaagccatgattcagtcattcattcttggtggtggcagcacagggaaatattagaatccatgggtggggaccatgatccaagtaggttgggagccaggacccctggaatgtggcccctagcccttgcatgcatgtctgtagatcgtactcgacctgatctgatctctgaggatgtccagaggcggttcatacaagaggtggtgcagagccagcaggcagccgtgagccgtcagctagaggacttccgctccaagcggctcatgggcatgacgccctgggagcaggaactgagcctgctggagccctggattgggaaagaccgaggcaactatgaggcccgggagcggcatgttgcggagcggctgctgtcccacctggaggagacccagtaagtgggcactgagattccagttccagtgtgggtctgcctcggtgtcagtcttagtgtctgtattcttgcctcatccagagttctacttggacctacttggaccatggtcccactgtcagcctaactcttagaactctggggttccattgaagtttctgggtcttgtccatggtcatgtgtttgggtctagcgcttgtgtcctctggaatggaccttccgaggtcactttcccttctgcttaccctgcttactgaagagatggcagcccagaagtgatcctccgtggacagggaagccaggttttgtgatttcattgtaaatttctttctttgcaggcataccatctctacagatgaagagaaaaggtgacagctgtggggagtgtcgtgaaaaaaaaggcatggtctggaccagagggaggccatggcgtctctggggtggcaccctcgctcctggctttgggagccacccctctcctctaaccacaggaaatgcttgaggggttgtgggggactgtgtctttgtcattgtggacatagtgtgctcctgtgtgtctgccccggggacccttacctcactgtcttctccccttagtgctgctgtggtcactgccatcagcctgtatatgcgccaccttggagtccggaccaagagtggggacaagaagtcgggaaggaacttcttccggaaaaaggtgctgaggtcaagtctggccctgtcctttctaagaatcttcctgggtgccagccagcagtcactttctgctttgtgtcattttggaagccatagtcttccttttcatcatctccccacaggtgatggggaatcggaggtcagacgaacccccaaagacaaagaaagggctgagcagtatcctagatcctgcacgttggaaccggggagagccatccggtaagagggctactggccccacccttgcccaccccgttcatcccaggccaagctcactgtcccacttttttttttttttaattttattttatttttattaggtattttcctcgtttacattttcttttttttttttaaagatttatttatttattatatgtaagtacactgtagctgtcttcagacactccagaagagggcgtcagatcttgttacagatggttgtgagccaccatgtggttgctgggatttgaactcctgaccttcggaagagcagtcgggtgctcttacccactgagccatctcaccagccccctcgtttacattttcaatgctatcccaaaagtccgccatacccacccccccaatccactacccacccactcccccgttttggccctggggttcccctgtactggggcatatacagtttgcaagtccaatgggcctctctttgcagtgatggccgactaggccatcttttgatacgtatgcagctagagtcaagagctccggggtattggttagttcataatgttgttccacctatagggttgcagttccctttagctccttgggtaatttctctagctccgtgtttgctaggccccggcatagtctcacaagagacagctatatctgggtcctttcagcaaaatcttgctagtgtatgcaatagtgtcagcgtttgggagctgattatgggatggatccctgcatatggcaatcactagatggtccatccttttgtcacagctccaaattttgtctctgtaactccttcaatgggtgttttgttcccatttcttttttttttttttaaagatttatttatttattatatgtaagtacactgtagctgtcttcagacactccagaagagggcatcagatttcgttatggatggttgtgagccaccatgtggttgctgggatttgaactcgggaccttcagaagagcagtcagcactcttaaccactgagccatctcgccagccccttgttcccatttctaagaaggggcaaagtgtccacactttggtcttcgttcttcttgaatttcatgtgtttagcaaattgtatcttatatctttggtatcctaagtttctgggctaatatccacttatcagtgagtacatattgtgcgagttcctttgtgtttaggttacctcactcaggatgatgccctccaggtttatccatttgcctaggaatttcataaattcatttttttaatagctgagtagtattccattgtgtaaatgtaccacattttttgtatccattcctctgttcaggggcatactgggttctttccagcttctggctattataaataaggctgctatgaacatagtggagcatgtgtccttattaccggttgggnnnnnnnnnnnnnnnnnnnnnnnnnnnnnnnnnnnnnnnnnnnnnnnnnnnnnnnnnnnnnnnnnnnnnnnnnnnnnnnnnnnnnnnnnnnnnnnnnnnnnnnnnnnnnnnnnnnnnnnnnnnnnnnnnnnnnnnnnnnnnnnnnnnnnnnnnnnnnnnnnnnnnnnnnnnnnnnnnnnnnnnnnnnnnnnnnnnnnnnnnnnnnnnnnnnnnnnnnnnnnnnnnnnnnnnnnnnnnnnnnnnnnnnnnnnnnnnnnnnnnnnnnnnnnnnnnnnnnnnnnnnnnnnnnnnnnnnnnnnnnnnnnnnnnnnnnnnnnnnnnnnnnnnnnnnnnnnnnnnnnnnnnnnnnnnnnnnnnnnnnnnnnnnnnnnnnnnnnnnnnnnnnnnnnnnnnnnnnnnnnnnnnnnnnnnnnnnnnnnnnnnnnnnnnnnnnnnnnnnnnnnnnnnnnnnnnnnnnnnnnnnnnnnnnnnnnnnnnnnnnnnnnnnnnnnnnnnnnnnnnnnnnnnnnnnnnnnnnnnnnnnnnnnnnnnnnnnnnnnnnnnnnnnnnnnnnnnnnnnnnnnnnnnnnnnnnnnnnnnnnnnnnnnnnnnnnnnnnnnnnnnnnnnnnnnnnnnnnnnnnnnnnnnnnnnnnnnnnnnnnnnnnnnnnnnnnnnnnnnnnnnnnnnnnnnnnnnnnnnnnnnnnnnnnnnnnnnnnnnnnnnnnnnnnnnnnnnnnnnnnnnnnnnnnnnnnnnnnnnnnnnnnnnnnnnnnnnnnnnnnnnnnnnnnnnnnnnnnnnnnnnnnnnnnnnnnnnnnnnnnnnnnnnnnnnnnnnnnnnnnnnnnnnnnnnnnnnnnnnnnnnnnnnnnnnnnnnnnnnnnnnnnnnnnnnnnnnnnnnnnnnnnnnnnnnnnnnnnnnnnnnnnnnnnnnnnnnnnnnnnnnnnnnnnnnnnnnnnnnnnnnnnnnnnnnnnnnnnnnnnnnnnnnnnnnnnnnnnnnnnnnnnnnnnnnnnnnnnnnnnnnnnnnnnnnnnnnnnnnnnnnnnnnnnnnnnnnnnnnnnnnnnnnnnnnnnnnnnnnnnnnnnnnnnnnnnnnnnnnnnnnnnnnnnnnnnnnnnnnnnnnnnnnnnnnnnnnnnnnnnnnnnncttgcaatcccaccaacaatggaggagtgttcctctttctctacatcctcgccagcatctgctgtcacctgaatttttgatcttagccattctgactggatcactgtcccacttttgtttcagctccagattgtcgacatctaaaggtcgaggctgatggtaatgaacctgtagttaaggtgtccatccagggctgagggaggagggctggggtctggagccctgggtctgagggaggagggctggggtctggacccttgggtctgagggaggaggactggggtctggagccctgagtctgagggaggagggctggggcctggatccctgggtctgagggaggagggctggggtctggagctctgagtctgagggaggaggcctggggtctggagccctgggtctgagggaggagggctggggtctggagctctgagtctgagggaggaggcctggggtctggagccctgagtctgagggaggagggctggggtctggagctctgagtctgagggaggagggctggggcctggagccctgggtctgagggaggagggctggggtctggagccctgagtctgagggaggagggctggggtctggagctctgagtctgagggaggagggctggggcctggagccctgggtctgagggaggagagctggggtctggatccctagatctgagggaggagggctggcatgtggactcctgggtctgagggaggagggctgggtctgaggaagaagtagagagtatgtagagaactgagcatgggaggagggggtctctggtgtggaagacagccaagagcacagtgtcatagttctcctggatgcagtagcagatgggactagatgcctctgtttatttccccttttcattcttccttgccgtctttccagcagagaagccaggccctgcagaccggaagggaggcctgggtatgtcttctcgggacaggactgttgggactcctggacaggacaacccaggagtctccctgcaccctctgtctacagacagcgtcgactcccgggaaccaggtaagcgattctgagtcgggacaggagaaccacgagccccacagccctacttggatgaaagcccctgtccctttgagatctctcctttgttctccgcttcttttccagcttctggtcaggggtagtaattgcccgctgccttagtttaccctttgggctctgacctctgtgttggtgtcatgtctccttatccctggtctaggtttcttgtgttgttgtcatttggggctttggttctggcactgggggttggaactctcctcttcacacatggcaggggagctctctgccaccaagctacacccctaacccccactgctggactctaggccagagccgtactgatgagctgtgtccctcctgaccagctgtttccaacagtccctggggttcatttcctggaatctcagtgaggaatgtcctcatgacactcttgtgtcatcttgaatggtgaaccccaaagccctatgagtttactctgtcttcccacagctccagggctttcatcttagcccttaggtcccagacgctcttgtaacctgggttcagatctctcctgcagcttacttgtgctgtgttatggaagccacttccctctctgggttcacttacctttcagtgggtctgtccgtttcccttaaggctttgtggacagaggactgacggcttccagtcccctcctgcctggggtgggaggacgctgtagttctgtgacgacgccccctccttctggtgctagccccgctgcagtgttctgaggtctgaccgagtttctgtcctctcacactgaatactgcatgagtaggtggttaatggccaggcactgagtgtcttctagccctccctcagtgcacaggtcagggagactgagacaactacagggcagaactccatccacatcagaggccttccaagcagctctcttcttcccacccacacccctctatccataggcgtggataccccgcaggagccaggggatacacccccacagggccctaccagcctggagcccctggcgcccccagagagcacagaggacaatggcgagactgagaggtgtctgctgcggtgctgggagggcctgggcagggcagggcagggcagcatagagggcccagggagggtgcttgggattgctgctgcagtctgcacccgcctgtcccagtcatctctgctgccggacctccctcttctgcctgtctctgggcttcttccatccttgcctttccctcctcccctcctcctccctcttctctttaccctctgtttccggccttctctggccaggttctcctgggctccacctcggtcctattcagcttccttcctctcgttcccaccatctccctcttctcagtaagctctgcctccctcatggccctgctcttggtgtcccttgccctctctgtgctccaagctgcagtgtcctgggggccttgtccccctcacagttggggggcaggttctgccccctgcccgtccttgtgctgctgcttcggggaacccttggtgggtgtggggagctgggctgggcacacctggtccacctctgaccctgttgccctctctccccataaggtggaagaggtgggtgcctgggccctgggnnnnnnnnnnnnnnnnnnnnctccccctccccatggccacctcctccccttcaccccctgtgaggggaggggtgggtaggtacgtcaccctcccgattgagctaagtatggaaatcctttctccttgtccctttccctgaccccagcctcagggaagggagggggctggtcctgtgggccacagtgggttttgatctgcccaccacagttcagtacccttggggccactcccaaccccaggtacctccccaagttcactacttctgaccttctcttctctcttctgttgcttgtttcatccctgacccggtcttccctgtccctgtcctggtctgtcctggtctgtcctggtctgtcctgtctgtcctggtctgtcctgtccctgtccctgtccggtctatcctatccctgtccctgcctgatctcccctgttggctgtccctggtctgtcctgtctctgtcctggtctgtcctgtccctgtcctgtctctgttctggtttcccctgtccctgtcctggtctggtctgtcctgtccctgtccctgcctggtctcccctgttggctgtctcggtcctggcctctgcctgactctgtccttggcctcggggtccaggctatcagggcgtctagggcgctcagagagcctgcgggtgagtgaccgccgccggccttcccggggcagcctcggggctaagggccggggtgggggccgttcccggagcgacgtggacatggacccgggctccgccacggccgtgcttggccccacccgacgagccacgtacgtcatttccccctcgcaagctaaggaagcctagagagttgggaggtggtgggttgatgctagactctcaaagaaatagacatccggtgtctgaggttgctcgggccagctgtggacagcatagaccattggggagttgggaggtgggacactgcagtctagagacctggggagaggcgtcaaatgtcaaggccacagagggcttgtaactaaggaagagcaagaggctcccctggggtgctccaggatggagcttaacagtgcctctgtccacagccctgagcccggagatgatggggagccaggacggtcaggcctggaactggaaccagaagaacctcctgggtggagggaactcgtgcccccagacaccctgctcagtctgcccaagagccaagtgaagcggcaagaggtcatcagcggtgagtgctactctggagtctgcactgcagccagggatgctggccagtgctggctgaggcagagaccgagagcatgtgagagcagctgctttccaacagaagcagctgggtgcataggctgtggaacagacccagtgtgagtaagccaagtgccactgtcagccgagcgtgcgcccggagactgtgctgtcagttactaccatcagggctgtgcctccagaggaggtgtggcagtgtagacagtgctgatgtcgggagccagatacagcaaagcctgtcatcccagccacgtgccctggggatcaggtggccagagttcaaggccagggtccatgagatggcttactgggtaaaaggagcctgctgcaaagcctgacagctaccaggacccacatgctgggagagagccacctctacaaggtgtgtgtgtgtgtgtgtgtgtgtgtgtgtgtgtatgtgtgtgtatgtgtgtgtgtgagagtgtgtgtgatttttttttttaaaaaaagttttattcattttatgagcacactgtagtgtcttcaaatacaacagaagagggcattagatcccattacagatggttgtgagccaccatgtggttgctgggaattgaactcaggacctttggaagagcagtcattgctcttaaccactgagccatctctccagctcagacttatttatctatctatctatctatttctttatttattaagaaggaaacttgcgctgggcagtggtggcacacgcctttaatattacttcttttttttttttttttttttttttttttttttttttatatggaagtacactgtagctgtcttccgacactccaaaagagagagtcagatctcattacagggggttgtgagccaccatgtggttgctgggatttgaactccaaaccttcggaagagcagtcgggtgctcttacccactgagccatctcaccagcccaggcacacgcctttaatcccatcacttaggaggcagaggcaggaggatttctgaattcgagccagcctggtctacagagtgagttccaggacgaccagggctacacagagaaaccctgtttcgaagaagaaggaaaaaaaaaaaaaagaaggaaattcgctttcttctcagccccttaggatcagaagcaggtgatgtctgtgagttctaggctgaattggactatacaccaagtcccaggactctgtcacaagagactctatctctaatcaccaaacccaaaacaaaccaaagaaggaaaaaggagctagagacagtctgaaactgctcttgtcctgcctctcttgggcttcttactgtcagctgtttggtttttttaggggttttgcttttttttgttttttttttgttttgtttgtttgtttgtttgtctgtttttgagacagggtctttaaactagccctgactctcctggaactcactcagtagactaagccttccttgaacagacggacataactgccacccacatgctgagattgaaggcatgtcccaccacacccagacatttccaacttgtttgcttatttgtttgtttttaacttattctgtttctttttatcctacaaagtctcgtgaccttggtggagtagtatcactggtttttctgcccgcctgcctgaaacagaaaacgagaaagggtgtgtgtgtgtgtgcgtgtgcacgtgcgtgcgtgcgcactgtagcactgtagcactcctaagtgcctacataaggcggtaatggctccacccagaatatgttctgacctcaccagtttctagggattcttcctcagcctctgcgctctcccagcatgcctttgaacctgtccctagagcagcagttctcaacctgtagggcttgatccttttggaggtcacttggtgatatcctgcatatcagatatttatattacacttcacaacagtggcaaaatgacagttatgctgcagcaatgaactagttctatggttggggttaccacaacatgaggaactgtattaacgggtcacagggttgggcaggttgaaaccctctgctctagagcatgtaccctcccttgtgatgcttcctatttggggcccacagagctgctcgtgactgaggcagctcacgtgcgcatgctacgggtactgcatgacctcttctaccagcccatggcggatggaggcttcttccctctggacgagctgcagaacatcttcccgagcctggatgagctcatcgaggtgcactgtgagtgccagccacagctccctcccttctccagcacatcccagtaccaactccctcctccaggcctcctggacccagagcctgccacaggcagcctggcctactcctggggaccacacattcccgtcccccacagcatacaccccagaggtacagacactaaacaagcacacaaaatgcgtgacagcccaccagccccaaggatcaaacacataactgcagcctgagccagcagcaacctaaaccaggcatttcagtctcttctgctccagtaagccacctgctttcctgtgccccccacccccagccctgttcctcgatcgcttgatgaagcggagacaagagagtggctacctcattgaggagatcggcgatgtgctactggcccgggtgaggtaccctgacatggtcctacacaccccagagacccgggccccaggcctgtgtactttaggcttcctaaagtatgagaatgtttggacaacccgacctgagaccttcccttgcctgaatcttcccgcagttcgatggtgctgagggctcatggttccagaagatctcctcccgcttctgcagccgccagtcgttcgctctagagcagctcaaagccaagcagcgcaaggagcctcggttctgtgcctttgtgcaggtacagtgggtgggacgcgagaatacactgtggtgtcctgggggtgagggttgagggctggaactgaactctgcctcataggagagaagggctgtgggtgtggccctgggctacccctgtgctgcctgcttgctcctcaggaagctgagagccgcccgagatgccggcgcctacagttaaaggacatgatccccactgagatgcagcgactgaccaagtacccactgctgctacagagcatcgggcagaacacaggtaccctcccggccttcctctgaccatggccgctgagtgaggacatgccaggctgacgattcacaccgctccctttgcccgcccgcagaggagtctacagaacgagggaaagtggagcttgcagctgagtgctgccgggagattctgcaccatgtcaatcaagccgtccgtgacatggaggacctgctggtgagctggggcctggctccacccaggacggggcatggtggggaacatccatgcacctggcttagaggtcagtgtccaggagtcagttggcctttggtgtcttcctctcaggactcctggaggtcagatctggacctcagcctgtcccctgcagttggccttatatcattgcttatccatctaccttggagtcgctgagggccagcccctgtgcctggtttagctccctgtaaccctcctgtctctgtcctagcggctcaaggattaccagcggcgcctggacttgactcacctacggcagagcagtgaccctatgctgagcgagttcaaggtgaacccctagtcttccctcagctcaccttggccctgctgccctgggggttcttatgtacactgtggctgagactgcatcccgggagtctccacccccatctccttcccagagggtgtccatggtgacctctgacctcactccctggtccttggctgttcagctgccctcccctcccttcatcaccttagctgatcatggctccttcctgcctcagaacctggacatcactaagaagaagttggtccatgaaggccccctcacgtggcgagtgaccaaagacaaagctataggtgagtgcacccaaaggtggtggggccatgggtagaggccaggcctgacattgctgcctcacccacagaagtgcacgtgctcttgctggacgacctgctgctgctgctccagcgccaggacgagaggctgctgctcaagtcccacagccggacgctgacacctacccccgatggcaagaccatgctgcggccggtgctccggctcacctctgccatgacccgagaggtggccactggtgagctggggcaggtcatctgagcgcacttgtcctatggcatggggagtggaactctctaagagccacagagctcactctggggaggaacaaagacttggaagggtcctaatgaggcagaactgggcaggactaagtaaggatggcagagatgaggcatagactgtcattgcagaactcaagaggctaagggaagagagaggagcttgagtgtgaggtcagcttgggctataaaggaccaccctgcctcaagaaactaaaaatagccatgcttggtgacatatgcctttaatcccagcactcaagaggcagaggcaggcatgatctctgtgttcgaggccagcctggtctacagagtgagttccaggacagccagggctacacagaaaaaccctgtcaggagaaacaacaacaaaataagaaactaaaaataaataaaaatagagggaactgcctgcatttgcagaagagcatggtctgccccaagggttttctgtttttttgtttgtttgtttttttcccacaatgctgtcccctgccccctgtttaggaattgtaggtacttggaacataaggcagaagccagggcagagagttttgcaagcattgctgagaggttgtgctagggccactggtgccgtatggagggctctccaggtgaaggcagcctgggctctggggcctgatgtgatcagggctgtggaggaagacctcaggacagtgagtgtgaactgtatcacatgaggagagaggagcaatggcgccccagagggggccacactgggagccctagctccaagtcacatctctcccctccctatgcagatcacaaagctttctacgtcatttttacctgggaccaggaggcccagatatatgagctggtggcacagacatcttcggaacgcaaaaagtgagagtccccaaggatggtgtgaaggtgtgtcccgcatagggtggggtttaggtgtgctgaccacctctggtcttgtcctgtctccccagctggtgtaacctcatcactgagactgctggatccctgaaggtccctgcccctgcctcccgcctcaaaccccggcccagcccaagcaggtaagggtcaaggaaagaactggagaagggggcgtgggggtgcttccgtgcacatctacagaacttaagccccagcgcatgcacagatgtgcgtgctgagtcaagtgcagcctgcctccagctacctgtaccccaatgtgcccgtctttgggccagggatacggggtcacctgtcacttccctccccagcatccgagaacccctgctcagcagctctgagaatggcactggaggcgcagagatggctccagctgatggtaagtctcaaggtcactggctaggggaggtcacctgaagccagacaggacctgagcatccctgtctgtctccctacccagccaggacagagcggctcctcaatgacctcctgcccttctgcagaccaggcccagagggccagcttgctgccacagcccttcagaaaggtatgccagccctgcaccctccaaggccagtgtctagtgaagtggtgcctctgttttgaactagtgaaaggctccgtccgtctttcagatgtctgtatgtccacgaatcaagaaacccacccaaacgcctttcttctttagctgctcccccgccatgggcgctaagttcagcttctccagccccaggcctcctgccccatcctaacccttttgactgataaccacctcatccctcagctgtcatctggcccttggcctcctgccccttgtgaccctgttcctcttgccttggccagtactgtccctgaagcagatcctgctaagcactgaggaagacagtggagcggggcctccccgcgatggggatggggtgcctggtggtagggcccccggcccagtgcacacccaggagattgaggaaaacttgcttagcttagaggtggccatcagacaactggaggtatgcctgggggctgggggctgggctcgggcaggctgtggaaggaaaggcattcttcatctgtgatccccttcaggagttggaagaggaattttgtcgcctaagacccctcctgtcccagcttggggggactctgtcccccaacctggctgcacctgaacgctctgctcagacaggtgagtggggaactggggtcagggtgctgttctgaggggcaggaggggtacccttacccaccagccctctcttctcaactcctttccctccctctctccgtgtctgttaccctcaggcctttcatgaagagaagagtgggggagaggatgcaggggggcccacccccacccccacagctgccacagcatctcacaccccagaggcctggagcagagggagattggctgaacttgatagcagacctgctcgggtccctgcctcccactctggcctctgcctttctccctcctgccttctgcttggggaactcagggcttcactcccagagcacccccttaatccccacttttcaggccgtctcagtattgcctatggggggtcaccctccttcccctaccccaagtgcctttgctatgtttttatatcctggactggaggtttatttttaatatatattatctaaggaaagatctgtgtgtgtgagggcgttgggcagtgcgccccatgtctgggcctgtccttgacttcctgggtctgacccacgtcacctccatgactcttgcttcctttcaagcttcttccacccacccacccacccatccatccattcgcttgtcttacatttttatttagtatattatgggaggggcgcactgtgtgctacgtcagaggacaacttgtgggagttggttctccttccaacacctgggtctcagagctcagactcagatgacagacacctgtcccttttccctcactgtactaaggactccacacacgtgcacgctgcatgtgaggtgtgccccgtggtcatgcagagtgaggcacccacaacgcacactcagttcttttatttttgtagtaaactctggaggtggccgtgggatctgaacgggagccggtggggagagggcccctcctgggtggggctggggcgggggcggggttattgctctgatctccctgtccccaaggggacctgtgtgggaggatttcaagagggggctggcactggattggggacactgccacacgaacacgcaggtcacagcacataggaggtcaggggaggctgggcgccgtattgcactttgagagtggggccaggcggttatccccctcaaatcagaacctgggaggagactagaggccatcctgttgctctccactctggagaaggtgtgacctccacttgggggttagaaatggccaggagggtgccaagggctggccctgggccttgcgctagtgttaagggcagaccatgtagaagcttcatggatgactgccctggtcaccagcaggatccaccctacacctgctcagctgccgttcccccctttgcctgacttggtcttgggggacactggaccctcatcgccctcactgtcagagctgcagccgctgacatccgtgacctccagctcagagtcactgtcctccttcccagccaatgtggcctctgggcctccagcccctggcagtgccaggcgaggggccactgccagcccggaggggcgctcagggcccaggccctcccctgtcgcagcaagcaggggtgcagccatgggccctccccctgctcctgcagcagacaggtggcccagggaacccaaagggttggggtagaagtgaggtgggtagagagaggggggcaacttggggaaggggccggtgaggtatgggttgaagttccaggggtactcagggaaggcgcggccgtaaggacccagcaggctgggcggcttggagtagcctgtggcacctgaagaggcataggaacaggtcaggctggcccactagccatggggccctgtttcatggcggatgtgcctcctgcatggtctcccaccctccacctcacctcccccacttccctccctattcctttaacctgcctgcccccaaaaccctcctgccaagtagccaactccctcccattaagttgttctgcagcagagcattctctgccttgattggcttttagaaatgttcccattatataaccaaaattggcttccaactcataatctacctgcctcggcctcttgagtgctgggtgccacgtagcttagcctgacactgaacttgattgatctgtagtcaggatcaagactgagcttggtcctccaacttgtgtgtccctcgtgcaggggtctctggtgtgtgcaccacacccaactgctgcagcactgactgtaaccttgcttcaagcactctgactgagctacatctttgccgcatcccctccctggcttttaaacacatgtacccacacgtactctgtagacacatctctatcttatctcctggagtacacactccacgtgtgctgatcccctcccccagcccccagccccttaccagaacccaggaatgggaaggggctgtccagacgtagtttatccgtctctggggtgaataggggtgtccgagcccctggctctcctaggcgtggggcagagaacaggttctgcagggtctggagagggaggtagggaggcggtactgcttagccccctctggagaggacacaaaacacccctcttccagcactaagattgcagtatccagactcacctcaggggtcaggggtggagcatctggcccaggtgccccagcaaagggcccaggggtcagcaagagaggggagcctgtggcagcagcagccacatccagcagtgggtaattaacaagtacaactttgctgaagttgaacttgtaggtgaacctcttccctttggtcttgtggagaatgcgcttgttgtagtagtaactgtgggagagaagatggggtactggggaggggcaagggggggtgaggcagtagccgggctcaggttcctcaggttcctcatcgccaccccctcccagtttccactcacaagtactggggtccactggaattcagtcctaggatacagagggaatgccccacctttgggggggcagaaaggacagcgaagggaggagagagcaggatgggggtccggcccacagcccctcctcaccgcagggcccggctcagcttgtcataattcatgtggggcttgcacttgcgaatgccccatagacgggccacctcatcggggtccttgatgacaaattccccgtagtccccttgccaggcgatgacgccctggtactcctccttctgcaacagctccaggataaagtgccacagctggatctgcctggagccaggagatgactcgggcttgtaggcccaatctgggaaggcaaaccctagggacaggagacagggaggccttaaggttaggaaacagttgggggctctgggcattactggattttgcaacttgagatgcccagtctcttgagagcaagggaggagagggtgaaattgagagggacccatttcctgcatccacggctcttgggacgtggctgaaaagggcccactctgagcagtgatcaccctgtagggaggcctgagatatttctagtgacttgtgatctgccccttgcctaaggcgctcctggcactcagcccgtatgcatctgtgtatctacctctggtctgccccttcccatgtgctcccatcttcaagctgtcaggtagaaggctgtgtgtctgatgcaggcacagccgtgcaggtgcccatggcagacagcacatcatgcagacatccacttgccatgttagtccatgggacacaaccacacccaagtgccacacactcctgcttagggctgctaaagcaaacagatgtaggctgcctacactatatggatgcaacaacccagcatggtacacccttggcaacatgcacaaatacagacacacaagcccaacacccagctaacacctggtgtgacaaagataatgaggccatgacactcaagtccccagataggcagacgggcacatgcacagtaacaagacaaccaaacaacctcccaggtctacactccagcctgtgtatgtctgcaattgcatggtccaattggccttacttcaccctgggaggagtctcctggttcccgccatctgtacacacttagagaccaggagcggagatcctacctacccctggtctttccaagctagaaggctctggatcccagtgtccacaccagctcctatgtcatcccttgtcttgtaccttcccagagattgccatgatccagacgtgaacacatatttaaatctggtctctagcaagctgagagcagtacaagagacagggaaggctagggaagccatcaaaggctgggacatgggagggactatgctgagctgggagacctgggtccctgtatccagttgctgtgtagccaggggatagtttctgtcctctctggattgaggttctggaagcaggaggcaggaagtagcagaatctcactggtgcaggctgccctctggtacatatgtgcaggtgatgccccaactgccaaaggacaggcagtggtcgccactccctgtggaaggggagttttaatctctgagccatttcatctcagatgccatcgacaatccgtccagatggaccctggccaattcatacccatagctcacttccctggggaagccaccgcgtcacaaacatgtttgcacaaccaagagaccagaagggatccgctggagagaggaccaatacagcaggcaggcatagacaaccccagacacagtccagaaaccaagcccagatcctgatatacaggcccagggccatctacccacaccctgcaaaatagacctcagatatccactgagagtgccacagacgaccagagacaggcaaatcctctttaccccaccaaagcaggagtatggcacacaagctgccagacgccaaaagtatacatgcatgaccccgagatgtagagtccctgaatcattcctgtggcctctgtggtccaatctgtgtatgagcaggcgtgcattcacacaaagatggccccctgcagacacttgccctctgtgaccccttcaggaacactgaagtgtcgcacatgcacgcatacactccacagtgaaactcagagcagacagacagatgctctcaaagactccctcttattagtgacccattcgtgccaagaagatcctctccccctggcttaaacaccacatgcctctcctttcttctctttaggctgtgccctctccttgtgcctagcctagagctcgggggaggtgcagccaaatggacatggtgcggaaatccttcatctccgccccttccgtcctcatcctccaaaagaccctggacctttgtgtcccagcaagcaggtggcagggatagcagaccatgaagaagtttctggtcaactttctcatgaaagggtttgtagccagggaactgatggggaccgagacagacaggttcacaggtgcatgagagagacaggaagnnnnnnnnnnnnnnnnnnnncatttccgtgttggttttgatttctcttccccaacgctttcaactcccccgccgcctcctccgggacacgttataacgaggagccgtgggatcggcgctccgggccctgctcccacgctccccccgtcgtctctcacacacatctctgccttctcgcagtctctgctgccactttttccccatctctctcgtgtctggtctctgtcctgtgtatcagcccccccagccccgaggacctggttctggcccctccagccgggtcggtctccacctagaccagcatttctcctatgtcggttgctagcatctctaggtctcatctctcggtctctgtgtccctgggcctttagtctccacatggttcctctctccatttctgggtctccacatctctgcctccctgtctgagtctctctttcttgcaaagtccccatctctgtctttaggtctctctttcagtcccagtgtccctctcttgggactcctttgatctcgccgtgcccctggcacccccctggccccattgattgctgatcgacccatggaggaagtagggccttcggcccggggctatagggccaggcagcagctttggcagagccactggacagatggacagacagccccagccccagccccagccccagtggctgaggagggggagcatcacaagcccctcccagccggccggcacgatgcggatggggactccgggcaagctttaatttttaattttattttgcttccttcagccccccctcacccccatctctagcgcccgaagccatggcaccgaatgtgtgcgtgagtgaggcagccgcttggagaggggttgggcaggcaaaggctgcctccctctgttccttaccaagcacaattacacagacccacacctcctgcaagcacacaggccaacaaagtcacttgcaccactgcattccccacacactgtcacactcaaaacacacacagagacagaaccatgcacagtcccacagcccacacatcaatgaagtcacacatcaatgttgtacattctcatgtacaacagaaccagacacaagatctgcctagactgatgcatagtaacacaggcaccaggtcacacaccagtgcaatcacacagagagacaatgtcgtacagaaacagagaccccccccccctccccatacacagcagcacagacaagtcagcagcaggcacagtcacacatacaggtactagagaccttccatcaaacacaaactggagcacaggcagacacacaaaacaccacaaacacaggctgccacagccagatggcacacatgtgaggccacacccatcaaaggcatagagccacagtcagagtccccaatatgatcagcacagtggggaaaccccacagcagcccccatgctcagagagaggcaacactctcacttagacataggggctcagttcagctgggtgggggcgcccatttagaggctacagcagcccagcaacgtcaatgtccctgccaccatgggtttgtctgtcatctgtgaatctcactctctctctctcctctctctctctctctctctctctctctctctctctctctctctctctctgtgtgtgtgtgtgtgtgtgtgtgtgtgtgtgtgtgttcaaaacgtgtgcttgctacatagtcgtctcttcagtccccttcattgtctgtgtctgtctgtctgtcaccgagggtctttttattgctcatctctgtgtgccttagtctccagatgcttttgagtatctctcattctgtctctggacgccctcccccgtcccccttggcctctgggcctctctgcctctgtctcctcaccccatcaccccagccccctgggctggggtttaaccagttgttttgatttctctaagctgcgctgagccgcctcgggagccgcctcaggnnnnnnnnnnnnnnnnnnnnnnnnnnnnnnnnnnnnnnnnnnnnnnnnnnnnnnnnnnnnnnnnnnnnnnnnnnnnnnnnnnnnnnnnnnnnnnnnnnnnnnnnnnnnnnnnnnnnnnnnnnnnnnnnnnnnnnnnnnnnnnnnnnnnnnnnnnnnnnnnnnnnnnnnnnnnnnnnnnnnnnnnnnnnnnnnnnnnnnnnnnnnnnnnnnnccactgctcccgcgtacagcttgtgcatgcgtttgcgcgcgcacacacacacacatacacacacacactgctcacacatatactacacacacacacacacacacacactgctcacacatatactacacacacacacactgctcccacatacaccacacacacacacacacacacacacacacacacacactgctcccacatacaccacacacatacacacgccctagctcctgcattcacccttcctcacaccacatgccaatgtgcacacatctgtgcacacagcagagatgatgcttgaccatgggcacacagaccaatccacactctgggcccacgggcatgctgccagctagcatgagctcctatggctgtcctgacaaaaaagaggtctctcaggggctgtcataccaatacctgccaccttaccgcaaatgtcacccaattctcaccctggtcacatcaaccatactctctgccctggctcctaggaggggagactgtgccaaaacttcatacttcacatttgtgtaccacacacaccatatacatactacacacatgccacacacacacacacacacaagacatactacacacacacattaggcaaactatacacccacacacacactacacacctgtacagtagataaaccatagatattctacatatctgctgtacacataccacacactcatatcacaaacataccgtacctcacgaacaaaactgtacactcctatatgccatacaaataccatgtgacatacactccatataccacaccacacacccatacaacatataaacaccacataccacaccacatcacatatctactacataccatatgtacaggtactcatgacacacccatatatgcatcacatgcatatcacacacgcagaccacatagaaatcatacaccacacatagataccaagtcatacacataccacattccaaataccacaactaccacatgccgtccctgcttcccccagactgcatacagataccacgaagtgcaagaactgaaaccccttgtcacatagggtcactcctgatacacagatccacacggaggcagacatgccatcatagacacggcctcacacccagaatggagcacaggttcacactgtgcacacacgcagcagcaccccagcatccacccagggatgcacaatcacaaggtcacacgtgcacatgcacacgctcagcgctgttagcattcctcaggactggtcatgcacaccctctctgctgcaaaccaacattcactccagcctgctgcatctcgcctcccaaatgactgtctgtgcatgcacacacagcgagaacaccataggcatccaaagccagagtcagacacaggctcagagatgtagtaaccaccgtcaacagtctgccacacagccagggtctggcacaggtctgggggcctctgtagctactgtgcttcccgggtgagcccctcctgctcagcacccccactgacagtggcccctcagcgcccctgcctctcccaccccacttctggactcaggctccttacctcctcaccctcagggacagctgtcctgccttggtcactcagccctgcacagatgcagaaacaccaaacacagctcaacccagagttctgggcagtcacacgcacagctgatggacccacatgtgtgtcccactgtcacatccatagatgtgtgtggctttgggcagcccccacgacctctctctcgctctctctctctcgcgcacacacacacacacacacctaatcttctgtgcccagggacacacacaacaattgacacaggccatatttacatgtgctacaacacacagacacacaaggggacctttgagaaggcttcactgcaggacagggacaaggcctgggtgagatctggctggtaccagatttggggtggttaagaaaggaaagaggagtccagggcctggaagggcaggaatggagggcccaggccccaccttggaccctgccaccccaccccaccccaccccctgtctctctctgtatctctttctggtctggagccatgcttgtctctttgagtctctgactctctcctggagtcccagtctcagcacggatgtccctggggctgcagccagcctgcagaacgatgtcagtgggggtagtggtgagggagagtccccagggagttgggagctgcagtgccacgcaccccgcctacaaaacagtgctgggggaggggatggaggtggaggcgcaagcagccccagtccaggctttcctcttgagacacggagaccctgagcgatgcaagaggccaatgcaagaggctggggtgggggtgggtgtgggggacaaacagggtctcagagagagagattgggagaggggaagggccaacaggctaatgggaccagaggcagggtgagagaccaaggcagagtagacttcccacagtcagaaagaggaagctagacccaaggagacagagacaggcagataggagagaaagaagagacagagacagagagacaaggagagacagaatcagggagattctggaagagggaatgactggagaggggctgagaggaagtaaattagagagctgagagccagggcaccagagaacctgggtcagcaaggatgcaggggagggggcagagatgcggaaaattgagggattagggcagaggcaagagagtggatggaggagacaagagctgagacagccaggaggactcccccccctccacaccatggtgaacacccccacccccaccccgtgtcccccacaccccccttgccgtgtggattcatgactctctttagtgccttccttacctcagtttcagtactggggctctggtgttccctacactaaaacccaggcctcctcatttccacctgctccatcccaggcc

SEQ ID NO: 38 - DNA, 3200 bp, Mus musculus
cgggacaccgggcccgggatccccgagcccgacctcgggcgcctcgccggtcacctccccgcgcggacaccagcccggcggagtcctggagatgggagaagtcgccggaggggcggccccagggcctccccggtctggcctggtgtccatcatcatcggggcggaggatgaggattttgagaacgagctggaggcgaactcagaagatcaaaacagccagttccagagcctagagcaagtgaagcgccgccctgcccacctcatggccctcctgcagcatgtggccctgcagttcgagccaggaccactgctctgctgcctgcatgcagacatgctgagctctctgggccccaaagaagccaagaaggccttccttgacttctatcacagtttcctggagaagactgcggttctacgggtgccggtccctcccagtgtcgcttttgaacttgatcgtactcgacctgatctgatctctgaggatgtccagaggcggttcatacaagaggtggtgcagagccagcaggcagccgtgagccgtcagctagaggacttccgctccaagcggctcatgggcatgacgccctgggagcaggaactgagcctgctggagccctggattgggaaagaccgaggcaactatgaggcccgggagcggcatgttgcggagcggctgctgtcccacctggaggagacccagcataccatctctacagatgaagagaaaagtgctgctgtggtcactgccatcagcctgtatatgcgccaccttggagtccggaccaagagtggggacaagaagtcgggaaggaacttcttccggaaaaaggtgatggggaatcggaggtcagacgaacccccaaagacaaagaaagggctgagcagtatcctagatcctgcacgttggaaccggggagagccatccgctccagattgtcgacatctaaaggtcgaggctgatgagaagccaggccctgcagaccggaagggaggcctgggtatgtcttctcgggacaggactgttgggactcctggacaggacaacccaggagtctccctgcaccctctgtctacagacagcgtcgactcccgggaaccaggcgtggataccccgcaggagccaggggatacacccccacagggccctaccagcctggagcccctggcgcccccagagagcacagaggacaatggcgagactgagagccctgagcccggagatgatggggagccaggacggtcaggcctggaactggaaccagaagaacctcctgggtggagggaactcgtgcccccagacaccctgctcagtctgcccaagagccaagtgaagcggcaagaggtcatcagcgagctgctcgtgactgaggcagctcacgtgcgcatgctacgggtactgcatgacctcttctaccagcccatggcggatggaggcttcttccctctggacgagctgcagaacatcttcccgagcctggatgagctcatcgaggtgcactccctgttcctcgatcgcttgatgaagcggagacaagagagtggctacctcattgaggagatcggcgatgtgctactggcccggttcgatggtgctgagggctcatggttccagaagatctcctcccgcttctgcagccgccagtcgttcgctctagagcagctcaaagccaagcagcgcaaggagcctcggttctgtgcctttgtgcaggaagctgagagccgcccgagatgccggcgcctacagttaaaggacatgatccccactgagatgcagcgactgaccaagtacccactgctgctacagagcatcgggcagaacacagaggagtctacagaacgagggaaagtggagcttgcagctgagtgctgccgggagattctgcaccatgtcaatcaagccgtccgtgacatggaggacctgctgcggctcaaggattaccagcggcgcctggacttgactcacctacggcagagcagtgaccctatgctgagcgagttcaagaacctggacatcactaagaagaagttggtccatgaaggccccctcacgtggcgagtgaccaaagacaaagctatagaagtgcacgtgctcttgctggacgacctgctgctgctgctccagcgccaggacgagaggctgctgctcaagtcccacagccggacgctgacacctacccccgatggcaagaccatgctgcggccggtgctccggctcacctctgccatgacccgagaggtggccactgatcacaaagctttctacgtcatttttacctgggaccaggaggcccagatatatgagctggtggcacagacatcttcggaacgcaaaaactggtgtaacctcatcactgagactgctggatccctgaaggtccctgcccctgcctcccgcctcaaaccccggcccagcccaagcagcatccgagaacccctgctcagcagctctgagaatggcactggaggcgcagagatggctccagctgatgccaggacagagcggctcctcaatgacctcctgcccttctgcagaccaggcccagagggccagcttgctgccacagcccttcagaaagtactgtccctgaagcagatcctgctaagcactgaggaagacagtggagcggggcctccccgcgatggggatggggtgcctggtggtagggcccccggcccagtgcacacccaggagattgaggaaaacttgcttagcttagaggtggccatcagacaactggaggagttggaagaggaattttgtcgcctaagacccctcctgtcccagcttggggggactctgtcccccaacctggctgcacctgaacgctctgctcagacaggcctttcatgaagagaagagtgggggagaggatgcaggggggcccacccccacccccacagctgccacagcatctcacaccccagaggcctggagcagagggagattggctgaacttgatagcagacctgctcgggtccctgcctcccactctggcctctgcctttctccctcctgccttctgcttggggaactcagggcttcactcccagagcacccccttaatccccacttttcaggccgtctcagtattgcctatggggggtcaccctccttcccctaccccaagtgcctttgctatgtttttatatcctggactggaggtttatttttaatatatattatctaaggaaaaaaaaaa

SEQ ID NO: 39 - DNA, 2760 bp, Mus musculus
atgggagaagtcgccggaggggcggccccagggcctccccggtctggcctggtgtccatcatcatcggggcggaggatgaggattttgagaacgagctggaggcgaactcagaagatcaaaacagccagttccagagcctagagcaagtgaagcgccgccctgcccacctcatggccctcctgcagcatgtggccctgcagttcgagccaggaccactgctctgctgcctgcatgcagacatgctgagctctctgggccccaaagaagccaagaaggccttccttgacttctatcacagtttcctggagaagactgcggttctacgggtgccggtccctcccagtgtcgcttttgaacttgatcgtactcgacctgatctgatctctgaggatgtccagaggcggttcatacaagaggtggtgcagagccagcaggcagccgtgagccgtcagctagaggacttccgctccaagcggctcatgggcatgacgccctgggagcaggaactgagcctgctggagccctggattgggaaagaccgaggcaactatgaggcccgggagcggcatgttgcggagcggctgctgtcccacctggaggagacccagcataccatctctacagatgaagagaaaagtgctgctgtggtcactgccatcagcctgtatatgcgccaccttggagtccggaccaagagtggggacaagaagtcgggaaggaacttcttccggaaaaaggtgatggggaatcggaggtcagacgaacccccaaagacaaagaaagggctgagcagtatcctagatcctgcacgttggaaccggggagagccatccgctccagattgtcgacatctaaaggtcgaggctgatgagaagccaggccctgcagaccggaagggaggcctgggtatgtcttctcgggacaggactgttgggactcctggacaggacaacccaggagtctccctgcaccctctgtctacagacagcgtcgactcccgggaaccaggcgtggataccccgcaggagccaggggatacacccccacagggccctaccagcctggagcccctggcgcccccagagagcacagaggacaatggcgagactgagagccctgagcccggagatgatggggagccaggacggtcaggcctggaactggaaccagaagaacctcctgggtggagggaactcgtgcccccagacaccctgctcagtctgcccaagagccaagtgaagcggcaagaggtcatcagcgagctgctcgtgactgaggcagctcacgtgcgcatgctacgggtactgcatgacctcttctaccagcccatggcggatggaggcttcttccctctggacgagctgcagaacatcttcccgagcctggatgagctcatcgaggtgcactccctgttcctcgatcgcttgatgaagcggagacaagagagtggctacctcattgaggagatcggcgatgtgctactggcccggttcgatggtgctgagggctcatggttccagaagatctcctcccgcttctgcagccgccagtcgttcgctctagagcagctcaaagccaagcagcgcaaggagcctcggttctgtgcctttgtgcaggaagctgagagccgcccgagatgccggcgcctacagttaaaggacatgatccccactgagatgcagcgactgaccaagtacccactgctgctacagagcatcgggcagaacacagaggagtctacagaacgagggaaagtggagcttgcagctgagtgctgccgggagattctgcaccatgtcaatcaagccgtccgtgacatggaggacctgctgcggctcaaggattaccagcggcgcctggacttgactcacctacggcagagcagtgaccctatgctgagcgagttcaagaacctggacatcactaagaagaagttggtccatgaaggccccctcacgtggcgagtgaccaaagacaaagctatagaagtgcacgtgctcttgctggacgacctgctgctgctgctccagcgccaggacgagaggctgctgctcaagtcccacagccggacgctgacacctacccccgatggcaagaccatgctgcggccggtgctccggctcacctctgccatgacccgagaggtggccactgatcacaaagctttctacgtcatttttacctgggaccaggaggcccagatatatgagctggtggcacagacatcttcggaacgcaaaaactggtgtaacctcatcactgagactgctggatccctgaaggtccctgcccctgcctcccgcctcaaaccccggcccagcccaagcagcatccgagaacccctgctcagcagctctgagaatggcactggaggcgcagagatggctccagctgatgccaggacagagcggctcctcaatgacctcctgcccttctgcagaccaggcccagagggccagcttgctgccacagcccttcagaaagtactgtccctgaagcagatcctgctaagcactgaggaagacagtggagcggggcctccccgcgatggggatggggtgcctggtggtagggcccccggcccagtgcacacccaggagattgaggaaaacttgcttagcttagaggtggccatcagacaactggaggagttggaagaggaattttgtcgcctaagacccctcctgtcccagcttggggggactctgtcccccaacctggctgcacctgaacgctctgctcagacaggcctttcatga

SEQ ID NO: 40 - DNA, 44075 bp, Homo sapiens
  misc_feature (23457)..(23689): "n" at positions 23457 through 23689 can be any base.
  misc_feature (39458)..(44075): "n" at positions 39458 through 44075 can be any base.
tgcgcttcccaggtaggaagcaaggtctaggtgtcccgagcaggcctgcaatcccgcagccgcgccgctccagccactggggagcagtagagggcctagaaagaagctcagccaccgaaggctcttgaaggtgaattcctagggcttccaggtctggagccaggcttattcctgggagggggttgtaacggggaattgaagtgcagaggggctagtgaccccagcagaacacctggggtcctggttcccagggctacagaactgtcctagatactgtgccaaatgcactgcagaatattcttgcagtcttatcaagtggggggtttgtacccatgttataggagaaaaaactgagtttcagatgaccagtcagttggcagagctgagttgtaaaagaatcctggactcttgaggcccaggctcttctgcgtggatgggaattgcccttttcccatctcctgggttcacgccattctgcctcagcctccccagcagctgggactacaggcacacgccgccatgcccggctaatttttgtatttttagtagagacggggtttcactgtgttagccaggatggttttgatctcctgaccttctgatccgcccgcctcagcctcccaaagtgttgggattacaggcgtgagccaccgcgcccagctggcaattgcacttttttaaaattctgcactctaggaggcagaggtgggcagatcacttgaggtcaagagtttgagaccttggcctggagtggtggctcacacctgtaatcccaacacttggagaggccgaggcaggtggatcacctgaggtcagaagttcgagaccagcctggccaacatgatggaaccctgtctctactaaaaaatacaaaaattagctggacgtggaggcaggagaatcgcttgaatgcaggaagtggaggtcacagtgagccaagattgcaccattgtactccagtctgggcgacaagagtgaaacaccgtctcaaaaaaaaaaaaaaaaaagagtttgagaccagcctggccaacatggtgaaaccctgtgtctatgaaaaaaaaaattggctgggcatggtggtgcacacctgtaattccagctacttgggaggctgagacaggagaacagcttgaacccaggaggcggaggctgcagtgagccaagattgtgccgccactgcacttcagcctgggcaacagagcaagactccatctcaaaaaaaaaaatctgaaatacttcaggcatgcaagtatttagcattcagtattcataatgtaagaaaaacctatgaagcacaacccagtttaagtaacacaggcagggcagggtgcagtgcctataatcccagcacttcgggaggccaagctgggagaatcacttgaggtcaggacttccaggccagcctgggcaacacagtgagaccctgtctttacaaaaaatttaaaaaataggcccagtgcggtggatcatgcctgtaatcccagcactttgggaggccgaggcgagtggatcatcaggtcaggagattgagaccatcctggctaacacggtgaaaccccatctctactaaaaaaatacaaaaaattagccggtcatggtggcatctgcttgtagtcccagctactcaggaggctgaggcaggagaatcacttgaacccgggaggcggaggttgcagtgagccaagatcacaccatcgcactccagcctgggctacacagcgagactctgtctcaaaagaaaaaaaaaattaaaaatagccaggcatggtgtgtgcacctgtaatcccagctacttgggaagctgaggcaagagaatcacttgagcccaggagtttgacgttatgattatgccactggacaccagccttggtgacagagagaggccctatctctaaaaaagaaaaaaaaaaaagtggccagccacggtggctcccgcctgtaatcccagcactttgggaggctgaggtgggtggattacctgaggtcaggagtgtgagaccagcctgcccaacatggtgaaacctggtctctactaaaaatacaaaaatatagccaggcatggtggtggccgcctgtaatcccagctactgaggaggctgaggcaggagaatcacttgaacctgggaggcagaggttgcagtgagccaagatcacgccactgcacttcagcctgggtgacaaagcgagactccgtctcaaaaaaaaaaaaaaaaaaagtaacacaggaaataaaaccaagacaagatgagctctctgtgtctctgtgtgtccctccccagacccaaccctggcgtcccccagaggtaacccctcccaggaactgggcgtttgccactcccctgcacgggtctacacctctgctacaaacgtgtgtccctaagcagcggacgccttttgaaaacaagtcaactgtatcatgctacgatattttttctgatgtttgtgctgtttctgagacagccttatgacaccttcccctattctgtagcattctgttggctcactttgccacagtgtatgcacccattctcccacaaatggacttttcatttgcttctcaatgtttgctaccaaaaatctccctgcaataaatttattttatatatccccttgtatgtgtgtgagggtcccctaactgctcacaaatatctcagcaactccgccctccccactcagacctcatttccctcctaccagacatgctcaaaggaaactgggagcaacacaaagatgactttgaatctctgtccaccacccctagactgtatgacacccgcaagtgacaacctcccctctctggcctcggtttccccctctgtaaaatgggggatggcctaccttgccagtcatggcaggtcaatataaaacaacttctggctgtgcacagtggcacatgcctgtaatcccagcactttgggaagctgaggcaggaggattgcttgaggccaggagttcaagaccagcctgggcaatatagcaagatcccatccctcttaaaaaaaaaaaagaagaaaaatatatgttgttgttgttattattgttattattagagacagagtttcgcttttgtcacccaggctggagtgcaatggtgtgatctcagctcactgcaacctccacctcctgggttcaactgattctcctgcctcagcctcctgagtagctggaataataggcatgtgccacaacatctggctaattttgtatttttagtagagatggggtttcgccatgttggccaggctggtctcaaactcgacctcaggtgattctcctgtctcagcctcccaaagggctgggattacaggcataagccaccatagctggcctgtttttttaaaaaaagaattccagtaaagagctgatcatggttctcactccttgaataccaggaacaccatctcgtatcacataatgagacagggagacattctggtcctcatctcacagatgaaaaatgtcaagcttcgaaggatcaaagtgcccacctagtcacacgggtagtcagccacaggtcagcctgccttatttattcttcatgagtatttatagtgactaacatttactgggcgcctactgtgggccatttctgtgcatgtgacaacccctttaagtccttgtttctaatcccaagaagcaaggaaatggggtcagggaagggacaaggtttgcccaagtccaggcagggggagaggtcaagctcagaaccatcacctgcccatgacacatgcccaggactcaggttccctaggcttccttccaaaggctcagcagtgacgagccagcccttgaaccagcctcttcccccacccaagcagccacctctcaggggaattgtggccaccacaggtgcagggagcagtttctctccactcacagcctgaagcatacccggcaggggctgtccccaggcccaacaagcaaagggcccagtagcgagggccactggagcccatctccggggggctgggcaggaagtagggtggggtttggggtagggatctggtaccctgggactgctgcaactcaaactaaccaacccactgggagaagatgcctgggggtccaggagtcctccaagctctgcctgccaccatcttcctcctcttcctgctgtctgctgtctacctgggtatgtggccaaagggcaggaactggcgggaggtgggggaagctgtggaggctgcagagagggcacaggcagagggaagggggctcagggaaaggggaagaggaggcagaggataggggacccagggaagatgcctatagaaatcgtatctgtgccaagatgggccaaggtggggctggagggagcccagcgaaggagaaggggcgtccacagtctcacacagggaggcaggagcaagagtcacctcccccacctcctgttccccacaggccaaaataaggaactaaagttgctcttgactgagcaccagggctgggggcaggaaggggacttaggggtagcagcattcagcgtctgtcaaggggagaaaaagctttctctgccttaaacctcaggtgcctctctctgttgggagtcccttctcagcactgggggaatgggtgtctcatggactccccctcacctgctcaaggacagctggcaggggctgtggccacgctaacccaggagttcagagaaaaaggttccccacccaaggggacactgggagcaaggattggagttcacgtctgagtcttaagcccgtgacgatgagggtgctcggcccctctccccatctcttcctccttctctcttcctcacctccctcctccacctacctccagaagaggggactggccatgtgggaggcctggctgagagctggggcttcccagaggagcccggattggacactgcagccagcctgagccgcctcgtctcactcagagacacccccagtctccaccccgctctgagccccttcaatcaccagcagcccagcccaaggactgaactcacccctgacccctaggttgacacatacaacttacagagaatgagggccaggcacagggtcacaggccagggcaggccacagactggctcctcagcccaggcagggagaggccagggagccaagagtttgaacccagtgccactcctgactgcctggtgatgctggcaacccgcctgccctcccagagcctcagccatccctcctgtaaaatggggctaaggagagaacctacttctagggttctgtgaatgattacacaagaaaaagcgccaggtgctgggcctggctgaggctggggtgcaaaaatggaccgggaaggctgcgggaggaggggacgcctgcactgcttctggaaggagctgtctggacagcggtcctccagtgcctggaacaaacatccaaaatccagagagttcacagggccagagtacaaagtgggtatgcgggaggggggcaagagatggcgctgcagaggtgagaagggcctcccaggggtcttaccatcccagggagtctcattctcctctcccaggatatcctcacccaccccaaccaggtatgtcctctctccttcccaggggcttcttcactttcccgcatcccccctctccccaggatgtatcagcccctgtcaggggctctctctctccctccccacccaggagagtcctcaccctcttcccaggagtgctggaactgcaggggccagggctggggaaatgtgtcaccatccccagtccctgacccacccaccctgtctctccacaggccctgggtgccaggccctgtggatgcacaaggtcccagcatcattgatggtgagcctgggggaagacgcccacttccaatgcccgcacaatagcagcaacaacgccaacgtcacctggtggcgcgtcctccatggcaactacacgtggccccctgagttcttgggcccgggcgaggaccccaatggtacgctgatcatccagaatgtgaacaagagccatgggggcatatacgtgtgccgggtccaggagggcaacgagtcataccagcagtcctgcggcacctacctccgcgtgcgccgtgagtggcccagccctggcccctactcccactgtcccgctggggacactcggtttatctttgaagtggggatagagccagtaccttcaatgtgggtttcaaaccggcttggacagagggacggacattctcctctgcagagtggggtctctggggggtctggggccttgcaggaggtgggcggggccaggaggctagggagggcaagaggggccagggctctgagccatactacctccttgcagagccgccccccaggcccttcctggacatgggggagggcaccaagaaccgaatcatcacagccgaggggatcatcctcctgttctgcgcggtggtgcctgggacgctgctgctgttcagggtgagccccctcggacctctgagtcagccgggcgagggcctgggccgagggacccccaatacccaggtagccctctagagcctgaggttccccatccaaaacttgggagaatgaaagcacccaccatataggggctgtgggagttaaatgaatgaatataaagaagggacttgaactggcgctgagcccagggggtgtcttcaatttagtttccccttctgggctgtcctcacgtccacctccccccaagaagagtctcattcttctccctaagagtgtcctcactcccctcctgccctcacccaggagtgtggttaccctccaggtgtagccaagaccagggaaggtggggcctggtcctcccagaatctctgatctgtaccagcctctccttaggcactacagaaagtgtgactgttattgttattattcatggagaatagtaagggagtggagactcaagaagacgctagcttgggaggccgaggcaagaggatcacttgaggccacaagtttgagaccagcctgggcaacacagcaagaccctatctctacacacacaaagtcttaaaaaaaaattagccaggcatggtggcacacacctatagtcccagctactcaggaggctgaggtgggaggattgcttgagcccaggagttcaaggctgcagtgaaatatgatgttgccacagcacttcagcctgggcaactgagggagaagaaagagagagagagagaaagagagagagagagagagagagagagagagggcgagagggagggagggaaggaagggaagggaagggaaggaaggaaggaaggaaggaaggaaggaaggaaggaaggaaggagaacactggttgtagactcagagagaactgttacataaccagtatgtggccttggggacatctcttaccctttctggaaaagtacttcctggcatccaggagggtctgaaagatattcacctccccctgctcactgaggcacccaccccacccacccctacagaaacgatggcagaacgagaagctcgggttggatgccggggatgaatatgaagatgaaaacctttatgaagtgagtgaagggtggggatggggtaggggcagttgtgttaggggtgggggtgttccctctgggggtggctgggggcagggaccccaggtgtcagggtgctgatgttcgctgcctcatttccatcccagggcctgaacctggacgactgctccatgtatgaggacatctcccggggcctccagggcacctaccaggatgtgggcagcctcaacataggagatgtccagctggagaagccgtgacacccctactcctgccaggctgcccccgcctgctgtgcacccagctccagtgtctcagctcacttccctgggacattctcctttcagcccttctgggggcttccttagtcatattcccccagtggggggtgggagggtaacctcactcttctccaggccaggcctccttggactcccctgggggtgtcccactcttcttccctctaaactgccccacctcctaacctaatccccccgccccgctgcctttcccaggctcccctcaccccagcgggtaatgagcccttaatcgctgcctctaggggagctgattgtagcagcctcgttagtgtcaccccctcctccctgatctgtcagggccacttagtgataataaattcttcccaactgcagaccttggcaggagtcgtggatcttacggaaaccgcctctcccacatgtccctcagacccaggagtcccagcccaagccactccctgcccactccccacacctgggaccaggtagccagtctgggctgccctcctgggagaacaagatgtctcttgggaaggtccccagaccaactgaaggactggtttggccctctttgcagggcctcaccctagggtcatatccttaagcaagaaggggacaagatcaagatggctgtggctaccaaattacttacacttttttttttttttttttttttgagacagagtctcactctgttgcccaggttggagtgctcactgcaacctctgcctcctgggttcaagcgattctcctgcctcagcctcccaagtagctgggattacaggcgcctgccaccatgcccagctaatttttgtatttttagtagaggcggggtttcaccatgttggccagactggtcttgaacctctgacctcaggtgatccacctaccttggcctcccaaagtgctgggattacaggcgcctgccaccacgcccggccgctttttttttttttttttttttttttgaggcagagtctgactctgtcgcccaggctggagtgcagtggcgcaatctcagcccacttcaacctccacctcaagcgattcttgtacctcaggctcccgagtagctgggatgacaggcatgtgctaccacacccagctaatttttgttttagtagagacagggtttcgccatgttggccgggctggtctcgaactcctgacctcaagtgatccaccatgcttcggcctcccaaagtgctgggattacaggcatgagccactttatgcgtatttaagccttggaaacacagggactatcttgtggattggggctagtacagaattcagactgcagccttttcccgatgcgttgacttacagaaggggcattttggagggtctgtggtcctaacctggggatagcagggagatcccggggcaatgacagagaggcacagagacacggatttcctgagaaagggagaggagagaggctgagacccagggatcatgaaggggacgagcaagggaaggaagagatgatgagaccctgggaatccgggagagagacagggacgtggagagaaagggacagagagagagcgagaaggaaaggaagagacagaagggagaaggggcaaccgaaaatgggcacgaagaggcccaggcacagcaacagctggggaaatgacagagactgagacggagatgcagaaagatacagagagagctggagagggtagagaagggctttcggggagaaagtgatggagggacagagaggagaggtggaggccaaggagggaaagaccccagtagagaaagacagagggacagagaaggggatgcagacgcaggcgggagcacacccacagaggcgaaggaagggcgcaagaccatgagaaccacagacgcggaaagccggggaggtcgtggctcggtctagggcgcacggggagcagggcttgccccccagcacctccggggaggtgaccccagccgggagatgcgagtcccgcggagcccgcgcccggcggacggaccgatggacaaagccggggagagctcgggcgcggccggggcgggggccggtgcccgcagggacccgggcgcagcggggaaaggaggggcgggcaagcggcgagaaggggaaggaagcggaggtgccgggcgggcgcggggcgcgggcaggaagcggggaggggcggcggggcgggggcctccggaaaaacgccccgacttcctgccccgccagagccaggaagcgggagccgggacccagggcccgggatcgccgagcccgacctcgggcgccccgccggtcacctccgcgcggacaccaggtactcggtccccggccccgcccggcctcctcccctcggctgttgggggaagtggggaggaggagggaggggctggggcgctgccggcagcggaggggcccccttcggaccccacggaaccagcggccgcccctccttgggcctcagttttcccatctgtcaaagggagcaaagaggggagaactcacacttgacgagtgccccataggtggggacgaacggtgcgaggccggggccaaggcctcccacctgctcagtggagaacggacgatcactaccattgtacgggtggggaaaccgaggcccggggagccaaaccgactcgtcccagggaacgcacatcgtgagaaagtgtggagttgggatttgaactcgcacgtgctttccgcaaagcgccatcctccaacccccgcatgctttagggccacctaaaaatgaaaaacaacaataacaacaacgacgagggtcgctgtgaagctgaaagttgcagagtgcatttgaaagagttttcggaaagctcttttctaggtcattaattataccgtgagagacaggtgtagggagagagctggaggccttctcccattgtacggatgggaagactgaggtctacagagaagtcattactttttgcagattacactgcatgtcagagggaaagttgtgctggaactcaagactattgcttttccggttccaaaggaaggggctgggggtgggagacggaggggattgatgtacgaggattggaaattcagcgggtcccctaagtggggagactaataggacggggagccccagtccgccgtccgagtgctcagcgctggggtgactaggagatctccgatcgaactcgggaggagttggacccatctgcacctccgggcgcggggcggggcccggggagtgacgggggcagtcgagatacggaaacgctggccctccaagacaggccagagcggccctatctggcctgcgtggcgcagtacagcgctagagcggccggcgggaggagtagagtcgtcggggccggagcccggcaggagccgggctagagcggctggcaggaggagtggagctgggcgcaaaggtggactcagggcggctagagcgacgcggcggcaggggtggggagagtgcggagcccgagcgcggaggcttcggttccggtggcggcgatggcttctctttccacctggagcaggtgagggacgcggtccccagcgggtgtcagaccctgactctgcacgtcctccccggcatccctggccgtgcacactgccacgtcccccgtaggatttagggcccgcgtaagacccgccacgtccatgtaagatttgggtctcgtgtagacccgcctcattccgtataaagtcttacagaccctccaggttcctgccagccccccatggagaactggcttcttatagacgtggggtcctcatagaccagtggcatcccctagaatccggggctctatagaccatgggtctcgggacccaccacgcacccctatggaattctgagtcccttttaagtctccagaggttccacagactggcagctgtccctatagaatcatgatcctgtatgatccctggatcctttagacccactgtgtgtcaaatagaatctggggagttacacattccaacgactcttttaggttctttaaggctccagaagttcttggagaccctgagtcacctgctcaacacattatagaccctgagacctccatagaactcaacacccatgtggccccccaacccatggaccttctaaaccagccctaaccccccagcgccccatgcacgcagtgttccctctgctggaccccccaggccttgtcagttgcctatagatccatctattctctgacagcttcacctataattctccagcctttgtgggactcccccaaacccctcctcctaaacaggcgacactcctcgcctccatcatctccaacccccaagcctctgtggagcagccgtatccaacttgcactcctgcctaggccatagtgaccacatacccgtgacttttccaggcatccataagaagacatgatgtgtctcagagctttggttcagattttagtttctgaagggtagggtgggggctccccatgctctgaagcaatgctctctgttttattttgttttatttatttatttatttatttttgagacgaagtctcacttctgttaccaggctggagtgcagtggcgcgatctcagctcactgcaacctccgcctcccggattcaagcgattctcctgcctcagcctcccgagtagctgggactacaggctcgtgccaccacgcccagctaattttggtatttttagtagagacagggtttcactatgttggccaggatggtgtcgatctcttgacttcgtgatccgcccgccttggtctcccaaagtgctgggattacaggcgagagccaccgtgcctagcctattttattttaagacaaggtctcactctgtcgcccaggctggagggcagtggcacaattttggctcactgcaacctctgcctcctgggctcaggcgatcctctcatcttagcctcccaagtagctatgactacaggcatgaaccaccacacctggctatcttttgtagagatgggggtttcaccatgttagccaggctggtctcgaactcctgagctcaagtgatccacctgccttggtctcccaaagtgctgggattacaggtgtgagccactgtgtccaccaaatgcagtttattttaaatgcgtaaactctgtagcccaactgcccaggtctgagtcctggttctgcctcttatgagctgtgcctcagtttccttctttgttaaatggaggtgagaataataatgatctcttggagtcaccgagaggattaaatgagttattacctgtcaaccagcgatgccatgcctggcacatactaagtgtctcttttgtgtcagctgtcatttcattattattgtgataaggaataaggagataagaacttggcaagtgcacagttccagacctggcaccaagcacttgcaaagataatgagtatcccctcctttgcctttttaaaatttccctgcctcagttgagcgtttctacctctgagtgggatgagcatgcaccctccacgtccgtggtcatgtttcatagtgagacagggtctcactgtgttccccaggctggtctcaaactcctgagctcaagcgatcttcccaccttggcctcccaaagtgctggggttacaggcatgaaccacctcacctggccagtttgcaaatttattaaagtgaatgtttaacagtacttgaatcttgaattgcccaagcttagatattggacaatacactttgtgggaaataataaaaatgatgccttccccaggtggacccacagggtggcatttggacactccagaaagcatcattgtttaatcatcaaaatcctggttaccatttactggggagctagggaggaggcccataaagcaggagaagggcgggtctctgctggcttgggttataaatagctttgggctgtggggagccccgccgctggtccaccccacccctctttccacagctccttcccacctgacacgggctccgtggcattagtcagactaattaaggacacagaagatgtcggtggaaagactcagagagaagtggagactcaaggagagacaaagatgggagagacagcaagagatgggggagaaaaagggatggagagatgagagacagcacatgagactgtgactcagagaggtgtgaggatggtggctgcagaaaccagatgtgggaggacagaggcacagagacagggacaggacagacggagctacagaagcaggaagggggtgtcaccgctgagagggagagatggagggaggagaggcagggatggtggggaaaatgagacagttctggaggaagggaaagagaaaaatcaggaaacagggtgaaaagagaccaagacatgagacagattcaagggacagacagccaaggagagctggctgcggacagaccaaggcgcacgtagggtggaggggacagacgcaccttggagatgggctgtctgaggccccatcacttggtttctgggactggaagcctgggaagagatgaggtccctgggggaaagaagaacttctgggtttggggactcccagtccctgagggaggagggttctgagttttgttttcttatgtggagagttgggggttgggggtttgccattgtgacttcctgtcacaggaagtggggctggtgggttccaaggcaacatcctgtcccaggcctgtcacagaccagaggagacccctgcaccccacttctctcccgcctctcctctaaccctcccatcccctcttgcctctgggctgtgccctcaggaattagcccccaggcccctggtccctccaacctgggagtccaggcccccagccccctcttccattagggcattagggaccccagattgcaggctgtcagactcagccttcccatggacccaggctcctgagcctccaacgcctgcccccgcaaggctcccgtccctgggctcccgccccctggcgggtctctgaagggctctttgtggccacacagaggccccattgagctgcggaggctgggatgggggaggctgtttactcaccttcacacctgggccaggaatctgtgagtaaccaccctgggccgcctcctcccaccctcctaaccacagcccctcctcttcctccagccctgcagagcccagggagatggaagacttcgcccgaggggcggtgagtggacagagcaaggggtgaggcgactctggggctgtgggtggagagtcctgtggactgaagctgccctccctttccacaggcctccccaggcccctcccggcctggcctggttcccgtcagcatcatcggggctgaggatgaggattttgagaacgagctggagacagtgagtgggagatagggtggaaaagctctgtcccaggctcagtgtcccgccccaggtcccctcccacctgcagatgctgtcttcttggccttttcccacggtctgtctcatcctctcatctccctggtacctccttcctcacctcgccgaccccacacagcagcatagacgcccacccttcttactcttaaccccatttcttatcgttgctctctcctcccccagcatggaccccaatttcttctctcctaatttctgtcctcatcatccaccattataatattaagtctcatccattctccctgaacacctgcccttgctgtcaccatcattttttggacactgtcaccactccccacttcccaggagctaaccctggcttggatcccttgtgaagtgccaggaatgggtagggtcaaccctaaggcccctcctcttctccccattgtactcaccccttcctgcacccccagaactcagaagagcaaaacagccagttccagagcctggagcaggtgaagcggcgcccagcccacctcatggccctcctgcagcacgtggccctgcagtttgagccaggacccctggtgagggcagggctgggtgggcacagggaggggtggggctgggacaggcacagcttttagcgaattaaaccagcgagctagtgcctggagggtctggaaaagcagatctagaacacagagagccagatctagaaagagagaatgctttagacaagagccagaaagcatgccacgtgacctcaacaggcttacaagtgcccagggtagatctcagtgcgcagcgggcagggtacacacgtcaggaccccgcggagccacagagagtccagcagcctggcagaaaccacatcccatcccactctgtgcctgtggcagcgcccccatcagcctgtggcagcacctttccgtgaactctaggggaccaaattcttctctccaaagcctttttggcagatgccagcacgcagtcattcacggttgatggttgggaaaaagaagctgttagccatcccaggtctagggagcacagcaggccctgatctggaaacaagaaaaccaccacacacagctcacaaggcagaccacacaattgtggatccagaagcctccggatgaggcagaagatacctgggagatgtggatggacaaccgtgccatccagaaacacccgcagagtctagaaaacccagcaggtgatttagaaagggagaggccacagtgctggctggcaggggatctgtagacaagggtctcatcccaagaagaccccgtccagcccagcacaggataggaggacagcctggggacagccagggcactgcaccatgtggacatgcatagtggacccctccagaaaacaaggaaaccgatagagtggggagaagtgcccgaggcatgcagaaagaagaacatgtcagctgcaagaccagaggctggtcatccggacgccaaaccatcagatatgcagaaaattaggaaattgcagtctttcccctgtctacattctctttccagaagagtggttcccccgacaaccacatgcacggagactctggccctctgagcaagggagtcccctattcaagccttggggtttctagaacaccagattgtggacatcagcccagggatcgtgctgactaccatgttcttttacagatgtggaaaccgaggcctagagagggtcagggacttgcctgaggtgaccccggcggcctctgggcattttgaggtttattctcgcatagctccctcacctcatcagcttgtggggagccgatcagagatagctgtggtcccctgggcagcttcctgttggcctgtcttagaattttgctatatttggggggtgtgaagagtggatatagatgtgttaaaactgtttaaagtggagaaggaggaccgggcctggtggttcatgactgtagtcccaacgctttgggaggctgaggcaggaggatagcttgagcctgggaggttgaggctgcagtgattgcaccactgcactccagcctgggcgacaagagtgaaaccctgtcttgaaaaaaaaaaaaaagtggggccgggcatggtggctcacacctataatcccagaactttggaggctgaggtgggtagatcacttgagatcaagagttcgagaccagcgtggccaacatggtaaaaccccgtctctactaaaaatatgaaaattggccaggcgcagtgactcacgcatataatcccagcactttgggaggctgaggcaggtggatcacccgacgtcaggagttcaagaccagcctggccaacatggtgaaatcccatctctactaaaatagaaaaattagccaggcacagtggtacacacctgtaattccagctactcgggaggctgaggcaggagactcacttgaacctgggaggtggtggttgcaatgagccgagattgcaccattgcactccagcctaggcggaaaaaaaaaaaaaaaattagccaggcctggtggtaggcacctgtaatccaagctactccagaggctgaggcaggagaatcgcttgaacccaggaggaggttgcagtgagccgagatcacgccactgcactccagcctgggtgacagagcgagactccatctcaaaaaagaaaaaggagaaaaagtcccactcccattggagtgagttcatttcccagatgagagcccccaggagccaggacaggttggagtccccactgtcacccagaacaggggcgggcactcaggaaatgcttgacgaatgacagagtgagccccacttgtccacctgttctttccaagccctcagtatgcacaaggcaccaccatctgggacacagatggatcaacctacaacacccctcaacacacacaaacccttaagctgctcacagtctttccaggcagtggagtgtagtagagacaggctgcctggattcgaatcctaactttgccacttagtagctatgtgattttgggttttatttatttatttatttatgaaacagtctcgctctgtgtcacccaggctggagtgcagtggcacaatctccactcactgcaacctccatctcctgggttcaagcagttctccctgcctcagcctcccgagtagctgggatcacaggtgcccaccaccacacccgactaatttttttatttttagtagagacagggtttcgccatgttggcctggccggtcacaaattcctgacctcatgtgatccacctgccttggcctcccaaagtgctgggattacaggtgtgagccactgtgcctagcctagttgtgcgactaagcttgactaaacttcttgagctccgttttctcatctgtaaaatggggataatgacggtccctatgattgaacacgttaatgcatgtagagggtgtagagccgtgtctggtatacactaagccgtcagtatagacagtagtagtagttgttgtcattattgccgggaggagaccatgatgaagaaccacaaaggaccatagcacaggatggaaaattagaaaatgctcatggcagccccagggagcctgcaggggaacccagggcctggctttaggggtggaggtcagggagtgcttcccagaggaagtggcagttgagtcccacagccataggatggccaggaggtgaggaaggcccttttcaaagggagagtgtggtttgaggcagggtgagggagcggagagtcatgctgtgtgtctcccccagctttgctgtctgcatgccgacatgctgggctcactgggccccaaggaggccaagaaggccttcctggacttctaccacagcttcctggagaagacagcggtgagagaccttcaagctgccccaaccctgcaatccctgtttgggcctgcagagtcaccatgcggtccccagcctctgccctgagggcagctgctgacccaggccttccccagcaccctcgcttagaccagggttcctggcagtcctcccggcctgcatctcagcacaccaagtcctcctcttcaccccattctctctcttgagcaggttctccgggtgccggtccctcccaacgtcgcctttgaacttggtaaggagaaggatgggatgagggagaggtgtctagcggggaccacacctcccaggaggccaaggggagggaggccgcactcccatgctctgctcggacagccgagattcattcattccttcttggcagcggcctcaggacgtgtggctgttggagtccaagggtgggtggggaccgtggtccaagccaccagggagctggaccctagcccccatgtgtgtccctgcagaccgcactagggctgacctcatctccgaggatgtccagcggcggttcgtgcaggaggtggtgcaaagccagcaggtagccgtgggccggcagctggaggacttccgttccaagcggctcatgggcatgacgccctgggagcaggagctggcccagctggaggcttgggttgggcgggaccgagccagctacgaggcccgggagcggcacgtggcggagcggctgctcatgcacctggaggagatgcagtgagtaggccagccctggtgggagcgtcgcccctccccagcacaagggcacccgtgctacctctggcatgttccatcccgtttgcaggttccctcttcagggtcagagttcatttcttggcactgggggtcttcctctaccctggtgttttaactcaccttgaatccgagtcttccctttccagctttggggttcccttgtcatttctgggtcttgtccatgatctggcacttggatcccatcctcctggatgagagacctccctccctcttatgacagtccttcccaatcccttccacagtgtcccctctctgtctctcttccccctgcctatcccaggacagcaaccctgagatgtatcctgggtggatggggaccccaggcctagcaaatatgtcacaaacatctctcttcctcctacagacataccatctctaccgacgaagaaaagaggtgaggggggcaggggaggcgtgcggcctcctgggtttgagggaggagggggctgagggcctggactcctgggtctgagggaggaggaggctggggggcctggacgcctgggtctgagggaggagggggctggggggcctagacgcctgggtctgagggaggagggggctggggggcctggacgcctgggtctgagggaggagggggctggggggcctggacgcctgggtctgagggaggagggggctggggtcctggacgcctgggtctgagggaggagggggctgggggcctggacgcctgggtctgagggaggagggggctgggggcctggactcctgggtctgagggaggaggaggctgggggcctggactcctgggtctgagggaggaaggggctggggggcctggacgtctgggtctgagggaggagggggctggggggcctggactcctgggtctgagggaggagggggctggggggtctggactcctgggtctgagggaggaggagcctggggcctggacacttgggtcctgggcattgggtaacagcccttgcccctgtccttttgaaccctctcatctctcctcagagtctcacaggaagtagttgtggggtcaggatgggaaggccgggcctctgcctctagggggagagagagagagtgtgtgtgtgagtgtgtgtgtgtgtgtgtgtgtgtgtgtgtgtgtgtctttgtgtgtgttgagccctcactgtcccttccctacagtgctgccgtggtcaacgccattggcctgtacatgcgccaccttggggtgcggaccaagagtggagacaagaagtcggggaggaacttcttccggaaaaaggtgcttccctcagtgccccgtcctgaccctttcctctccagagacgccctgggagcctcatgactctggatacctagcgtcaaattctgctttgttgttgtctcagagatgcttagcctggtcttcctccccgccctctcacaggtgatggggaaccggcggtcggacgagcctgccaagaccaagaaggggctgagcagcatcctggatgccgcccgctggaaccggggagagccccagggtaaggcggctctggcctctgccctcccctgtcttccccagctgctcccactcactgtctcattctctctcgtttcagttccagattttcgacacctcaaagcagaggttgatggtaatgtacctgtagccatagcatccatactgggggcctgtgtgggagaggctaggacctggacgcctgggtctgagggaggaggggctgggacctggacgcctggttctgagggaggaggggatgggggcctggacacctgggtctgagggaggaggggctgggggagctcctgggtctgagggaggaagggctgggcctggacccctgggtctgagggaggagggactgggcctggacccctggctctgagggaggaggggctgggggagctcctgggtctgagggagggaggcctggggcctggacccctgggtccgaggtaggagggattgggcctggacccctgggtctgagggaggagcggctcagactcggactcttaggtctgaggaggaagggctgggcctagacccctgggtctgagggaggaggggctgggggagttcctgggtctgagggaggaaggcctggggcctggacctctgggtctgagggaggaggggctgggggcctggactcctgtgtctgagggaggaggggttgagggctcctgggtctgagggaggaaggggctccttgtcatggtggggaagggcctgagcacagcctcttgcatcccctggcggttgtggatttgagttactgttctcttatctccctctttctccctcactgtctccccagccgagaagccaggtgctacagaccggaagggaggcgtggggatgccctctcgggaccggaatatcggggctcctgggcaggacacccctggagtctctctgcaccctctgtccctggacagcccagaccgggaaccaggtgagagtttcctgggccagggctccatgaggcccggcgatccagggtgggggtgctgcctgcccccttggcacccccagatagaagccattccccagcaacacctcccctttgctctcagcatccacttctccctgctcctggtcaccactgtcattcataactttccccttccctcagtttgccctttccacagctttgctcccaggctctgacctctctgctggtgctgcgtctcccacccccttggactacgttttccatcaacccttccttttccagaaccttccctgagtacatgaccagtccaccctctgagctgcattgctggccccctaggtggggagcccgccagccccatgagcttcatccctcaccatccttacactgctgtggcctcaggcccttggatctctgcatggccaggccagggctcacacaccagctctgctgactgcttgtgtttatttagtatcttggatatgactcccctttcttagcctccgtttgcttttctctaaaggagtatgagagggtggggaggatgaatggacgtggaggcagcacagaatccagggccctcccgacctcagggggctgcagtctggttgggtgggagagatgtttgtgacctatttgctaggcctggggtccccatccacccaggacacacaggggcacccacttctgttgcatcttcatgctcctgcccctagtggccatgttctgagaggtcttaacatctgtccgtcccgtgctgaagtacagagcagccatgtggtgtctgccaggcactgggtagctttagcccccgcaattccaggcccccagagtgtgggtctcgtggccgcagaggccttccagccagccctgctccctccaccccacaggtgctgacgcccccctggagctgggggactcatccccgcagggcccaatgagcctggagtccttggcgcccccagagagtaccgacgagggggccgaaaccgagaggtgcccaggctggggtgcaggggcgggaggtgtggcttactgggcgctggtgggtgggtgcagggtcaccgctgccatctgtgcctgcctgtcccaggctcttgctccccatgctcctctgctgctctctgggtctggccattcctctcccttcttctttccttttctcatctccctcctgcttcctcattgcccccctttccttttatccttcctttttcctctgctccttcctctccttccttttttcactaatccttctcctcctcccttcctctccaccactccttccatctccttttatttccccctcctctctcacctcccctctcctctctcacctcccccctcctctctcacctcccccctcctctctnnnnnnnnnnnnnnnnnnnnnnnnnnnnnnnnnnnnnnnnnnnnnnnnnnnnnnnnnnnnnnnnnnnnnnnnnnnnnnnnnnnnnnnnnnnnnnnnnnnnnnnnnnnnnnnnnnnnnnnnnnnnnnnnnnnnnnnnnnnnnnnnnnnnnnnnnnnnnnnnnnnnnnnnnnnnnnnnnnnnnnnnnnnnnnnnnnnnnnnnnnnnnnnnnnnnnnnnnnnnnnnnnnnnnnnnnctccccttctctttcaagcccccctgccccctgccccccaccccccgcctcgctcctgcctcctggtgcccgtccctcaaccccccacccctctgctctgtgccctgggggccctgtcccccttacagctggggggcaggctctgcctcctgcccgtccttgtgccgctgctttggggaccctttggtgggtgcggggaggtgggtcaggttccatctgggcccacctctgaccctgtgcccctctctccccagaaggtggaagaggtgggtgcctgggccctgggtgggggaagggctagcccctcccccatttgctcccagcccctcccctctccccatggccactccctccccttcactccctgtgaggggtgggtggggacatcaccctcccagttgaagagctaagtatggaaatcctccccaccccataacaccccctctgttgccatccccctgcctcagggaagggagggggtcagtcctatgctccatcctgggttccccatcccttcccccatcaaatttcagtatcccccctcccccaagaccccccactaccccagtgcccctaaaatcccaccactcctctgactctctcctctcttctgttgcatgtttgatccctgtcctggtcacccttgccccggtcctggtctctccctgtctctgtccctgtcctggtctctccccgtctctgtccctgtcctcgtctctccccaatttctgtccctgccctggcctctccccacctctgtccctgccctggtctctccccgtctctgtccctgtcctggtttctcttcgtctctgttcttgtcttggtctctccttgtctctgtccccggcatctgcctgactctgtccttggcctcggggtccaggctatcagggcgtctggggcgctcagagagcctgcgggtgagtgaccgccgccggccttcccggggcagcctcggggctaagggccggggtgggggccgctcccggagcgacgtggacatggaccccagttccgccacggcagtgcttggccctgcccgacgagccacgtatgtcaaccctctcccttcccccatccactaaggcagcctggagaatcagggagggattgttgtcagagtcacagaggaatgggcgttggagaccgaggtcattgaggccaactgtggtcacagaccttggaggaggagggggtagaatgcttctagagatctgggaactctagtgtggtccgatctagagacctggtctgctgcacgggccaccctgcgggcatcgaatgccaaggccactgaccggggttgaacgctctaagaggctgaaggctgcttcttgggatggcccaagctggggccctaacaaggcctctgtccacagccccgagcctggagatgagggggagccggggcggtcgggactggagcttgaaccagaagagcctcccggctggcgggaactcgtccccccagacaccctgcacagcctgcccaagagccaggtgaagcggcaggaggtcatcagcggtgagtactgcccccatcaccccactgtggccaaggacacagtccagctctggcaaaggcaaagacaggcgcagagagatgttcatcttggtgtcatttaccatcgggagaacttgaaggcagcttcaaattccctcttgttccaagttcagattgtttcaacacagagcattttgatggaatgtgaatgccactgtggaagggacatttccaaacatttctagtagtgcaatacagtgctgatgttgagaacactgcatttctggtgcaagcttttatttccttgcttgtgaaatgtgggcattaatagttcctacctcagatattgtcatgaagatgagatgatttgtgtgaaatgtttagcatagtgctgggcacagaggaagagcattttattttatttatttttttaaatttttatttgaggcagagtctcagttggtctctcaggctggagtgcagtggcacaatcacggctcactgcagccttaccctcccaggctcaactgatcctcccacctcagcctcccgagtagctgaacaggcatgtaccaccatgcctggctaatttttgtattctttgtagagatggggtttcgccatgttggccaggctggtctcgaacccttgggctcaagtgatcctcctacctcagcctcccaaagtcttgggattacaagtgtgagccaccaggcccagtcaaggaagagcattttaatgagattgttgttactagtttgatcttaattgcttaggggagaaaagatccccacaggggaaagtttgggagaatgatcagtatattagcagtgcttgcttctgcgtggagagatgatgagtgtatcatttttgtctttttccttttttcctttgctaattgtgtggtggctagggaggctggtggcaaaaagagaaagctttttttttttttttttttttaagacagagttttgctcttgttgcccaggctggagtgcaatggcacaatctcggctcaccacaacctacgcctcccaggttcaagtgattctcctgcctcagcctcctgagtagctgggattacaggcatgtgccaccacgcccggctaattttgtatttttagtagagacggggtttctccatgttggtcaggctggtctcgaacgcccgcctcagcctcccaaagtgctgggattacaggcgtgagccactgtgcctagcccaagagaaaggtttgggacttgactgaaagcttatttacagattacttcatagtgaaaaagatacttattcaaaaattttaggggagtagttgagtactttttgggtcacagatccttctaaggacatgataaaaaaaaaaaaaaacatgagccatgtgctacccattaggactttctggaagatggaaatgtgctttatttgtactgctcaccatggggaccatcggccacctatggctggtgagcacttgaaatgcactaggccaggcacagtggctcatgcctgtgatcccagcactttgggaagccgaggtgggcagatcacttgaggtcaggagttcgagactagcctggccaacatggtgaaaccccatctctactaaacatacaaaaattagccgagcatagtggcgcatgcctgtaatcccagatactcgagagagtaagccaggagaattgcttgaacccaggaagcaggagatggaggttgcaatgaacccagatcactccaccacacttcaatctaggtgacagagcaagactgtgtctcaaaaaaaaagcactaaatacaactgagcactgacttaaaatttcattgcaattaacgaaaatgtaaagagttgtacacggctggtgactatcacgttggacaggatagcaatttctttccccagaaagaatatgcataatgtacaaaatcgtgcttttagtctcaggggacttctagggcccctgaaactcacacatatgccctccggggatgtgggggtccctggatctgaggctgtcaaccactgtataatgtggcttgatggttagacactaaacacagctgcaagcttgctggcaggtgggatgactagcttgtccccatttgctcaggatattcacagttttatcactgaaagcccaggcaggcaaatgaggaccattggtcactctggccagctgccacagcgaaaagggaaaggcagtgggttgaggaatcctcactggttttttttttttttttttttttttgagacgatctcgctctgtcgcctaggctagagtgcagtggcgtgatctccgctcactgcaacctccacctcccaggttcaagcgattgtcctgcctcagcctcccaagtagctggaactacaggtgcccaccaccactcctggctaatttttgtatttttagtagagatggggtttcaccatgttggccaggatggtcttgatctcttgacctcgtgatctgcccgcctaagcctcccaaattgctgggattacaggcatgagccactgcacccggcccctcagtggctatttaagagggcaaatgactccacccggagagtttttttttttatttgtttgttttgttttgtttttttgagacggagtctcgttctgtcaccaggctggagtgcagtggtgtgatctcagctcactgcaacctctgtctcccgggttcaagagattctcctgcctcagcctcccgagtagctgggactacaagagtccgcccccacacctggctaatttttgtatttttttagtagagatggggtttcaccatgttggccaggctggtcttgaactcctgaccttgtgatccacctgcctcagcctcccaaaatgctgggattataggcatgagccactgtgcccagccattttgttttgagacaaggtctcgctctgttgcttgagctggggtgcagtaatgccatcatagctcactgcagcctcaacctcctgggctcaagggatcctcccacttgagcctcccaagtagctgggactacaggcacacaccaacatgcctgggctaattttttttcttttttaaatttttggtagaaacagggtttcaccatgttgcccaggctgatcttggactcctgggttcaagcaatcctcttgccttggcctcccaaagtgctgggattacaagtgtgaaccaccatggctagccagagagagttttttcccaccaacttctaggaagctttcctccctgctctgcctcattcctctagcctgcccatgaggtcatgccccctagtctgcaccctccccaacatgcttcctgctttggtggccctgcagagctgctggtgacagaggcggcccacgtgcgcatgctgcgggtgctgcacgacctcttcttccagcccatggcagaatgcctgttcttccccttggaggagctgcagaacatcttccccagcctggacgagctcatcgaggtgcattgtgagtgcagagccagggtccctctgtgtaccccactgccccacgggcagctctgctctagccctgggttcaacctgctcgggaaccccagggttcacatggggtgggggcagatacgccatccggtcccgaggatcagacacagacacacctgcagccctacccccaccacaccgcagcaggccccgcacagcatcttccagaccctggtggagcatccctttcctcctgcccccacagccctgttcctcgatcgcctgatgaagcggaggcaggagagtggctacctcatcgaggagatcggagacgtgctgctggcccgggtgagatgcccagccctcccgctcctcccagctagacacatggaattcaggcccgggacgggtcctgagcccaccctactccagtcccagggtctgggcttccagcctgtcgtactttagtccctgttcttgcccatccccactgagacacctgcctggcctgaatctcgctgtagtttgatggtgctgagggctcctggttccagaaaatctcctcccgcttctgcagccgccagtcatttgccttagagcagctcaaagccaagcaacgcaaggaccctcggttctgtgccttcgtgcaggtgaggtggggtctggactccagcttcccagggaggaggggcctggagacccagactcctaggtgcctgcgccctggggtgagcccaaagcctgggccatcgcaacaccagcatgtttcccgcaggaagctgagagccgcccgcggtgccgccgcctgcagctgaaggacatgatccccacggagatgcagcggctgaccaagtaccccctgctcctgcagagcatcgggcagaacacaggtaccgcgggcctggatctctgggcctcggctctcctcttttttttttacattttttttctcactcattttcatcagtgataccatcacagctcactgcagcctcaacctcccaggatctaccatcctcccacctcagctccccaagtagctgggaccccaagggcacaccaccatgcccagctaatttttttagtttttttttttagagacggggtctcgccatgttgcccaggctggctttgaactcctggtctcaagctatcctcccgcctcagcctcccaaagtgcttggattacaggcgtgagccaccatgcccggccagctgtcctttgtctaaccttggctgcccaatctggagcctccagggcaggggttcaccagagctgctctctcccttgcctgcagaagagcccacagaacgggagaaagtggagctggcagccgagtgctgccgggaaattctacaccacgtcaaccaagccgtgcgtgacatggaggacctgctggtgagcctgggctggccccacacccgggacagtggatggtgtgagagcagggggtggaccctacctcagcctgtccagaagtcacaccccaccccttggcttgtctccctcaagggtcactgtgtgtccaggggttggcttggccctcagcatctccctctcagggtcattggaggtcaggcccaaccctcagcttgcccgcatcagaagttggtcttggctctcatcttaccaatgtgggtcactgcaggtcagccccagcacttagcttgtccccataatgctcccgtctctgccccagaggctcaaggactatcagcggcgcctggacttgtcccaccttcggcagagcagcgaccctatgctgagcgagttcaaggtgtgaccataccctcctgcctcccccgcccccctactccttggcccaggggattctgtgatacagcccccagcctgtcctgcccatcccataatacacccaggaagcgagagctctgtcccccacctcatgccaatcccatgatccccagcctgtggtcatccccggccactgccctgcccttcccctccccaccaaccccaatcaccccctgccaacctgcacaaaccatcaccccctcctgccccagaacctggacatcaccaagaagaaattggtccacgagggcccactgacgtggcgggtgactaaggacaaggcagtgggtgagtgccagagcagctgcctagtgcagggtgttggggcagtgagccaagggcggggagggggtcgcgcgggggcacgccgtgtgagcactgctcgccccgtagaggtgcatgtgctgctgctggacgacctgctgctgctgctccagcgccaggacgagcggctgctgctcaagtcccatagccggacactgacgcccacgcccgatggcaagaccatgctgcggcccgtgctgcggctcacctccgccatgacccgcgaggtggccaccggtgagtgcagccactgcatggcccagggcagagggtgtcttttttgggcagagctgcctgtggagtggggagcagaaccctctagagagccagggagccagcattctagcaaagaggttgagaagtaggtggaggtgggcagggcggggccaggcctagagggtttataagtgaggtaggaactgctgcaggtgtttgcacagaggcgtgtcttgtgtaaacaaggagaagaaaggccaggagtccagtgaggagggatttgtaaacatactactaggaagttgcaccagggccacaaacactggaagcggctggagggtgggagtggctggaggggtttcgttaggtaagccagggtacatgcccgattccataaggaggtgtgagaggtggggctcaggaggacacatcgggccctggatattagcagacagtgagtggtgagttgagccatgggagccctgagagcgccaccactgtgggtgacttctccagcttgtgcttagggaggggcaggcactggggggacctgggctctgagccccatctccccctctccctgcagatcacaaagccttctacgtcctttttacctgggaccaggaggcccagatatacgagctggtggcacagactgtgtcggagcggaaaaagtgagggggggtctgagttctgagtgtgggtggaggacgcccaggtttctgggttcccagggacaggagggctgtggggaggccctggcatagggtctgggggctctgactgcccagggatttggcctttctccccagctggtgtgctctcatcactgagactgccggatccctgaaagtccctgcccctgcctctcgccctaagccccggcccagcccgagcaggtgaggggggccatggagagagctggaggttcagggagtggggccggaaggcggggcaggcttccctccacaactccagaaccgtctctgtgtgagcatgcacatgtgtgaatgcatgtgtgtgcatacatgtgtgtctgtacgcaagtatgtgactgtgcgtgcatatatagtgtgtgtatgcatgcatgtgtgcgtgtgcatgtgtgtgcgtgtatggtgtgtgtgtatgcatatgtgtgcatgcgtgtgacagcatgtgcatgcatgtgtgtgtgtgtgcgcatgtgccgaccccaccactgccccgtctgtctcctgtctccaggcctctgtgtcttccattgtctgggcctctctgtctccctgtctcccggcctcgacctctgtctctgtctccggacctccctgcctccccacctccagctctctgtctccctgcccctgcggccccccagggccaggggtgtggggtcacccagcacttcctcccctcagcacccgagaacccctcctcagcagctctgagaacggcaatggtggccgagagacgtctccagctgatggtgagaccagagggatgctgggtgaggggccaggttggggctgccgggtgaagagaggcatccacaggaggcccggcaggatctgagctccctctctgttccccaatccagcccggaccgagagaatcctcagtgacctcctgcccttctgcagaccaggccccgagggccagctcgctgccacggcccttcggaaaggtagcccagctctgcccctccagggtggccaccagcccaaacagtgcctctgttccaactagaacaaggctctccacgtcaaaaatttccttacgcccagctgccagaaaacaaatgctccaaacccacccagcctgcaccactgtcctgggtgcccacgtccctcttctgcagccaccatcccttgcttgattctatatttagcctcttcctgaacacatctctgtcttcagtaccttcctgccctgtcccaaccctaaacccagcctcacttcttcacctccctttggatccccgaaccccatctgctcagccttgcctggcacccaccttcacctccagcccctacacatcccctttggaatcccccatcccagatcccagcccagccccctggtctcctgactccacccctccttgcccctggccagtgctgtccctgaagcagcttctgtttccggcggaggaagacaatggggcggggcctcctcgagatggggatggggtcccagggggcggccccctgagcccagcacggacccaggaaatccaggagaacctgctcagcttggaggagaccatgaagcagctggaggtggggcgggacgggccaggggtgccctgagtgggctggggaaggaaggggcccccctcatccatgacccccaccccaccaggagttggaggaggaattttgccgcctgagacccctcctgtctcagcttggggggaactctgtcccccagcctggctgcacttgaggttcccgcccaggaaggtgagtggggcacctgggggccagggcgctgtcctgaaaggagggtccccctccagagctcgcatccctacagccccttctgtccatctccctctttgtcttttctgaatctccccactccacctcgtgtttctcatctctgtgtctctgtttctgataatctgtttctctgtctctgtgcccgcctgcctctccccacctccccttctctctctgctctccctgtcttgtctctgtgtctgtctctccctgtctctctctccatctctccccgtctcccctcttctcctacatcccccaggccttttgcaagaaggagaggaatgggggagaggacgtgagggaccacccccacccacacagctgccgcagcatctcacaccccgagggcctgaggagagggagctgtgggccacgcctgggaggggcccagctggggttactggccccgcatgagcctcggccatctctccctcctgccctctgcttgggggactcagggctccattctggagggcaccacggtgacccgggccatctcagtattgcctgtgggggccacccctccacccccacccccaagtgccttcgctctgtttttataccctgaattggaggtttattttttaatatatattatctaagaagagatctgtgtgtgtgatggcggggtggggcctggcatggcgtctggaactctctgtgactgtctggcgttgacatcctgggtctgtgcctctgcgcctccctccagttgttcattcattcattcattcatttctttgtttgaaccgttactccccaggcactccgtacacacactgggtatgaggcgtctccctgacaccgccctccagctcccacccccgatcccccatgctcagcactgggcaccccgagtctcactctctgttcttttatttctgtagtaaactctctggaggtgactgttgggatcatggggagctggtggggaggggggcccctcctgggtgggggctgggggcggggttattgctctgagctccctgtccccaggggggcctatatggggggggtgtcaggactggggccagcacagggggtttggagacacggccacacaaacacttggggcatagcacaggggtgggcgggcggggcaggctgggcgccatattgcactttgggagtggggccaggcggggacccccctcaaactggagcctggggaggaggccggaggccatcacattccctctgtcctctgtggagggggaagtgagaccccccccactctggggctggggaaggagactggggcagcaatgtgcccagacctgggaggtgctgagggctggtcctgggccttgggccaggcatcaagggcagacgggcagccaccctggtccctgcctcagcagaatccattgccccctgccggctcagctgccggtcccccctttgcccgcctttgccttggggggtgccgggagaccctcatcgccctcgctgtcagagctgcagccgctgacgtcggtgatctccagctccgagtcgctgtcctccttcccaccaagggcagcctctggacccccagcccctggcagcgccaggcgaggggccgctgccaggcccgaggggcgctcggggcccaggccctcccctgtcgaggccagcaggggcgtggctgtggggcctccccctgcccctgacgagggcaggtggcccagggaactggccagagggttggggtagaaatgcggggggtagagagagggaggcagcttggggaaggggcccgtgaggtacgggttaaagttccaggggtactcagggaaggcgcggccataaggacccagcaggccagggggcttggaatagctggtggcacctggggggcacaggggtaggtcaggctggggcacctgcctgcctggggaccagtaaagggggctgcctccctgccatatcccaccccatctccccgcatccctcctacatggcatcttaccccctcatacagcttcccccaactccatctcctcccactcccccacttgtcttcccattccttaggcacccctgaaagcccctgtctccctcatttcccctccctcacatcacatccttttctgggttttacacacacacaccctacaacctggccctgggcccccttccccatctcttctcttgtcttttctcatcctcttccctcaagcctgcagcttctcccactgtgcccccagcaccccagaacctccaggctcttaccagagcccaggaatgggaaagggctgtccagacgcaatttatctgtctcggaggtgaacaggggtgtccgggcccctggctctcccaggcgtggggcagagaacagggtttgcagggtctagagagggagtgggagaagccgcccttctcagactgtcccctccccagagtgggcaccaagtgcctcggttccaggaccccagtacccagactcacctcaggggtgaggggaggagcatctggccctggggcccccccaaagggactgggggtcagcaagagtggggagccagtggcagctgccgccatgtccagcagcgggtaattgacaagcacgactttgctgaagttgaacttgtaggtgaacctcttccctttggtcttgtggagaatccgcttgttgtagtagtaactgtggggagagtggtggtgttggggaggtgcagggggagccctggggcgggatctggggtttcttaatgcgtgtgctgtcccaggcatggtgcacagagcactagaacttggggaaactgaggctcacagaagtcccttaatagggatcacagggcaaggaagggatgaggcaggagcggggaccctgccctgcaagactccaaagcccaggtttaggggtccctcctcctcgcctcccttccactcacaagtagcgatggtggctactcacgcacagccctgtgccttgtgggatccagcaggaacctgccccaggatgcagagggggcaccagagggacagttgggggaaaaggacaaggtgggatccagccccaagcccttcctcaccgcagggcccggctcagcttgtcgtaattcatgtggggcttgcatttgcgaataccccacagccgggccacctcatcggggtctttgatgacgaattccccgtagtccccctgccaggctatgacgccctggtactcctccttctgcagcagctccaggataaagtgccacagctggatctgcctcgagccaggggatgactctggcttgtaggcccaatccgggaaggcaaaccctggggacgggaggcagggagtggcctggggtcaggatgccaagtccagggctctgggtcctgctggactcagtaacctgggaggcatgtagttctcctccagtctcaggcatctttagggacctggtttccacactccaaacctcctccctttgtgtctggtccccaaattacccaaataagggcaagaacccagtcatccagggaccctgggttggtaccagtctgatcccctaccttggcatagctcccccaggctcagcatccagaggtggagttgggagggactggcttcctgcacccatgacagtgaggaggaatggggaggggcacccgcctccaacagcgttagtcctctcactgcccccagccagccctaggaggtctctagtctcttgtaccctgcggtgccctcagctcttactgtctctgttccccattccctgtcccctgctccacctttcgacattccccagagccccccactgacccatcctggcatatccaggctgcagctctgtgcatgtctgtacctgcctgtgtatttgtacctttcccgtccctgtgtcccctccaccccatatccatgcccatgtccgtccaagagcagtccagaacgatgtgtgtgtgtgcgtggacacacacatgcccacggaagacatgtcacacagacatcagttcacttgcctgagacacacagccacactgggacacaggcacaccggagtgccacactcatgctgggggccaccaaggctgacatggcagacacaggctgcgcaagactcaaggtcacgtcatctcaacaaccccacagtgcacacccatcacaacacagaattacacatctcaagactgggacttactaacaacacaaatgcctgacaagacacacacaggaccccaaatgcccaaagaacacactgtacgatggagacggtgaacacagcaccaagatatccatgtccccagacacacagggtgacagcatgtcagtagagcaacttcccaaacctgcacacagaggcacccacatgtcagcactgacacccccggctcactcagcatcacgtctcacatgcagaggggagtactccactgtccacatacccccaggagctgggcaccccgaaatctcatctcccatgcagaaggccccaagccctgggtccaacttctgtgttcactcttatgccacatcctctgtccccttccccctcctcagagaccccagacccaggcatgaaaatagaaggcagagtgagtccataaaaagctggcagcagtgcaggagagaggagactgctgtgcgccagggcaggggagaccagcatcgccgtgtccacttgctgtgtgattacgggcaggtccttaccctctctggtttagaactgcacaggtggaaggcaagggggcgcagggtcccacccaggctgcctggtgtagaaaagtgggtgcttgtgcctcccggcctgaaggccggggagctccaggcagtctccttgagggagaatttttatctccattcatttttgggtctttctcacctcccatgacagggctggatccagactccagctctgacccattccacacccagaacacatcctactggggaggcaactgtatcacagacacacccacaggaccccaaggtgacaagaggacacccaacccgatactccatctgtcctcaaatgcacaccctcaaatatgttgtacctatgaggcacaggcacagctagagagaggacccccaaactcagtaggcagacacacacatgtgacagacaaacccccagaattcactcatgtgcacatggaccctacgctgaaaaccagacacagcccccaacacagaggcccagggatgcatcccccccacagccccaaatgcaccaagacagccatgcggaacgccacacaacccgagacagaccgcaagaaacaggcaaaggctcctcaccccactcaggcagaggcacagtcggagagctggcagacgcccccatcccaaaatgcggacacgcccagcccagagacactcaagtagcctcagatgtgcacgtacaagcaaatacacaagctcacacaaagacaggctgtgcagacacattctcccagtgtgaccccttctagaaacactgaagtgtgacacagggacacactgaaatgagaccccaaataaccaaggacagagtctctgtctgtctctcacacacacacacacccctcccgctgcacatcagcatggtgtctgaccagcttcaccgtccaccaaccccggttgcaagctgtcctctttcctgggtctcggtctggccgggtcgtgcctgcacgtacccctgactgggcagtgccgtctgtctacctgtccatccgtgcctggcctagtgccccctccagcccagtccctgctctcttttccccgcaggtcctgcgtgggagcaggctgagacgtgcgtggcagggatgcccgggcctcgggcccctccgtcctcacccctcactcacttccgtaccctcccagaagacccacctatccccccagcacgcagggggcaggggaatctggctgcgaagtttttagccaagtttctcagaaggggtttgatttgggggactgaccaagactgagagagaaggacccacggactagagtgagacacgtggagacccggagagaagggggatgcggctcatggggaagctgaggggtgggggaaggnnnnnnnnnnnnnnnnnnnnnnnnnnnnnnnnnnnnnnnnnnnnnnnnnnnnnnnnnnnnnnnnnnnnnnnnnnnnnnnnnnnnnnnnnnnnnnnnnnnnnnnnnnnnnnnnnnnnnnnnnnnnnnnnnnnnnnnnnnnnnnnnnnnnnnnnnnnnnnnnnnnnnnnnnnnnnnnnnnnnnnnnnnnnnnnnnnnnnnnnnnnnnnnnnnnnnnnnnnnnnnnnnnnnnnnnnnnnnnnnnnnnnnnnnnnnnnnnnnnnnnnnnnnnnnnnnnnnnnnnnnnnnnnnnnnnnnnnnnnnnnnnnnnnnnnnnnnnnnnnnnnnnnnnnnnnnnnnnnnnnnnnnnnnnnnnnnnnnnnnnnnnnnnnnnnnnnnnnnnnnnnnnnnnnnnnnnnnnnnnnnnnnnnnnnnnnnnnnnnnnnnnnnnnnnnnnnnnnnnnnnnnnnnnnnnnnnnnnnnnnnnnnnnnnnnnnnnnnnnnnnnnnnnnnnnnnnnnnnnnnnnnnnnnnnnnnnnnnnnnnnnnnnnnnnnnnnnnnnnnnnnnnnnnnnnnnnnnnnnnnnnnnnnnnnnnnnnnnnnnnnnnnnnnnnnnnnnnnnnnnnnnnnnnnnnnnnnnnnnnnnnnnnnnnnnnnnnnnnnnnnnnnnnnnnnnnnnnnnnnnnnnnnnnnnnnnnnnnnnnnnnnnnnnnnnnnnnnnnnnnnnnnnnnnnnnnnnnnnnnnnnnnnnnnnnnnnnnnnnnnnnnnnnnnnnnnnnnnnnnnnnnnnnnnnnnnnnnnnnnnnnnnnnnnnnnnnnnnnnnnnnnnnnnnnnnnnnnnnnnnnnnnnnnnnnnnnnnnnnnnnnnnnnnnnnnnnnnnnnnnnnnnnnnnnnnnnnnnnnnnnnnnnnnnnnnnnnnnnnnnnnnnnnnnnnnnnnnnnnnnnnnnnnnnnnnnnnnnnnnnnnnnnnnnnnnnnnnnnnnnnnnnnnnnnnnnnnnnnnnnnnnnnnnnnnnnnnnnnnnnnnnnnnnnnnnnnnnnnnnnnnnnnnnnnnnnnnnnnnnnnnnnnnnnnnnnnnnnnnnnnnnnnnnnnnnnnnnnnnnnnnnnnnnnnnnnnnnnnnnnnnnnnnnnnnnnnnnnnnnnnnnnnnnnnnnnnnnnnnnnnnnnnnnnnnnnnnnnnnnnnnnnnnnnnnnnnnnnnnnnnnnnnnnnnnnnnnnnnnnnnnnnnnnnnnnnnnnnnnnnnnnnnnnnnnnnnnnnnnnnnnnnnnnnnnnnnnnnnnnnnnnnnnnnnnnnnnnnnnnnnnnnnnnnnnnnnnnnnnnnnnnnnnnnnnnnnnnnnnnnnnnnnnnnnnnnnnnnnnnnnnnnnnnnnnnnnnnnnnnnnnnnnnnnnnnnnnnnnnnnnnnnnnnnnnnnnnnnnnnnnnnnnnnnnnnnnnnnnnnnnnnnnnnnnnnnnnnnnnnnnnnnnnnnnnnnnnnnnnnnnnnnnnnnnnnnnnnnnnnnnnnnnnnnnnnnnnnnnnnnnnnnnnnnnnnnnnnnnnnnnnnnnnnnnnnnnnnnnnnnnnnnnnnnnnnnnnnnnnnnnnnnnnnnnnnnnnnnnnnnnnnnnnnnnnnnnnnnnnnnnnnnnnnnnnnnnnnnnnnnnnnnnnnnnnnnnnnnnnnnnnnnnnnnnnnnnnnnnnnnnnnnnnnnnnnnnnnnnnnnnnnnnnnnnnnnnnnnnnnnnnnnnnnnnnnnnnnnnnnnnnnnnnnnnnnnnnnnnnnnnnnnnnnnnnnnnnnnnnnnnnnnnnnnnnnnnnnnnnnnnnnnnnnnnnnnnnnnnnnnnnnnnnnnnnnnnnnnnnnnnnnnnnnnnnnnnnnnnnnnnnnnnnnnnnnnnnnnnnnnnnnnnnnnnnnnnnnnnnnnnnnnnnnnnnnnnnnnnnnnnnnnnnnnnnnnnnnnnnnnnnnnnnnnnnnnnnnnnnnnnnnnnnnnnnnnnnnnnnnnnnnnnnnnnnnnnnnnnnnnnnnnnnnnnnnnnnnnnnnnnnnnnnnnnnnnnnnnnnnnnnnnnnnnnnnnnnnnnnnnnnnnnnnnnnnnnnnnnnnnnnnnnnnnnnnnnnnnnnnnnnnnnnnnnnnnnnnnnnnnnnnnnnnnnnnnnnnnnnnnnnnnnnnnnnnnnnnnnnnnnnnnnnnnnnnnnnnnnnnnnnnnnnnnnnnnnnnnnnnnnnnnnnnnnnnnnnnnnnnnnnnnnnnnnnnnnnnnnnnnnnnnnnnnnnnnnnnnnnnnnnnnnnnnnnnnnnnnnnnnnnnnnnnnnnnnnnnnnnnnnnnnnnnnnnnnnnnnnnnnnnnnnnnnnnnnnnnnnnnnnnnnnnnnnnnnnnnnnnnnnnnnnnnnnnnnnnnnnnnnnnnnnnnnnnnnnnnnnnnnnnnnnnnnnnnnnnnnnnnnnnnnnnnnnnnnnnnnnnnnnnnnnnnnnnnnnnnnnnnnnnnnnnnnnnnnnnnnnnnnnnnnnnnnnnnnnnnnnnnnnnnnnnnnnnnnnnnnnnnnnnnnnnnnnnnnnnnnnnnnnnnnnnnnnnnnnnnnnnnnnnnnnnnnnnnnnnnnnnnnnnnnnnnnnnnnnnnnnnnnnnnnnnnnnnnnnnnnnnnnnnnnnnnnnnnnnnnnnnnnnnnnnnnnnnnnnnnnnnnnnnnnnnnnnnnnnnnnnnnnnnnnnnnnnnnnnnnnnnnnnnnnnnnnnnnnnnnnnnnnnnnnnnnnnnnnnnnnnnnnnnnnnnnnnnnnnnnnnnnnnnnnnnnnnnnnnnnnnnnnnnnnnnnnnnnnnnnnnnnnnnnnnnnnnnnnnnnnnnnnnnnnnnnnnnnnnnnnnnnnnnnnnnnnnnnnnnnnnnnnnnnnnnnnnnnnnnnnnnnnnnnnnnnnnnnnnnnnnnnnnnnnnnnnnnnnnnnnnnnnnnnnnnnnnnnnnnnnnnnnnnnnnnnnnnnnnnnnnnnnnnnnnnnnnnnnnnnnnnnnnnnnnnnnnnnnnnnnnnnnnnnnnnnnnnnnnnnnnnnnnnnnnnnnnnnnnnnnnnnnnnnnnnnnnnnnnnnnnnnnnnnnnnnnnnnnnnnnnnnnnnnnnnnnnnnnnnnnnnnnnnnnnnnnnnnnnnnnnnnnnnnnnnnnnnnnnnnnnnnnnnnnnnnnnnnnnnnnnnnnnnnnnnnnnnnnnnnnnnnnnnnnnnnnnnnnnnnnnnnnnnnnnnnnnnnnnnnnnnnnnnnnnnnnnnnnnnnnnnnnnnnnnnnnnnnnnnnnnnnnnnnnnnnnnnnnnnnnnnnnnnnnnnnnnnnnnnnnnnnnnnnnnnnnnnnnnnnnnnnnnnnnnnnnnnnnnnnnnnnnnnnnnnnnnnnnnnnnnnnnnnnnnnnnnnnnnnnnnnnnnnnnnnnnnnnnnnnnnnnnnnnnnnnnnnnnnnnnnnnnnnnnnnnnnnnnnnnnnnnnnnnnnnnnnnnnnnnnnnnnnnnnnnnnnnnnnnnnnnnnnnnnnnnnnnnnnnnnnnnnnnnnnnnnnnnnnnnnnnnnnnnnnnnnnnnnnnnnnnnnnnnnnnnnnnnnnnnnnnnnnnnnnnnnnnnnnnnnnnnnnnnnnnnnnnnnnnnnnnnnnnnnnnnnnnnnnnnnnnnnnnnnnnnnnnnnnnnnnnnnnnnnnnnnnnnnnnnnnnnnnnnnnnnnnnnnnnnnnnnnnnnnnnnnnnnnnnnnnnnnnnnnnnnnnnnnnnnnnnnnnnnnnnnnnnnnnnnnnnnnnnnnnnnnnnnnnnnnnnnnnnnnnnnnnnnnnnnnnnnnnnnnnnnnnnnnnnnnnnnnnnnnnnnnnnnnnnnnnnnnnnnnnnnnnnnnnnnnnnnnnnnnnnnnnnnnnnnnnnnnnnnnnnnnnnnnnnnnnnnnnnnnnnnnnnnnnnnnnnnnnnnnnnnnnnnnnnnnnnnnnnnnnnnnnnnnnnnnnnnnnnnnnnnnnnnnnnnnnnnnnnnnnnnnnnnnnnnnnnnnnnnnnnnnnnnnnnnnnnnnnnnnnnnnnnnnnnnnnnnnnnnnnnnnnnnnnnnnnnnnnnnnnnnnnnnnnnnnnnnnnnnnnnnnnnnnnnnnnnnnnnnnnnnnnnnnnnnnnnnnnnnnnnnnnnnnnnnnnnnnnnnnnnnnnnnnnnnnnnnnnnnnnnnnnnnnnnnnnnnnnnnnnnnnnnnnnnnnnnnnnnnnnnnnnnnnnnnnnnnnnnnnnnnnnnnnnnnnnnnnnnnnnnnnnnnnnnnnnnnnnnnnnnnnnnnnnnnnnnnnnnnnnnnnnnnnnnnnnnnnnnnnnnnnnnnnnnnnnnnnnnnnnnnnnnnnnnnnnnnnnnnnnnnnnnnnnnnnnnnnnnnnnnnnnnnnnnnnnnnnnnnnnnnnnnnnnnnnnnnnnnnnnnnnnnnnnnnnnnnnnnnnnnnnnnnnnnnnnnnnnnnnnnnnnnnnnnnnnnnnnnnnnnnnnnnnnnnnnnnnnnnnnnnnnnnnnnnnnnnnnnnnnnnnnnnnnnnnnnnnnnnnnnnnnnnnnnnnnnnnnnnnnnnnnnnnnnnnnnnnnnnnnnnnnnnnnnnnnnnnnnnnnnnnnnnnnnnnnnnnnnnnnnnnnnnnnnnnnnnnnnnnnnnnnnnnnnnnnnnnnnnnnnnnnnnnnnnnn

SEQ ID NO: 41 - DNA, 3185 bp, Homo sapiens
gggcgccccgccggtcacttccgcgcggacaccagccttgcagagcccagggagatggaagacttcgcccgaggggcggcctccccaggcccctcccggcctggcctggttcccgtcagcatcatcggggctgaggatgaggattttgagaacgagctggagacaaactcagaagagcaaaacagccagttccagagcctggagcaggtgaagcggcgcccagcccacctcatggccctcctgcagcacgtggccctgcagtttgagccaggacccctgctttgctgtctgcatgccgacatgctgggctcactgggccccaaggaggccaagaaggccttcctggacttctaccacagcttcctggagaagacagcggttctccgggtgccggtccctcccaacgtcgcctttgaacttgaccgcactagggctgacctcatctccgaggatgtccagcggcggttcgtgcaggaggtggtgcaaagccagcaggtagccgtgggccggcagctggaggacttccgttccaagcggctcatgggcatgacgccctgggagcaggagctggcccagctggaggcttgggttgggcgggaccgagccagctacgaggcccgggagcggcacgtggcggagcggctgctcatgcacctggaggagatgcaacataccatctctaccgacgaagaaaagagtgctgccgtggtcaacgccattggcctgtacatgcgccaccttggggtgcggaccaagagtggagacaagaagtcggggaggaacttcttccggaaaaaggtgatggggaaccggcggtcggacgagcctgccaagaccaagaaggggctgagcagcatcctggatgccgcccgctggaaccggggagagccccaggttccagattttcgacacctcaaagcagaggttgatgccgagaagccaggtgctacagaccggaagggaggcgtggggatgccctctcgggaccggaatatcggggctcctgggcaggacacccctggagtctctctgcaccctctgtccctggacagcccagaccgggaaccaggtgctgacgcccccctggagctgggggactcatccccgcagggcccaatgagcctggagtccttggcgcccccagagagtaccgacgagggggccgaaaccgagagccccgagcctggagatgagggggagccggggcggtcgggactggagcttgaaccagaagagcctcccggctggcgggaactcgtccccccagacaccctgcacagcctgcccaagagccaggtgaagcggcaggaggtcatcagcgagctgctggtgacagaggcggcccacgtgcgcatgctgcgggtgctgcacgacctcttcttccagcccatggcagaatgcctgttcttccccttggaggagctgcagaacatcttccccagcctggacgagctcatcgaggtgcattccctgttcctcgatcgcctgatgaagcggaggcaggagagtggctacctcatcgaggagatcggagacgtgctgctggcccggtttgatggtgctgagggctcctggttccagaaaatctcctcccgcttctgcagccgccagtcatttgccttagagcagctcaaagccaagcaacgcaaggaccctcggttctgtgccttcgtgcaggaagctgagagccgcccgcggtgccgccgcctgcagctgaaggacatgatccccacggagatgcagcggctgaccaagtaccccctgctcctgcagagcatcgggcagaacacagaagagcccacagaacgggagaaagtggagctggcagccgagtgctgccgggaaattctacaccacgtcaaccaagccgtgcgtgacatggaggacctgctgaggctcaaggactatcagcggcgcctggacttgtcccaccttcggcagagcagcgaccctatgctgagcgagttcaagaacctggacatcaccaagaagaaattggtccacgagggcccactgacgtggcgggtgactaaggacaaggcagtggaggtgcatgtgctgctgctggacgacctgctgctgctgctccagcgccaggacgagcggctgctgctcaagtcccatagccggacactgacgcccacgcccgatggcaagaccatgctgcggcccgtgctgcggctcacctccgccatgacccgcgaggtggccaccgatcacaaagccttctacgtcctttttacctgggaccaggaggcccagatatacgagctggtggcacagactgtgtcggagcggaaaaactggtgtgctctcatcactgagactgccggatccctgaaagtccctgcccctgcctctcgccctaagccccggcccagcccgagcagcacccgagaacccctcctcagcagctctgagaacggcaatggtggccgagagacgtctccagctgatgcccggaccgagagaatcctcagtgacctcctgcccttctgcagaccaggccccgagggccagctcgctgccacggcccttcggaaagtgctgtccctgaagcagcttctgtttccggcggaggaagacaatggggcggggcctcctcgagatggggatggggtcccagggggcggccccctgagcccagcacggacccaggaaatccaggagaacctgctcagcttggaggagaccatgaagcagctggaggagttggaggaggaattttgccgcctgagacccctcctgtctcagcttggggggaactctgtcccccagcctggctgcacttgaggttcccgcccaggaaggccttttgcaagaaggagaggaatgggggagaggacgtgagggaccacccccacccacacagctgccgcagcatctcacaccccgagggcctgaggagagggagctgtgggccacgcctgggaggggcccagctggggttactggccccgcatgagcctcggccatctctccctcctgccctctgcttgggggactcagggctccattctggagggcaccacggtgacccgggccatctcagtattgcctgtgggggccacccctccacccccacccccaagtgccttcgctctgtttttataccctgaattggagggtttattttttaatatatattatctaagaagaaaaaaaaaaaaaaaaaaaaaaaaaaa

SEQ ID NO: 42 - DNA, 2739 bp, Homo sapiens
atggaagacttcgcccgaggggcggcctccccaggcccctcccggcctggcctggttcccgtcagcatcatcggggctgaggatgaggattttgagaacgagctggagacaaactcagaagagcaaaacagccagttccagagcctggagcaggtgaagcggcgcccagcccacctcatggccctcctgcagcacgtggccctgcagtttgagccaggacccctgctttgctgtctgcatgccgacatgctgggctcactgggccccaaggaggccaagaaggccttcctggacttctaccacagcttcctggagaagacagcggttctccgggtgccggtccctcccaacgtcgcctttgaacttgaccgcactagggctgacctcatctccgaggatgtccagcggcggttcgtgcaggaggtggtgcaaagccagcaggtagccgtgggccggcagctggaggacttccgttccaagcggctcatgggcatgacgccctgggagcaggagctggcccagctggaggcttgggttgggcgggaccgagccagctacgaggcccgggagcggcacgtggcggagcggctgctcatgcacctggaggagatgcaacataccatctctaccgacgaagaaaagagtgctgccgtggtcaacgccattggcctgtacatgcgccaccttggggtgcggaccaagagtggagacaagaagtcggggaggaacttcttccggaaaaaggtgatggggaaccggcggtcggacgagcctgccaagaccaagaaggggctgagcagcatcctggatgccgcccgctggaaccggggagagccccaggttccagattttcgacacctcaaagcagaggttgatgccgagaagccaggtgctacagaccggaagggaggcgtggggatgccctctcgggaccggaatatcggggctcctgggcaggacacccctggagtctctctgcaccctctgtccctggacagcccagaccgggaaccaggtgctgacgcccccctggagctgggggactcatccccgcagggcccaatgagcctggagtccttggcgcccccagagagtaccgacgagggggccgaaaccgagagccccgagcctggagatgagggggagccggggcggtcgggactggagcttgaaccagaagagcctcccggctggcgggaactcgtccccccagacaccctgcacagcctgcccaagagccaggtgaagcggcaggaggtcatcagcgagctgctggtgacagaggcggcccacgtgcgcatgctgcgggtgctgcacgacctcttcttccagcccatggcagaatgcctgttcttccccttggaggagctgcagaacatcttccccagcctggacgagctcatcgaggtgcattccctgttcctcgatcgcctgatgaagcggaggcaggagagtggctacctcatcgaggagatcggagacgtgctgctggcccggtttgatggtgctgagggctcctggttccagaaaatctcctcccgcttctgcagccgccagtcatttgccttagagcagctcaaagccaagcaacgcaaggaccctcggttctgtgccttcgtgcaggaagctgagagccgcccgcggtgccgccgcctgcagctgaaggacatgatccccacggagatgcagcggctgaccaagtaccccctgctcctgcagagcatcgggcagaacacagaagagcccacagaacgggagaaagtggagctggcagccgagtgctgccgggaaattctacaccacgtcaaccaagccgtgcgtgacatggaggacctgctgaggctcaaggactatcagcggcgcctggacttgtcccaccttcggcagagcagcgaccctatgctgagcgagttcaagaacctggacatcaccaagaagaaattggtccacgagggcccactgacgtggcgggtgactaaggacaaggcagtggaggtgcatgtgctgctgctggacgacctgctgctgctgctccagcgccaggacgagcggctgctgctcaagtcccatagccggacactgacgcccacgcccgatggcaagaccatgctgcggcccgtgctgcggctcacctccgccatgacccgcgaggtggccaccgatcacaaagccttctacgtcctttttacctgggaccaggaggcccagatatacgagctggtggcacagactgtgtcggagcggaaaaactggtgtgctctcatcactgagactgccggatccctgaaagtccctgcccctgcctctcgccctaagccccggcccagcccgagcagcacccgagaacccctcctcagcagctctgagaacggcaatggtggccgagagacgtctccagctgatgcccggaccgagagaatcctcagtgacctcctgcccttctgcagaccaggccccgagggccagctcgctgccacggcccttcggaaagtgctgtccctgaagcagcttctgtttccggcggaggaagacaatggggcggggcctcctcgagatggggatggggtcccagggggcggccccctgagcccagcacggacccaggaaatccaggagaacctgctcagcttggaggagaccatgaagcagctggaggagttggaggaggaattttgccgcctgagacccctcctgtctcagcttggggggaactctgtcccccagcctggctgcacttga

SEQ ID NO: 43 - DNA, 96595 bp, Mus musculus
  misc_feature (81)..(100): "n" at positions 81 through 100 can be any base.
  misc_feature (20974)..(20993): "n" at positions 20974 through 20993 can be any base.
  misc_feature (23010)..(23294): "n" at positions 23010 through 23294 can be any base.
  misc_feature (24969)..(25093): "n" at positions 24969 through 25093 can be any base.
  misc_feature (34655)..(34840): "n" at positions 34655 through 34840 can be any base.
  misc_feature (43486)..(43505): "n" at positions 43486 through 43505 can be any base.
  misc_feature (63319)..(63565): "n" at positions 63319 through 63565 can be any base.
  misc_feature (87107)..(87126): "n" at positions 87107 through 87126 can be any base.
  misc_feature (90949)..(90968): "n" at positions 90949 through 90968 can be any base.
  misc_feature (92828)..(92847): "n" at positions 92828 through 92847 can be any base.
catccccttccctgcctgctaggggctgagatctggacaaaagtagtttctgttatatctggtggagggtgggagggaggnnnnnnnnnnnnnnnnnnnngcagagagggagagagggagggataggcccaaaccaagaaatattttttaaacttgattagagggatttttgcttaatgagagtctagttttcatagaatttatctggtacaggttaaaaataaaaaaaaaactggagttactattgttctataatttaatctctctaatcatatttccgatatgactaatcagagaggtcacagtagtgagcaaatgcctaattttgttatatataacagtttagctgcaggttgaattctctaaacttcattctggacttttgggcagataatgtaactgtaatcccaacctttcttagaggttttcaatgaaataagcaaatcagttaagttcagtaagagacattggccgtgaaggatgatgcctggtatgttagatggacacatagactagcatctcattagatgcaggcaggctgtacccaaagtttgtagtgaagaaataaacatgccaaaggaatgaatttcaagcaaaataaaatccagtttggaaagagtgagacaaacagcaggttgggatttttcttcagaacagaaggaaaccttttgtatctggagactgtaaatgaacaaagaggctcgagagaacagttgtggattgtggaatcccagccatgaaagagtttggatgacacttttactgtaatgtaaggagaaggaaaagttcattgtaacttttaaaagtctggtgacagtcaaaaaatagcgtagggcggctagcatggacatcagtaaccccattaccataccattctggttggttgttatgcgtagcatcagagtctggtagaggtagtgtactggctagctttgtgtcaacttgacatggctggagttatcacagagaaaggagcttcaattgaggaaatgcctccatgcgatccaactgtaaggcattttctcaattagtgatcaagggggaaaggccccttgtgggtgatgctatccctggcctggcagtcttggttctataagagagcaggctgagcaagccagggaaagcaagcaagccagtaaggaacatcctttcatggcttctgcatcagcttctgcttcctgacctgcttgagttccagtcttgacttccttggtgatgaacagcagtatggaagtgtaagctgaataaaccctttcctccccaacttgcatcttggtcatgatgtttgtgcaggaatagaaaccctgactaagacaggtagtgagcatgcaaatcagggttgaggaatgagcttgaagcaattggtggtgaatttcatgagaaaatcaggggaatggggaaaatcaatgccgttaatgatctgagttttactccctgaagtattacatatccacttagataaaagaaggtgatggggaaagaggcttaatcaagaagaaatgaaaagttgcaaaatataaataatatgttggctttgccttcaactcaaaggtgatagatagtaacaaatacatagagagattaatttcaaacaaagaatcatcctaagtagactggcagccaaatattggcttctatttttactccaaactccaatactctgtttagtgtctgtgtgtgcgcttgggcatgtgtgtatgcacacacacacacataggaaattacacaggtatgtgtacatgtgctttatgcattcatgcatgtgtaggtacgtccacctgtgcttgtgtttggggtccagataacgatgtctactgtcctgctctgtcactctttacctaattctatcaagacagggttatactggttgatcagtgagttctggctttcccattgtggcctgctccatcagtgggattgcaattatatctgaagccatacttttatatggctctttttatatgggtgctggggactcaaaatcaggcccccactttcaaaaaacaaacacctttatgcatttgtcttagtcagggtttctattcctgcacaaaaatcatgaccaagaatcaagttggggaggaaagggtttattcgccttacacttccatactgctgttcatcaccaaggaagtcaggactggaactcaagaaggtcaggaagcagaagctgatgcagaggccatggagggatattctttactggcttgcttctcctggcttgctcagcctgctctcttatagaaccaagactaccagcccagagattgtcccacccacaaggggcctttcccccttgattactaattgagaaaatgccttacagttggatctcatggaggcatttcctcaactgaagctcctttctctgtgataaccccagctgtgtcaagttgacacaaaactagccagtacagcattgaattaactctgcccagatatcttgatggttgttttttaagcttcctaggcatgaaactattattgtatgttgtctttagtgtcttgcataccagctttctagtatttattttatttataccaggaaatctaactgaataccaagaggtgacttttcactgctttggtgcctctgtagctgttcacgggatcctaagaatacacaaaagtatgtgtcttattagacatgaagagaatttatttttccctacactcctctccttaggaacaatgtgagtctctgatggttggctcctagaatggaatactccctttgctgaggttatctgttctcttgcatatgcatgcgtatttgatttcaagttttccaggcctgtttgtgtctgcttgtgctcatcacttgaagtgatggattgaagaaagccgatacatggaagcctcatctagcacattgaggatctgaatggaacaaaagagagatcactctgcatctcttggctggaatacctgtcttaccttcacactttgattagattggaaagcatactgtctataatcccgatttgtaggctcagtctaaactggaatttctcctagtgacactcctctaaagaccttcaggcttaggcaaatgctgtactctggctcttctagtctaaacttttagaagtttcataaaagtcacataagtctattttcaaaagtctttgttttctcattgaatataaagagatatagtatgagagaatgtgttgtgtgtgtgtgtgtgtgtgtgtgtgtgtatgtgtgtgtgttgtagattcatcttttgctcttttctgtccctttggagatagttaaaacaccttttgttcatacaagtgcagaactacagaaatatttagcttgtttgatttttaatctccagatgcccaccactctgtttaaaagttttagttcttagtgatctttctgtaacacatgggatgaatgaatgcaaatagactcaatagagcactaatgatgttcatgttggagcaggaggaagaaagaactccacatgtatttagagacattggtttgatgaatatagcttaagaatcactctagaagactcaaagaccttttcatcagactcatggcagcggattaatttcccaggagcactaacatgtttttcctacctctcattttctcatgagtatatactcagattgaatgaagatgtaaaaataggaatctgagtagcttttattaagttgaatactattatttgaaaaaataaaaacaatgccaatctttttggtattatttttcataggagaaacctatggggctgttgattgataaacaaattagtaattattttacaggtcttattttattttattgacttttgtggttggtttgttgtttggatacttaaatcagtagaagaatatctgcctgtcaagtccagggccatgactgtagtcaaacaaggaagaacaaatacatccattctcagtctgaatttcttgtaacacacggattctccaacttccaaattccgtgaccctttattacagttccttgagttgtgctgatgccccaactataaaaattatttttttttgctgctcatataattttgctactgttatgaattgtattataactatttttggagatagaggattgccaaaggtgtcgtgacccacaagttgggaactgctgtcatatggtgttgacagaacttagaattgatatactgtttgtttgttaatgattggtgaattaaaccgtgcgcctgtgttcctgcaagctgcgtttgttttctctgtccacctttacacaggttctgggaattgaactcttatctctaacctcttcccactgagcctgctcactgtcctggtaacctcagtatatctaatttgtataggcattctgaaactaaaaaaaatttaggatctattacttaaagcaggactttcatatagatatgttgctatatgggtaagtgtaactctaaaaaacctgtcaggttcataccttcaaaccttgcattattccatcaaataattctttctctgaaccacctaagtcaattccaattacaggttgattttattgtttctacagtttggagtatttgttggttgactgttatggtcaccttgttatccagtcaatcatttaataattgtttataaatatttaaaacatttaaatgtatagcatgctcttctagatgcacacttgttgggttgttgcatatcagtagtttggaactttagaattccaaatgcatggtttattattgctcctgtgatacatttctgtttagtagctagtatggtgtcccctttcatgcttgaaatggcttcttttctttttctcttggacacaacacagctgcttgtgttacgtggataaaattcatacagtcaccagtgtgctttcagcccaaactgtgtctgggttaccagctacactgtcccttgttgctggtgaccatttcactttgacattctgtatgccctgcctctcgcactctgttgcccaggtctcgtctttgcttcttttgcatctgtgtacccattacagcctaaccagttcagggaatgtcccagccatcccaccaaaccttttatttgaagagctgagtcaaacagtcacctactcactccctgtccccacccccatgggcagtaggttattttaaggttttctttggaactttttaaaatttttaccttcttctgtgtaacatttctctacctaatgcttttctgttaaatgtaccacctggtttcacccttaggataggtcagtcatgtgagacaatgctattttttttttaattaaatatatttgtgtatttgtgtgtatatgtgtgcggcagtgcctgtgcaaatgcacaggtcagccagagcacagcatgtagccgtcagtctcctctctccactgtatgagatctgggattgaactcagttcttccggtttgggagtaagtgcctttacatcctctgctctcaaggtggtggttcttgttattgtcttgatggaggatagcccttataaaggattggcatggcacttaattaaaatgtgtgtacaaataccttataatgaaacaccagagtcaaaaattcacaaactatgagcctgttctgagaaaaactcttgtatgtttttgtggggaaaaaaaaagttgacaggcctgtcagattggggaagatggtctgtagaagagggagtgggaggtgaatggctaccagtcctttcaatcaagaacatggataggtgtggcttctgagtttatctcttaatttgtaaggtgtcttaagtactttgaataaccagcttagtgaaatactatgcttgcatgccaaagtctgaaataaccttctatgttatgaatacctactatgaatgttttaaatgatatttttaatgactatatcattgctagtcatactcattatttataactactaattgtatattattgaatatgtagaattcttttattttttccattttaatcaatataatgagatgcattatcttttcagttatatctttgttaatttacacaaaactttttttcattaattaattttatatttttcactttatatctctcactttatatcacagtcctcccccacccctcctaggtccacccttacaaatccttttccccattgcccctccccccttcttctgaggagaaggggaagcatcctgccctcccccagggtaccaccagggccctgggacatttagtaccagcaagtctaggtgcatcccctcccagtgaggtccaactcggcagtccacctgtggaataggatcaaatggcaaataccagaatcagagacagccccctattccattgttaggggactcacatgaataccaagctgcacttatgttacaaatgtgtaggggcctaggtctaacccttgcatgctccctgatttgtgattctgtctttgtgagcccccaggggcccaggttacttgactctgtagttcttcttgtgttgttattgactcttctggcttgctcagttctattccactctcttccacaagagttctggagctccacatgttgtttcctggtgggtctctgcatctgcttccacttgttgctagatgaattctttcaggagcaagttgtcctaggtttctatctgcatagcaaaatatcattaatagtgtcaggagttgactcccttgcatgggatgggtcccaagttgggccagtcattgggttggccattcccccagtctttgctctgtctttatccttgtacatcttgtaggcaggacaaattgcctgaaggtgttgaagttttatgggtgggttgatgtcttcctccctccactggatgtcatgcctggctacaagaggtgacgttttgtagtgcatatttatccattttgaattaccacattaggggccatatatgtctttcaaggttttgcttattgccaaactgctctctagaaagttgcattacttaaaaaccatgcaaagacttaagtttaggcactttcccttgactgatgaattggagaacctcaagcaatctttccctcaagttatatttagggaagtataaatgtgtgacttgacatcattaaacctttagatagctaagcctccatcaaatactactgaacacttactagaaatttgagggaacaagaataacagtaaataaagttttgtttttaacatcaagagtgagggacttaacatgtgtaaaatttccagacattaaatatagagggccagttgttcttggatattgtagaagtaatcttttgaagttcctaagaacacagtgctggctacatttaagttgatggagggaagtctgtgtcccagctgcagctccacaggcaccagctgtgtaaattgccactgtatcaattctgtagacagggctggaggttgttcctgcttgtttctcctttgtagaactgcgcggtaagtgcattattaatgcacataactcagccaagggagccatggagggctctgtgtaaataagactatttatcccaaccattccatagaagtgaattatcagcactaatttttcttattatttaacctgtgttgagtggcagtaaaatgctgaaatagttaggataagcttttatttcatgattttcatctttctaatgatcaaattggtaagaactaatgatgactagcgcttgttcattccatttctttaataagaaaatggttgtagcttaaaatgcaaatggctgaaaattgctaaatggtcttaatggtaaatataatgcatttttaaaatgtgacacaaagcatattttactccaaacgttattttatgatagtagaaaattactattaggaagctaataagtcttttgagctctacactttaaaattggtagtcagaagctaaacttatggaaataaatatgccatttacttataaaattattcatcattgggtaaacaggacacagaaacaggccagtaatgatgcttatagcttttttagggtctcaggcctggtcatggtcatcacagaaattagtctaattcaaattggcacactgtagaaacattttgacagcttagttattgatgttaaaaatgtgagaatagccatgaataaaatcattctttttttcttttttctttttttttttttttttttccaaattaggttaagagccgggaaatcttgttttgttttgttttgtttttgttttgttttgttttcattttggaagttgtttaccaaaaatacaccgatgatctttttatcctattaatgtactgtctgtgagaatcaagctaaaatgtaatcccagcacttgagaaacgaagactgggagacacaagtaaacaataacaggaattactattaatatcgtatgtgtattctgtacttgactgtactgaagtactagaaaaaaattgtcataaaactttgggatcaaaaggtcccttctaatggcaactgtccagattgaaaatttgatttcttatgtagctgaagccttcctctctgaagtatttttgtgttctgtctgtttgagctccaggttgtcaattaactgagatacatagacacagtcactgaggtttttggatatcgtggtacaatttattatgtttcagaatagaatatagaagagtagttttgcatttcaggaagagagggccaagtgcagtgtaagaaaccttatataaaaaaaatagctctctaatatgactcctaatgtcatgctgtttgacaaaatgatatcattacatttttttggaggttcacatatttattcaaatcttctttgcatgagaataatagggagaataacagcatgtctttctggagagctgcttgcaatagtatagtagaccagtgccagcctcagtgaatagtcactgtatgaactttgcccttagcaaaaccaaaaaaagtgttggcgttctgaaagtaggattctgactgtgtcatttacctcacaagatccagaatgagttaatggttactcagtcaatgtgacctcgtgcttgcttatgtcctgctttagaggagcatggtggtcagtgttaactgcgggggtcagaagtaatcttaccaagatgacagttttgagtcaacagtgcaccagctatgtactagagtcaaattaagaatagttggacattagggggttggcaagatgtctcagtaggtaaaggattgataccaaatgtgggatcggagtttgattcttaggtctcacgtactgaaagaagactaccaattccctcaagtgtctgctgacttcaatcatgtgccctggcatgcatgtgtcgacttgtgctctctctctctctctctctctctctctctttctctctctctctctctctctctttctctctctcatgtatatcacatgtataaaattaaaatatttaaaaatatagaatgaaaggaaaattgaatagtagctctcataaccactttacaaagtattcttactccataacttgatgttctcaggacttagtgaatggcaaaagtgcatatgccttaaataaacaaaaatattagtatttgaagttggaagttattccacttcctgcagtcttccatttctctgctttaacatttgtgttaacagagaaaacaaaagaagaaagtactttctgtgcatatcaaaccaatacatttacttgtttcatttttcaaaagcttactattttgtaggactagggaaattttagagagagtgttgaacctgaatccgactcctgcttgtctaccatctgaccctaagttagcagttatgtcccatatttctatattgtaaatcagggttaatatcaagttgtagagatgaataaactgtttttgtctagtttatgaaatgttagtaagaaatggatctacgtgatgtcttgactgatatttttctatggccctgccccagaagacattttaaaatttaatgttttcatagagtaatatcctataatactctatgaaattttatagttgtaatattttacagttgtttgatacccctggcttatcaatgttcttagctctgttatttgtaatgtcatttcaggttcctatatggttgtggactcctcaaatcatgatcctggagaaaaagccagacttcagctgcctaccatgaaggagaatgacacccactgcattgatttcagttacctgttatatagccagaaggggttgaaccctggcactttgaatatcctagttagggtgaataaaggacctcttgctaatccaatttggaatgtaactggattcactggtcgtgattggcttcgggctgaactagctgtgagcaccttttggcccaatgaataccaggtaatcccctgagatttttctggtttgtgctgtcttgtattgggtatctttgtatatatagatataaatactggtcctgcaggagtaggatccctccttcttgtttcccaactccttcttgaggaggagtttgagtgccttgacacagaaccttctaactatagaaaatatttccatgcatagaaaacagtagtttggcccacaatttgttgtctactttgcaaagagttacttacttcttattctgatgtacatatttctatgtctttctgcaggaagaaatagttttgttttgatttttttccccattagactgcaatattctgactggattggcttactgatttcttgaaaataccattttggaaataaacaggagatagaattttgtgaaatatatggtctttgatggtggcattagatttttcttttccttaactaaatggaatatttaaaacaagcaaacaaacaattcaggctatccataagaacctttgggtggttttccttggaatgctcaatctgatagtgatggaaggatataatgaattatgttaattgccagttcagggttcttatgacagagtttgcttggtttaagagagaagtcccacgcaccgacttgaagacatatttcagtcatgcagactgtcaggtttaggacctgcaaatacataaccattttgtaggaactcaaagcttgtgttttacatgatatttcaacattttagaagacctacctcttcatggcttactatagaacttgtgagagtacatttatgtacaagtatattccacaacacccaatagcaaaattatttcataaaaatatttctttatggttgtaactcattaagtacaaaaaacataaataaataaataaagcatccccttacttgctttttcctgtgttgattattctagttgcatggccatagttttaccgggtgaaagctatgtctctcattttcaagttgtgtgtctgctgaaaactcggtacatttcattaggtactagtggcttccatcattcctgttcagaaaaattgctcccttttattctgacaggaaaaccatggttttgttttttgtttctttttgaatctaaacctaaaaaaaaacaggtggtttccgttgtgttctcaactttacatgatttccttgatgggtgtttaaattggtttagccattcaggtaactatttgtacctgtgcagtttttgataggtgacttagctgttgatcatctctattccaagagacacccatttgctttaagtaccagttattagagacctattgtgagatgcctcccgaaaaatgtggacgatgggcttctattcctttgtaagaaaaggaccacctcattgtgatacagaagcactacctagacttgctttcctatttatgacttaaataacttgttttctcagatcaagccttctccagctcagcttggtagctccaggaggttagtctagtgttcaggaaccaggtacatgaggcttgccctctaaattcaagggtagcctgggctatagtttgaatcttattaaagaaggaaggaaggaaggaaagaaggaaggaaggaaggaaggaagaaaggaaggaaggaaggaaggaaagaagggaagaagggaagaagaaaaaaaggaaagaaggaaagaaggaaagaaggaaggaagaagaatatccaagctttaagtaattgcttaagatttcagaacttctttttacttttgaaaaaaaaatttttagaaaaaaaagttaaaataaaaacctttttcctcgagaaaaaaagtactaacatcattgtctaaatcatcaaatgatttagctgagaccatcaaatatgtcacttaaaaaaattagacttgtaaggagttgttctcttcaggttggtgaaagtgcactattgaagtggcgcactggattgccttgtttggtatttcactctttaatattgttttaaacacagtttatatagaaatctaccagttctgcgtattcttactcttcatggctggtccatcttgggagatactagctacaaaagaatgacagtttgtgtttgcatggtagccaatttaatcagataagtgccttgagtacacactaacattgttaaatggaagaagcaggtgtatattttatattttggcaatcatcatagtaacccaggactatataagaagttggtgggttcttccattttccatctgcacccataattgatcccgtgccacagagctccatagccagatagctctgagagagagctagcctcccaggagtgtggacaagcatgtgcctgcaggtaaaaccaccactgctgctcaaagggtccctactggaacactcaggacacaagaaccaaggagtggcctagaacaagagtcttctggtttccttctgtgtctatagctaatcctgtgacacaatacaaatactgccatgagagaactggtctctcaggagtactgacacagctgggaacacaggtaagacgatcacttctcttcaaattcctgacccaagaaggacccttccagagccatcaggacacaggaaccaaggaatagccagggacaggatccttctagtttctgtctgtactccagagctgaccatgtatcacagctctccatacataaattcttccatgagaaaactggtctcccaggagtactgacacagaggcttgcaggagggacaggccacagtcagagacagcaagaccagctaattccagagataaccagatggtaagaggcaagtgcaagaacacaagtaacagaaaccaaggctacttggcatcatcagaacctagttctcccaccacagcgagccctagttaccccaacacactagaaaagcaagaatctgatttaaaatcacatctcatgctaatgatagaggactttaagaaggacacaaataacttccttaaagaatacaagggaatacaagggaatacgggtaaataggcagaagtcattaagaaggaaacaaaaatcccttaaagaattacaggaaaacaaaaccaaacaggtaaaggagctgaacaaaaccattgaggatctaaagatggaaataggaacaataaagaaatcacaaagggagccaaccttggagatagaaaacctaggaaagagatcaggagtcatagatgtaagcatcaccaacagaatacaagagatagaagagagaatcccaggtgcagaagataccatagaaaacattgacacaacagtcaaagaaaatgcaaaatacaaaaagttcctatcccaaaacatccaggaaatccaggacacaataagaaggccctaaggataagaataataagaacaagccataaggataggttcttctatacctaagaagagagtgaagattcccaagttaaagggccagtaaatatcttcatcaaaattatagaagaaaacttccctaacctaaagaaagagatgcccatacaagaagcctacagaattccaaagtagatagaagcagaaatgaaattcctcttgtcacataatactcaaaatactaaatgcacaaaacaaagaaagaatattaaaagtagtaagggggaaaaggtcaaataacattaaaaggcagacctatcataattaccccagacttctcaccagagactatgaaagttagaagatactgggcagatctcatacagaccctaagagaacataaatgccagcctaggctactatacccagcaaaactctcaattaccatagatggagaaaacaagatattccatgacaaaaccaaatttaaacaatagttttaaacaaatgcagtcctacagaggataatagatgtaaaattccaaaacaaggcaaactacaccctagacaaagcaagaaagtaatcttctttcaacaaacccaaaagaatatagccacacaaacataagtccatcactaacaacaaaaataacaggaagcaacaatcactattccttaatatctcttaacatcacatcaatgggctcaagtccccaataaaaagacatagactaacaggctggatacataaaatggacccagcattttgctgcatacaggaaacatatctcagtgtcaaagacaaacactacctcagagtaaaggtctggaaaactattttccaagcgaatggttccaagaaacaagctggaataaccattctaatattgaataatagtgactttcaaccaaaagtcatcaaaaaagttaaggaaagacgttgaatatttatcaaagggtaaaacaatctaccaagaagaactctcaattctgaacatctatgatccaagtgcaagggcagccacattaataaaagaaaacatattaaagctcaaggcacacattgcaccctacacaatactagtgggattcttcaacaccccactctcatcaatgggcagatcatggaaacacaaactaaacagagacacagtgaaacttacagaaattatggaccaaatatatatattatataacatttcatccttaaataaaagaatataccatcttctgagcaccttatggtatcttctccaaaactgactatacctaataatagtaaaagcaatatacagcaaaccagtagccaatatcaaactaaatgaagagaaaattgaagcaatctcactataatcagggataagaagaggctggccactctctccctatctattcaatatagtccttgaaggtctagctggagcaactaggcaacaaaaagaggtaaagagaaacaaattgaaaagaaagaagtcaaaatatcagtatttgctgatgatatgatcatatatgtaagtgaccctaaaaattccaccagagaattcctaaagctgataaacaactttagcaaagtggttggatataaaattaactcaaacaaaccagtagccttcctctactcaaaggagaaacaggctgagaaagaaatttgggaaacaacaccttcaaaatagtcacaaacaatataatgtatcttgctgtgattctaaccagaagatgctccaacatgtaataaggacacatgcctcactatgttcacagcagtcatatttataatagccagaagctggaaacaacccagacgtccctcaccagaggaatggttacagaaaatgtggtacttttacacagttgaatattactcagctaataaaatcactaacttcatgagattcacaggaaaatagatggaacttgagaataccatcctgagtgaggtgactcagtcacaaaggaacaaccatggtatgtactcactgataagtggatatcagccccaaactttggaatacctaagtttcaattcaaagaccacatgaaacctaagacaaaggaataccaaaatgtggatgcttcagtgcttttttttaagcagggtgaacaaaatactcacaggaggaaatatggaaataaattgtggagcagagacttaaggaaaggccatccagacactgccccatctggtgatccatcccatatacagccaccaaacctggaccctattgtggatgccgggaagtgcttgcttatagaagcctgatatggctcttgcctgagaggctctgccagatcctgacaaatacagagatggatgcttgcaggtaaccactggactgagcttgagggtccctgatggaggagttggagaggggactgaaggagctgagggagtttgcagccccatggagggagccactgtgtcaatacctcagatcctcggagcttcctgggactggaccactaaccagagtacacatgaagggtcccatggctctggcagaagtgtctcatatgtggcagaagatggccctgttggatatcagtgggaggagaggcccttgggcctgagggtgctcgatgtcccagtgtaggggaatgtcagggagggagaacaggagtggttgagtgtgggagcaccatcatagaggcaggataaggggtttctgaaggggagacctggagaggggaaaacatttgaaatgtaaattaaagagaatatctaatccaaaaaaagaagaacaaggaggaggaggaggagatgatgatgatgatgatgaagaggaagaagaagaagaagaagaagaagaagaagaagaagaagaagaagaagaaggagaaggagaaggagaaggagaaggagaaggagaaggagaaggagaaggagaaggagaaggagaaggagaaggagaaggagaaggagaaggagaaggagaagcagcagcagcagcagcagctggtgtgtgtctcccttccagagaattgttcccttcctcctagtatactgatagaatgtctcacatttatatttattttatgtgtcatggtatgaagatgcagtgacataatctaggacttgaattcaggactgtatattcttaagttgactgccgaataaataacaaacagaaatgcttgtttctaaaggacaaaaagtcttttagaaacagaataactggttgcattaaagctaaagctctgccaagtaaagagtaataatcttccctttagaagccagactctgcttgtgttcgggaagggagttttgctttggcattaaacccatttgctttgaacagcaaggttgttactaaatgaggcggagagataacgtacataacctgtaaaactcttagtggagacttaatctgttgctttctattaacaggacacacatcattaatctcaaaaatgatgtgtggtgaatattacagggctctggcctggaactaaattgcaacaatgtagcaagtgcaccccccccccctcccccccatttaggagagacaagcacagacctggtgcaatccattttctctacttttttttctggtgctttgatgtaagaacatgggctgtagcctctggctttgcctcctttttagagttccattcacgtgtgttgtgctaatattttggcaatagagtaattcctatgctccaagagattgctatagtccagagagcggagattctgctggttctggatcaaagaagatgctgagttaagtcaagtaagcacatacatgaataggttgcctgtaaaagactgcatatggtgggagagcagcttctgtatcaggagcctgctgctagccatcctttagaggtccaggggtggtaaacatctcctccacttcttagatcttccaattttcctagtccttatttgtctatgcaggccccaccttggatatatactataaagttacatagtcccagtataaaactacattgtgtgaacattgcataaagttacatactgacattataaagttcaaattatttggattatataatccaaactatgactcattgttgtgaatactgagatgtatttagatgctgtttgtgtgtgtgtgtgtatgtgtgtgtgtgtgtgtgtgtgtgtgtgtgtgtgtgtgtgtgtgtgtgtgtgtgtttgctaaccactgtaggctcctctcacactggaaggacttctcatttcatttgcatttctcattccttttgtaggtaagggtggggaaatgacaattctctggattgtgagttaggagagggaaataggaggaggcaggtcattactagggcactcctctgaagaagaaaatgattgactagccttaacaaggcagcaagagtatatagaaagggccttaccaatatccccaggcaaagtagtacaatatataataatagcaataaatattgtttaaattgctcgtagatgagtattttgcttcctaaaatgatatgtacggggtcgtttttctcaagttgctcatatttatggtttacggcttgcacaggaagacatgtcagaagtgaacgtatgtatgtctgtgttgaaacaaagtcacatttctagtgtcctaatatatagaacataaacatataaattcgtacaaaactataggttgcatgagagtgtctcgatggattgcaggcagaaaggaaggaaggaaggggattatgcctcccatatatgcagtgctgtcctcgatcagctgtgtatcacatcctttctagtttaccatttcatgtaaagtaaatgtatcttaccttcctaggtggaacaggtttccaattagtgagtggaggattaaaattcctctttgccctctttagttacttagcctggctgataaaatttggactctgcacctctctgtacctattgaatgtaactgtgtacgtaggcttcttttagtaatggcagctgtgatggctctgcgtcgtcgtcattgtgtctcacttttatatggataaccgttcagttttcagtttttctcacttattatcaaggtggatcttccctggctgtcttttcacctctatgcttgcctttgtttcacctaaggtccaaatgaggatagaaagcctcgtgagttattacacagttattgttttttctaaaacttcagagtatgacttctctgcttcctgaggcaatttggaatggaatgtctcctcttctttgatgttagactctgtattgattggctgatgaatgtgagctcatgtaaacaaacaaagacaaatgaacaggagctctgcttttaaccacaggtaattgtttgcatacagcctgaccctctacttagctagatctgcttctgttcagaacctgaggagttgtcatgacaccctaggctacatagggagccactgattgttttgaggactcttgccatgagattaatttaattcctcttaaataactgattgaaaaataatggccattaggagagtcaggctttgttcgatatatgactctctccttgagcatgaatttgtcccatggggacatggaagagtactacattctttgcttgctcaaatttcttgcacttttagtctggttagctggatctgagacaacacacttacattttgtctttattaattatttagccttcatttgattgagacagtctttacacagcaatataaaataacatggataaatgcaaaaacatgagaattgtttccttatcatcagcttagtgatactttctgatacctcaccttcattatcaattcaattccatactgtagatgaaaagtgtgtgcatcaacttcaaattaattctcatttcagctgttgtctgtgctaatatttgatagttaacttgtatgagtctgtgatttttaatttccagtacaaagcaattgaatatctggtttgtgtgttgtcattttcaaagactaatcttttttcttttcatctgcatgtagtatatgaaggaagtactgggttttcaaagagaaaacaaagttaaatgtatttatgctttgtgcagtgaatatttcagtgtcattccatagactaaatcagaaaaataaaaatatctaattttctatattagtgtaaatattttaagtgtttccttcaagagtttaggaagaaaatataaggaaaatagacatagaagctggtatctatttttccttcagataaaaatgactataattgttgcttcctataaccccatttaaaaatggggctcagagctaaacaaagaattctcacctgaggaatacctaatggccgaaaaatgacctgaaaaaatgttcagcatccttaatcatcagggaaatgcaaatcaaaacaaccctgagattccacctcacaccacacagaatggctaagatcaaaaattcaggtgacagcagatgctggtgaggatgtggagaaagaggaacactcctccattgttggtgggattgcaagcttgtacaaccactctggaaatcagtctggcagttcctcagaaaattggacatagtaaaactggaagatccagcaatacctctcctgggcatatacccagaagatgttccaaccggtaagaaggacacatgctccactatcgtcatagcagccttatttataacagccagaagctggaaagaacccagatgcccctcaacagaggaatggatacagaaaatgtggtacatttacacaatggagtactactccgctattaaaaagaatgaatttatgaaattcctaggcaaatggatggacttggagggcatcatcctgagtgaggtaacccaatcacaaaagaactcacatgatatgtactcactgataagtggatattagcccagaaacttagaataccccagatataagatacaatttgctaaacacatgaaactcaagaagaatgaagaccaaagtgtggacactttgccccttcttagaattgagaacaaaacacccatggaaggagttacagagacacaatttggagctgagacgaaaggatggaccgtctagagactgccatatccagggatccatcccataatcagcctccaaacgctgatactattgcatacactagcaagattttgctgaaaggacccagatatagctgtctcttgtgagactatgccggggcctagcaaacacagaagtggatgctcacagtcagctattggatggatcacagggcccccaatggaggagctagagaaagtacccaaggagctaaagtgatctgcaaccctataggtggaacaacaatatgaactacccagtaccccccagagctcgtgtctctagctgcatatgtatcagaagaaggcctagtcggccatcagtggaaagagaggcccattggtcatgcaaactttatctgcctcagtacaggggaatgccagggcctagaagtnnnnnnnnnnnnnnnnnnnngagcgcgtgggggacttttgggatagcattggaaatataaatgaaataaatacctaattaaaaaaaaacaaaataaaaaaatgactataattacatagcatgctacaatgcctaatataaaaatgttagactatgaaaaggaatttttaagattgtaaatatctattcatataatttagtgaacaatttatagataaatagttgttttaaggcaaacccaatagtgttaaaatataatgttttagaggttgaagtaggagggtcattatttaagaaagcagcctctaatatgtaaagactatatcagaataggctaaccacacaaccagataaccagttaactcaccaatgagttaaccaaccgatcaatcagtcatacaaactaccagataacaagatcaattataatgcaactatgccacccccaaacaaatgaccagctagccagctaatttacagactaacccttcaaccaaccaactaatcaacaaaatagcagctaaacagctaaattacccctcaactggtcagctaaccagttaacttactttcttaccaaccagccaatcaaccaacccactcaactaattagcccccatttagtcacatccctaagcccagtaaactggctaggcagaaacaggcacagtgatcaaaggctccccccccaccccccccacccccaggatatcatggatatgttttagttaggtgaagttttgcaacccaagagcataagcttttagagtttttattaagagacctacccactcttcttagagtctgtcagcaaactaaatttgctttcatcttcagtctttaaaataagtgttcacaactcacagctctgctcaggggctacctcaacaatgataaccattttctaatcatcttaatatatcagctatatatcggttacttttcctggatggtaattctcagacatcacaatattttctttgaattaaattttcactctccatgctccaattgttacttgtattttttatttattttttattttatcttattttattacttttgagatgtgatctctctatgaagctctggttctcctagaactcactatgcagaccaggctggccttgaaggacaagtgtaggcaaccacattatgatcacatttcagtactggaaccagagtcaggttctggtcagttaatggctgtacgctttctctaaaaaaatattttttattgtcatttggtattatctcttctgaagtactggatggtttgcatcaattctctactcaagagatgagtagacgagacaagctgaatataactgtacaccttgatgaactgaattttgtttccttgtcatgagcatgcattgggatgctatgcccttcttaatattcgccagggtttagagagaaaaataaacaaacaaaatgtatacagagaagtcagaatgagccccctgtgagtgggcagccacacagatgtagttcaaggggatggcctctagatgataggaccagggactttatgctgattcctctggacattgttggcaagggttcccaaatccagttctggagacacgtctgtgttgattctaaattggagtttgtcatcaggacactgtgatgacaatgatggtctttaaaggtcctcttaagggctgagttcagcagatcaaagtgagtctaccttctgtcagcagacgctcttcaggcacacactgctattaaaacttgtacttaggaactgcttttctagaaagcactgactcttcacttgggcccacagagtaaataaatcaggataaagcctgccttctttgcattggctttctctcttctttacttgggtcagccttctatttaactctgcttgtaggtatgttcattactcctgggatgtttctagtcaaccttgtagaatctaagctgtttcatattctttggagtctgaaggcaccatggcttccactgtgactactctggacctgagtgttggagtgagacccttgaagtcctgatagctaannnnnnnnnnnnnnnnnnnnnnnnnnnnnnnnnnnnnnnnnnnnnnnnnnnnnnnnnnnnnnnnnnnnnnnnnnnnnnnnnnnnnnnnnnnnnnnnnnnnnnnnnnnnnnnnnnnnnnnnnnnnnnnnnnnnnnnnnnnnnnnnnnnnnnnnnnnnnnnnnnnnnnnnnnnnnnnnnnnnnnnnnnnnnnnnnnnnnnnnnnnnnnnnnnnnnnnnnnnnnnnnnnnnnnnnnnnnnnnnnnnnnnnnnnnnnnnnnnnnnnnnnnnnnnnnnnnnnnnnnnnnngcttctaatcttttatttgttttatgtaccagtggctccaataggacaattctgtgttgaatatgccaaccaagttcccttgtgccataaaagggcatgctgcttctccagccagccccagaaatggaagggggttctgttcccaaatggacctgctgggtttaatgcatcccagttagcaagtggctttcacttgctctaaagccaggagtgccctgttgattggcagcaggaagctccttgttcatgtggagagttccattttgcaggggcactagcctctgagacttgtcagcatatggcctttatgatacagtaaaaggtcttttctgcttttctcatagccatttgtggctcagtttggaaccttttgagttacttagccatggccctgaactgtaagggacagcaattttaaatgagtttgttgtttgaatctgccttggtgaaggtttttttttttttttttttttttttttttgttctttaagatagaaaactagcaagcagagagtagatagagccaagctaactgctgtttctcagtcatcactgtactaacttcatttcaatgggctgtggtgcccagaggttaggctcagaattgaatttcagccctgagtcccactcaggttccggggggagctcatgttgcagaaacaagcctcttacttcggtcacggaagccttcttaacaaatccctgcatacaatcaaatcgtggctatttatctgctacactagggttcctgacaatcagactggatgagggtaaagcccaccttctctgttcttcaaatcaaagtgtgacagattcttggtgacataacaaggcagaatttctgccaggccaagaattgctaaagcatttcagggaaaagaacagaaaaaggtgacaagccagtcattcactggttcatgcttttgattatctacctgtgtgtgattgcatcactttggtttatgggacagaggctagctttgttttattttttattttgtttgtttgttattttttacatctcataaccactattaactaggggtcaggatggtaagaattggtgggtcttaacaccattatttgtgattatattgcttagaattagtgaactgatctcattctgagcatggcaagtttagtataataatggtaattactaatggaatttgaatagaagaaattaaaaacatatattttttattttgtttttttttgtttaactgggtatttatttcatttacatttccaatgctatcccaaaagtcctccacccgctcccccacccactcccacttcttggccctggagttcccctgtactgaggcagataaagtttgcacgactgatgggcctctctttctactgatggccgactaggccatcttctgatacatatgcagctagagacacgagctctgggggatactgggtagttcatactgttgttccacctatacggttgcagatccctttagctccctttttttttttttttttttttttaatatcagggaaattgtctggaagtataaattaaagtgacatttgaaccttaaaaagtaacctaaccaaacaaacctccttttagttgctgactgtgaggaaagcttttttccttgttggggacactgaaagttttactgtgaccttcaggtaacagattttgaaggannnnnnnnnnnnnnnnnnnnnnnnnnnnnnnnnnnnnnnnnnnnnnnnnnnnnnnnnnnnnnnnnnnnnnnnnnnnnnnnnnnnnnnnnnnnnnnnnnnnnnnnnnnnnnnnnnnnnnnnnnnnntagcttccacccccttctttgcttttagtcctggtttgggaggcccatatacagtgaacacctggacccaaggggaatctggcccctccgaggaaagaaacttgtccttggtcataggtctgaggacactggaatgcgatagatatgatgcctgtcttatgaactttgatgagattccatgagccattctagcaccgtgttgattggtttgtagtgcaggaaggagaaaggtctgtttctagtaacaaactcccgtagaagagatggcctagcactcagaacacttgtttctgaggacctaggtttcatttgaaggacccacatggcaggtgacagtctgtaacactccaaggaatcttctggcctctcctggcccctgcctgcactgcacacatgtggaatgaaaatccacataggtaaaacaacaacctactctgtgtgttgtggggcatacatttaatgcatgtgagtggtgcatgcacataagtccctatccattcacatggatgtgggagacagagtaggacatcaaatatcttcactcttgctttctccattccccatgaaacagtctctcatagaaccataatcttgtctttaagtacaagctctctggcctgtgattcatttacctttgtaggaatagacctggctctctttcttcttctattggaaattcaactgaggccttcaggatttcactgtaagcatttctaactgcctattggtcttcctgctctggaaaatccagcattgttttgcaattcatgccaagtcggacaatttttttttattgttgttttgttttgattttttaaaagaactttttttaaatggatggctaaaaaaatgctttatttcaaaaaggaggaagaacattaagacatcaaaagtgcacaagacaatgagaaaacatgtatcagaatgagaccatagttcagccatattgacagctgcaccaagggtggatgggcaaagggcgttaatttttaaaagaaattaaaagggaaaccttgtctcaaacttccctgttagttagtttcatttcaaacattaactgcgtatatccaaatagctacgactacccaaaggatagcttctaacaggtagtcctagaatctaaaaaacacttcctatgttttcaaacttacatttaaatcttttttttttttttgagactttcaccaagattctatcttagaaggtaagaatagagaaatttaacactcttcccaattattgaaacaactaagcactttttggtctttcttaataggggtaaagtactccccaccgccatttatagggttaaaaactttaacctgaaaggtttgcctgatcttactctctaacctctgctgtcagagacccattgaccacatggaatatgagcatcacacacctgacagtggctgaacaaaccaggatttgtcttttgttcaactgtcttttagaagacgtaggtgctttgtgtattttactatgaaacatttcttctcctctctagcttaaatggaaagagtgttttcattgttaccatgcactgaaattacctctcctatgtgacttgtaaatcctggggagataagtaagttccaaagtttctttgatacaagtctgctttctctctgtgatgtatccagggtcagtgacatgagctgtgttccccacctcagcatcctgcctctgtgtggattggccagactatgaagacacacttcatctctagtagtttctcagtgaggagtagagacgcacctagggctgtattctcatttctattgagtacaccacagacaaagtatcaacacacctctaggcagttttcatgctcagaactgtacaactaattagtgtcttccaaggctgcgccctcccacctaactatagtgaggcctttgtcttctcaagatagacttctctgtggttctccttgtctctagacttcacgtaattatttaatgagtgttgtaatggaaataagaagcccttggaagtacaatcataatggaaatctcatgctctttaaattctaggcaaaacatcttatcatctctcaaagaaaaatagcttaaggaacttgtcttagtgttgattcttagtgctgtttttttatactttctttggtgttagaaaaagttgaattcctggcttctgtccgaggcccagtggggaaagtgctttttctataagggtgaggacctgtgttttgttccccagtatccataaatctgtaatctcagggtgaggaacaccctgggcccatcctgactaatctattcaaaatggtaaactttaagttcactgacacattgtcacaacaaaaaaggtagagagttccaaaggaatatatccaatgctagcctctggcctccagatatacacacataggcaagcatacccacacatacattagtgcatgccattcacactagagggattgttaatatccacttggaaaatatatggttttaacacagtacagtgtgttgatatggtatcataccaatccttaagaactgatttctgtacaaataaaacacagggaagaacactgatgagaaatgaaagagggttaatctcctaaaagtgtttattctcagtcctgatcttcaactgtaggcataccttcatacacataattccacactaaggccatcttttctagataatagaaacctaaagttctgaaagcaaacctaagcctcaggagaatgtctaggtaagcttaggggtagattcagtgaacagaaaggggaggctggcttcagaagatcttgtgaacaatgagagccaatctcagcactggtggggctcattgatttagtatagccctattctcgttctggccagatacatggaggaggtgctagaagagatttgtgggagtggaggtgagaaaagtcagttcttgtcaaaaacagtttggagaccaaccagaagggagctgaaaattattgtcaagttagcttaagggtaaggaggcagaattttcaacaatttccaaagtggctgttaacacacttctctaaaattgtactcaggatttatgaggcatgccattctcagcgttaatgttacaaaatcaaactctgccatgcaactctgccaaccatagggacagctctgcatcctacaacatcgagtatcaagcagagatttaattctttaggtaaaaataatcaggcacatgtaactcattagtatggaaatttattctcaacttcacaatgtttaaatgttttgtctaacaaagaattacatgagcatgaatttattacttgtaataagtaaacttgactttaaacctatttcatatgtttgtatacctgggttcatataaaaatttctggggtagaagggggccctatgtggaaagtaaattagagagacctaatttatcagtagcttcgggagtaagaatggctatgttgcaataaagccttatttttgaacacccaaagtctattttatatattttaggtgttgtaaaatattattcatttcttcttgtttaactccaaccatctatacatgtagaaaacattactgtgtggaccacaggatatgtaataacaagcctcaggctggctttggctggttagaggtgatttagcaaactgttgtataatagggaataacttcagggcaagactggcttattattatttctcaaagaaagtataaataaccatccttccatgccaggacagcatgctcccaagcattagaacttttgcccaggttcttaccctacctgatggtttcctagaaaacacgctcctgcctcaccatctttctctagcatctgcacggtgacgcttccacagaccattctgtttgaattaacaacctgccccctcctcagctttcaaggtataaagtcacccttagatatgactaatcacaaatatcttttcttaaattacaattttaacttgtagatagaggctaacctgtatttgcttggggcagggctgtattttctttccagagctgttattaccattgagtattaactaaaaccacaatggatggtctgtctcctgcaagcccaactcctgcccatacataacacttgcttctttactccatggcacatcctgagttctccaaactgttgcatattcgcagttttaatatgcaactgagaatattataattaattttataactcagttataaaacaggggcttctatcagaaattattgggaaatatttgctggataaagaaataaatattataaactttaaaaatagaatgcacaaataccctcattttctcaaccaaccaaggtccacagagctccaagggactaaaccactaactaaagagtatatacatggagggacctatggctgtggccacatacgtagagaggatggccttgttggatttaatgggaggagaggtccttggtcctgtgaaggctagatgccccagtgtaggggaatgccacggtggtgaagaatgagtgggtaggtgggtgggtgggtgggggagcaccttcatagaagcaggcagatggaatatagagtttccagtgggaaaaccaggaaaggggataacatttggaaggtaaataaagataatatccccccaacccccaaaaagaaggaggctggggaaagtcaaggagaaaagggtaaggtgctttatatgggagaatattaataatagaatattagtgtgatatatttatataaacaacaaaaatgttttttttaataataaacaaaccatttcgagattaataataaaaataagaaagttaaaacaaaacaaaaaaaaccctcactggttgttattgaagagggtctggttcatttcccatcacccacatgctggttcgtggtatgttgtatcctatcctgtcctctgcagaacactggatatagaatgcacagagatacataaagggaaaccatacataaacattaacatattcataaatcaaggtactttcctcctactttgtgagaaaccttagataggcaggttacaactaatatttggtaaatgtttattcataaccctttctttagctggaaagggttctttctatacaatgcaaatgattaactagtcagttaggtctcctaataggaaggcaatgaatggctgttaaagatgcccgagaaaatgcatcattggaattggcactcttctcctctctgtactgcgctgaagtgttaatcaattaatcagccctgcaaaggctttgatggccgccatacttctttcttgggaataacttccatatggtctcttatgaaatggttcccaacttttgcactataacagattttctcagtgtgcactggattgcctggaagttttgttttttaaaatgttctggcctctaatcccagacattctgatttcaacgtatagagtaaagactaagactgtagatgcagttgtcagtgtatggaaatggaccaaccagaaggttttaggtttttcttagcttttttctaaccatgttgtttgtcaattattcagttctagaggaagaggaggaagaggaggacgaggagaatgtggtggtggtggtaaacgggttatttttgaatgaaccttaatagtatcatgattttgggtcttagaaatttattctgaggtgtcttttcacatatgcctaaggatattgtaatatagaaccagtcatgtgctttctgaccacagcttacttcaaatcttacatcatttctttgtacttgggtatcctgggacttaggagcctttgtatgtacttttaactgccctatgaaaatggtgattagacattaaaaactcactttttttgtttgttggttttgtttttttcttttgtaccatctctttttatttccaagtcaagtttctaaccttcaaatagtaagtgaacccagttgctgtcgtgttcatttataaaatgctttgcatatgaagagatgttgctaaaaaagtttcatgaccgcacacaggagtttcttacattgtgcacatctgaaatatgtactgatcatccagttatcttttaaaaggaaatcaattatcagtaatggaaggattttcacacagaagagtgaagttatatgtgtaagtatattcctctttatcggggctatgatgcattttttatactatattataattgtgtatatacacaaaaacatgttctctttttattgctactgcaaaagtatactgtagctcacaaatatatgggcttagtataataactaaagatcatattctttcaatgtattatttcttttcagcagttcagtctactaatgtttataaaataatccatttctgtacctatattatttaatgaaatataattttgtttagtctaaagtagttagaatgtatattatcaacatagtatgtgaagtgtgtctcaagttttcataataagtaaacaaatagctggtgtctgtttgcaactcagtttatatttgagttgcagaatatggagaagtcagggtagtgttcaattagaagattcatctttccgaattagtgttcttggtgctggaaggtgctacacactctgcaagcagagaaaagtaagaatcaatttcacccaacaatggaccctgaaagctacaacagatgtatgggaagatatgtacattagtgaattagtgatgtgcacgttatgggtgtaacccaccagttctgatctgctctaagtcccatttcatgagatgggatttatagttgtcactattaaaggagcaaataacctgagactagatggcatataggttgggagtggggctgcacaacaatattgttagtaagtagctaattcttaaaatatgttggtcctagcatatatatatttcacattcattgcaaatactctatgcccaatgaacaagataaaattcaataagttttttctttgccctccaatagcatgatcaattgattttatacaaataaatatgtaaattgtaggcggacattttgtattatttactaattgcagagaagcaagaggctagactgtaaaatgcagaaagatccctcagtacaccagcttactaatttaaataataagagaagaacagtcctctggtagcatttctgtttctgaattcactccattgaaaactgagtgaagcaagagatttctttcatgactataccaataaacgtggagagaaatctgttttgagataaagcgtctatgtaatgaagaatagacacttagaaataaggttgttactaccagtgtgaggttaggaataaagtgatgccaagttctccatagccataacataatagtgaccatttttcctttttcaaatatatttggtcctaaaataaaatttaatattttaaagttgtaaaatgcatttaagtagtgttcgtagtatgataagatatctataagagtttgtgaagatctgtaagacaagataattattaatatggtgggaatgtttcctgtctaaaactcaggtgttggtgaggtggtgataaaagaggagatgaagccacagattcacctccttctgtaccttagaaaagaagcatatgtagcagaggatggcctagtcgaccatcagtgggaggagaagcccttggtcctgtgaaggttctatgccccagtataggataatgccagggccaggaagcaggagtgggtgggttggggagcaagacgagggagaaggggagaggggattttcagagaggagactaggaaaggggataacattagaaatgtaaatgaagaaaacacctaattaataatatatattttaaaaaagctaacctccccctcccgttccaccacagaaaggctggattcatcattcttgagactgtagatatagatagtatcctcttataagcagaacacagcctttgactaacacccaaacattccagtcctgtgatctttaacttcctcaagaattgagagaaataaatgtattccatgtaagcaaccctaactctgttacttggtcatagcagcatgaacaaacgaaagcaaattacttattctgtacaaacaattttacatggattgtcatctttaattttcacatggttaattaaaattttattatttcacaatgaggaaactgaagttttaactagcctgttgcaaggctagtgaccattagttgtgtattgaaatcctcagtatttactaaataagtatttagtaaatgtccaagaggactgtttgatttctttaaggaaggatgttgcaaattattttgcaacattgaaattcttttccatgtagagatacaaatacaaattaatatagttgttatattgccatatttttctgttttgtgtgtatgcagacaaggcagtaaatatttacatcagaattcaaagttaaagcttgtctttattggaggtggcacaaaggaggaagaacacacacagcaaatgtgttgtatccttaatggaagttgcgttgtgagttttgaaagaagggagaatttcaggaccagataaaatagcggctataaattcacacagttgtgaatggtgtctgggaaattatggttctttgcatttgaatcttggaggtaaaatataaaataatatttgaaatggaaatgctttccaaagaagaggggcctttgtatttgttcacactaatttgttagtgttgctgaggttgcaattggagtatcagcagccctaacaggtttgttgttatccatgtcttaaaagcattctaggtctgggacatgcttctatgtttaaggacatggtgcagtcaagcctcgtgacctgttgtgttctcctccccctccccccccccccccccggcctccgaggtccacattatagaaggagtacataacatctatgaaaatttattcacatgcatacatatgcacatacccaaattcaactcaaaaattgaaaaatgagctggacaagatgacttagtggttaagaactctttgttatttttacagaggactgggtacacttttttaaacttctctgggcactaagcatgtgggcacatgttatatagaaatacatgcatgctaaacatttatacatataaaataaataaatctaaaagagaataaactataatattctaattacctatgctatctttttgtatgttcccatcttaaaatgcgtttgttcagttttcaaaataaacttggtgtgtatttcaaatacagggtacaattcccttgagaaatgcattgattacaatcataaattacacagaaacatcattagaacttgctgatacaaatttgttttttctgtaataaaagtaattttttctcaacttttttttggtgtgtgtgtgtgagtctttgagatataataatttttcttttggatagttgacccatcagctcagtaaattcaaataggcctttttctttcttcaacttctgattggtagcctgggatacttatctaaatatatctaaatggatatatacatatgtatgtaaatcttatatatttaataaataataaatatacaaataaatatatctaaataagaattttctacttctcttttctctttctatcagcaggatatacttttnnnnnnnnnnnnnnnnnnnnnnnnnnnnnnnnnnnnnnnnnnnnnnnnnnnnnnnnnnnnnnnnnnnnnnnnnnnnnnnnnnnnnnnnnnnnnnnnnnnnnnnnnnnnnnnnnnnnnnnnnnnnnnnnnnnnnnnnnnnnnnnnnnnnnnnnnnnnnnnnnnnnnnnnnnnnnnnnnnnnnnnnnncaagccctccttgaaaacatacatgtgcaggctggatataggtcaaggactgctatattttggccatagttggccaatggcatggtattccaggagagattctgaactgtgaccagagcaacttgaaagagataagtgttccataaggtgcatcagctaccagatggccacagtatagtgatcagaaaagagaataactgttgggagaaggattttgtgcacctgagttctaactataaccaagcccttagaaatattttgactttggatgcatgctatactgtattagtttcctcttgcaatgtaagaaatccccaccagttggtagttgaatgttgcagtgcaggtatgggtcactagtccacagtcacagtgttgacaagagtgtgtcccttttagaaacattaagaacaagtatatttccacacatttcaaggaaaatttccaaatttgttagaatgtaaagaaatttactctgccattgcaccacacagccctatgctgtagccaatccaggggtttgttgaagtcctgttttaaactgaacctactaacaacctgagttccccttgtgcaacatccttttggaatcctcaggtcagtctgttgctctttcctttggaaccattattctgtctgttacactgaacttctattttgattttccttatttgtaaattaaatttctttgtaaaaattaaagcacaaagagaaagtacgttaaatacctggttgaatgtctgatatactataataattcagttagtgagatctatcatgacttcttacttcccatattgcttgtcttattattttccccatttcttgcttattgtaccacatgtaccacattttaaacatcaatatattttctccagtgattagacatttcgatataatatttgtacactatcgagagtatatgcatggattcattatgctagagatttcgagagcttaaatattagattgttcatgagtagcatatgttaaagcactctgcgggtctctgatatggctcccgttcccctaatttctacatcattaccttccaatcttgagcagaccaccagagtacctcagcttctattcccactgtctcactgaacaggataggaaaggactcgacatctcaggtttctagcatgattgcagtggctgttgatgtgattggtcagggaccacactgtgtataactgctctagaaacatctatgaagaaagtagtgtaattgtctttcttcacgtgtgtagtaaacatgtttctgtgaatttggctgagagctacccagaaactgaagatagcagagtagttttactaaaaatgcatgcattaaaacaaaacaaaacaaaacaaaacaaaacaaaaaaccaaacttctgaaagagatctgtcttgcaaagtagtgtcatttcaaagagaagtatgctttaacaacaggtagctatctatcagtgtgtctttctaaacaggaaagagtatctgataaagactagcatggggttttcttttttttcccaacttttaccagtatgttgagcaggctattcttcaatcatgaaaatcataaaatggaattgctctatctgagggtgcctctgcttcacaaatcaagtgtcttttaataatactgtcttgcggttgctaaacatagtgctattattttgcaatgtgacatttatgcatcatgaagagacttcatttttatataatgcgtgaaaaacgaaacatgggattaataatgttagacacatccttgaaattgcccttgaattatagcagtattaaacacctaacaatttatgtcatgtttagcctgagattgctttgataaagggaccttgtacaagtttctagaatttactttgtccacatgaaatatattaatatgacagaggttcacattttctgagcttgtctcttcagtgggaagctgaggttgtacagacgggacaggagctcaactctgtcacatttaagtcttcaggtgtgttatttaaaaaacttgttctcgcaggtttaattgctctcttaaaaaccatgagtttgaaaagtgtttagtgtcattgcattgattggacaataatagaatatcaaatgcattgttcccataatttgatttttcagccacttaagatatttaaattgggcttctgttttaatacctttttatttagactgggcatggatttttttttaaagattttatttatttatttttattatatgtaagtacactgtagctgtcttcagacaccccagaagagggagtcagatctcattacggatggttgtgagccaccatgtggttgctgggatttgaacttcggaccttcggaagagcagtcgggtgttcttacccactgagccatctcaccagccctgggcatggattttgatgaatttgatttgtgattcatttccttcaagagaatggattgtgtttgatgtaatgtgaatgaggactgggatgtgttcataaggtaatgtaactggagatttctgtaccctgaaatagacactgctcttagaaattcaaggtgaacagggatttccagttagctcactttataatagcttacaagtgtgtatagattttctagaggtctttaaaacgtagctctaaaagccttattattcagaagtacctcagtcaatctctactagaaactacagagttttcacttagtatgcatgtttatgatcactcaaatgcacatgactcaaaagacccatggaagagcaggttatagccatgatgttcaatgagtgtttggaaaggaaaagggaaagatcatgcgatctggaattcaccaggttgataggaagtgccatgtactgttgagaggcagaaaaaaatgataggtgtgaggatatgacagcagacggggtattggatattttcaattttaatttacaagcactaaaattatagctgacaattttaagcatgatcagtttttaaaaataggttgatatgtgttcaatattaaccaactgtaattttttttcattgttcatttattttatttttagatttaaactaaaatatattatagacattagattatgcttttaaaatgttttattaaagtatttctaagttcaagttttttaattgctcttattttcatgagaattattcatactggaaaagtgcatagaagactaaaaaataatattgcccttaccatattttttttgtaatatttgagagcaagggactttcaagattttatgaagaaagtgtattttcttccagggattattatttaatacagtgttgtttgcacttttaggtattcaattggtttggtttcatcatctgtatgtaagcgaatattggaacttgcaagtaaaagtagactagaaaacacaacagaaacttcattctgcttgcaatgaatgctgtgacagattgatcattattctctttgctccacccttctctaaattaggcagttcttaaaggatctaagcagaattcattagaacacacatagaaatgtactatctgcaaagttttctctataaaattaaacatgtattggatgggggaaatcctagattaacttttatacagttatgttcagaacatggtataaacttcaaagaatggtcaatgaactactttttaaaatattatttaatgtgttgatagtctgtgtgtgctttttgtatgtgctaagtagtctctcttcagttacattgatattaagggggaaaatgaagaggatccaaaatgaaaacagccagtgactatctagtaaagtagcagtcagcacatctttcccagtaataatagcctcaagctctgtcaggtgcttatgtggtagagtgtacagatatacagtgcagtccaggctccttggtcccaaagcaaagagaatgtttctatcctactttgtctatactgtgaatatcattattataagacttcatagactttataaaatgtacatctcttaaaacatgttttttttttgcatttgagagaactttttaaaattatgtatttttatccatttatttttaagatataacttaattacatttctctattccccttttccatccaaactcttctatccacttttttccactcttattcaaattatgccttcctatcctttttcccaagaccgagtttctttgttgtagtcatggctgccttggaaatagctctgtacactaggctggccttgaattcagagagatctgccagtctctgcctcccacgtgttttgattaaagacatgcaccagtacctccagattcccttttgtcactgttattgaatgtatagatatacatgtaaatacatataaactcttaaatatgacctgttcatccttataaaggtacttggatatatgttttcagggttgaccatttggcattggacaaccaactggtgtgttcttccctggggaaggccacccctcctattttcagccttctttagttgctttctgttctttctgtagggttcaggactggtcggcttttttagttcagtttgtcctgatcattggtgtctttattgtcaacctcggtttagggtggtcatgttggtaagattttaccaatgtaacgtctgttgttggtaggagatacaacttcacaagtccctgattctcttacagtcttttggctctctcttctttccagtttcctgagcttgagctgtgggactttttttgcagttatacatcctgcaggataagggtccatgaccctgaattttgattagttgtggtttttccatgccgatctctgttgcaaagagaagtttccttgatgaggactgaagacctcacttacttatagacgaatgtctataaatgttttagggattatgctggtttagtaaacaagtggtcacaaattctcctctgatgactcttgactttactagtgctctgtagttggctaggtttctattgggcatcttccacagtctctcttgttgcgtgtgtcatatatccgattagagaactattggttggcatgaacgttttagtgccaatcttaaatacatttttcctataatgccatgcagatttctgtaaaggtgttttgtccttcaaaactatggggaaatgtgatataacctttagaaatgtggttcacaaggtgagacatgtattctttcactcaacacctttaaaggagtgggtatttgaagcaaggtaacaagtaacccaaaaggtagaaggtagagggtttgcttttgttttccttttattatttcttttgtcctaaaacacagatggctcagtatctacagtctattcattttatatgtgtgatttgggatgtgcatgctaaatgtgaagggtggggaaggctcattgccgagtgtaggggtggggaggagggaggaagaggaggagagctcttgaaatgttaggattttctctggtgacattcacttaaatggtgttaaagaatgagagagggtcattttcattggtttgctgaagtccaaattaggtagaagttagcatttgttttgaaataaatgttatgaagatataaaaggatggatggattcagatggtaaagagctgtagtagccagaaggtatcaagcctggagaaatgatgggagggagaggggggttagaatactgaatatctacaagaaaaaaactgtatacacacacacacacacacacacacacacacacatattcacatgtagctgtgtggagtcaggtgaatctattggtagacttttattatttttagtttaagtgtttaaaactaactatcgattgtcttaagaattattgatcttagagtgtgtgtgtgtgtgtgtgttttatgttttgcatgttttcctttacctgcacatcatagctgaggaatattctttgtggactacgacatagaagattattccattcaccaactgatgtttagaatttatgtttattaaataattatgtctattaaaaggtacatgtatagctgggcagtggtggtgcacacctttaatcccagcacttgggaggcagaggcaggtggatttctgagttcgagggcagcctggtctacagagtaagttccaggacagcaagggctacacagagaaaccctgtctcaaaaaaataaaaaaaaatgtatatgtattataataccccttttaaaaataaaaaccctgttaatgttgagacactagaaagggagaactagcttgtatgtggtctcctaattgtgaagctatagtctgaagctgaagggattgtttgcttagctttcctgaacaagtttgtctccctagtcagcatcactctgtttgttcactggctcagacttcattcaggccttctcaggcatgtctttgtgtcaccttgtcaagttttaagttgattgggcacccctgggggaaatggtgtgggaaagacatgaacactcttgagtgccagcatagatatggcgtgaggtgaggggcgagagaagccaatggtaagccaagtcctggcagaaatctgcctccaggaggctcaagatggtcgcttaggggaagcatgtcctactctgacccttagtgccagggaggcttgcagttctgcttacaggaaggtagtaccagcagtttttatatttgttggatcgaatctattcataatctctctattttgtttgtctaatctttcaagagctgtctcattcactctgatcccaactaccattcttctcttaagtttctttgctatattattgcttgtcccttcttaatctcacacgttgcagcataataagcctggggcatctctacaaacaactctctctctccttctctctctctctcatctctctccttctctctctctcacctctctctctctctctctctcatctctctctccttctctctctcatctctctctcatctctctctctctctctctctctctctctctctctctctctctctccctccctccctccctctctctctcttcttttataaaagatttcatagttcttcctaagtgtatctgctaattaatctttacattacccctgtgaggtagacagctgaataggatattctgcacacaaagcactagaccatgctgcttctctgttatgatagaggattattgttatgttaaaatgtttatacaccaagtacataaatttgtagagatggatgtaagccgattccttgggcaaaatatatgaacgtggttatagcataaaactgcaattgtaaagcaagttttatcagcttctggtatttaaaggattgtcccagatctgcatactaaacctctgtatgatagcctctttccattctccagcctttgggtagtgacaggacacagtaagctggcgaagcaggactgcagcaagcagctatctgagatcctagatagcattacttttagactactggaagcttctttggtctttaggaatacatatacataaatcactagagtaatagcactagtagtttttgatgataacctgatgatagtgaatggaaattggttaggtgttgtacgctttgtatagagtttggtgtgggtcttctagaacatagctttttaaccctctattgcagccccatactgggcatatgactaaatgtgagagtctggaaacgttggggtctgtataggtggagatggggacttttcatgtgtaggaacagtggcctggaggatgggctgagtcttgctagtgaggtacatcctcacataagttgcttatgcatggatcatgacagtagtggcataaggaaaccactgatagtggacatgggaaaatgaggttatttttctcttgccttaaaatggcttggaatttgaatcttcaactctcttaaccctttgcctgttaacacatgtgagtggggaaacaaggaaattgctttctctataaaatatacttaaatatgtgtgattttaaaactgaaagatgctaagatcaaaaattcaggtgacagcagatgctggcgaggatgtggagaaagaggaacactcctccattgttggtgggagtgcaggcttgtacaaccactctggaaatcagtctggcggttcctcagaaaactggacatagtactaccggaggatccagcaatacctctcctgggcatatatccagaagatgccccaacaggtaagaaggacacatgctccactatgttcatagcagccttatttataatagccagaagctggaaagaacctagatgcccctcaacagaggaatggatacagaaaatgtggtacatctacacaatggagtactactcagctattaaaaagaatgaatttatgaaattcctagccaaatggatggacctggagggcatcatcctgagtgaggtaacacattcacaaagaaactcacacaatatgtattcactgataagtggatattagccccaaacctaggatacccaagatataagatataatttgctaaacacatgaaactcaaggagaatgaagactgaagtgtggacactatccccctccttagatttgggaacaaaacacccatggaaggagttacagagacggagtttggagctgagatgaaaggatggaccatgtagagactgccatagccagggatccaccccataatcagcatccaaacgctgacaccattgcatacannnnnnnnnnnnnnnnnnnnacgcagatgtagctgtctcttgtgagactatgccggggcccagcaaacacagaagtggatgctcacagtcagctaatggatggatcatagggctcccaatggaggagctagagaaagtagccaaggagctaaagggatctgcaaccctataggtggaacaacattatgagctaaccagtaccccggagctcttgactctagctgcatatatatcaaaagatggcctagtcggccatcactggaaagagaggcccattggacttgcaaactttatatgccccagtacaggggaataccagggccaaaaagggggagtgggtgggcaggggagtggggggtgggtggatatgggggacttttggtatagcattggaaatgtaaatgagttaaatacctaataaaaaatggaaaaaaaaaactgaaagatgagtttacttttgttaccattggacctacagttaagtcagcgactcttgccttcactttgtttagagaagttcatatctggctccattcaaagcttgctctgaaccctgctttaccacagtctgtctgtcctttgaccctagatcagggttcagcacattgtatcttgtctgtgggggcagctcagtgtcaaactgtctttgtgtattgatgtagagaagtaattgctgctttctgccctcatgtgaccccatgtcacaggtattaggtttctttgcctcctataatcccagtgaagggtcagaaggagtaatcactgtcatgcagactcccatctggaagtttattttgcttaattaatgatatacactgaaagcattctttatgcctataatataaatgtataagaaaattatctttgtgttcaacattaaaacaatatatctcctagagatttctgagtatataacattttatatgtaaattttaaatgttttattgtcctaaggttgtttttaccttacgttgtctttttgtttataattttgaaaaaactggaaaacatgctcatataacttccaaacttgcatattctagtgaatcctatttttgcttaaaatttgcatggctcttaaaaaaaatgtatgcttgtgtgtaatgtgtgtgtgtgtgtgcccacatgtgaggggctgtaagatatctagtagccccctcattcttttcttctctccctaccttcctcttctttctccctctctttcttctttcccggtgagagctaatttcaaagcttccctgcctggtgacattttataaactgttgttaactattatgtacaaacattctgttcctgggatgatgagctatgtctgggtggaatgtgatggctgttgattataaagggggtgagcatccatgaggacgccccctcttctcactgcactcaaatgcactaaaagttgctgattaggggggaggagataaatagcagaaatgccactattattcttgtcaaaatcaaaaccatttcagtggtcaccgaaaaacagagttctgccttttctttgtgtttaactctgaaataatttttttcagccaatactgtgtgtgtgtgtgtgtgtgtgtgtgtgtgtgtgtgtgtgtgtgtgtgtgtgtgtgtgagagagagagagagagagagagagagagagagagagagagagagagagagatgttttgggttacctttatgttgtatgtccacttggcctctgactgtattgatccctctccgtgtgactgttgctctcgcaggtttaactgatgatcattctatagtcctccgaggaaagccattcattggggagagtgaatccattttctctgggtcttaattaaatgcatctaatcctgaagtgcctgttgcttttttttttcattttctcaaccatcgtgaatcaataactttctatttttcttgatctggggtctgacttatattaattttttgtcattaattagaatcaacctggaccacatttagcaagcagatcaggctttggcactgggtgattttttttcaagtatctatttttcttcctcctcttccttctcctccattttaaatttgccctcagtgggaatggcgctttccctgggaattggcctcatttccagctctgttcaatcctgtgtgctgtggtcacagtgtgagcttcctctacgctaagtcagaacttgggataattaatgactgagtcggaaagccaacacttaggactttgtgggcagaagaacacctcacaccagttcagatcctacctcccccattcctgaccactttgctcagacctcctcccttgactctgcttagtactgatgacaattccccagtcatgtgacatgtgcatttgttcaagtgtaacaggaaatcaggaggcttgtttgagaaccgaggatttataatgttcttattaaattttactttgttagatgcatcttactatgttagcctacggattcttgtccttttttttttttttttgagccattttctgtagacattctttaaaaaaaataataattttaattatttacattcaaatgtccgcttttctgttctcccctccgtaaaacctcacccccctcctctttgcctataagagggtgctccctccccccactcctgcctcactcctctagcattcccatttgctggggaaattaagcctctcccctcccattgatgccagataaggtagtcctctgctacatatgtagtgggagccatggacccactcacatatactcttcgggtggtggtttaatccctgggagctggaagggatccagttagttgatactgttgttcttcctatggggttgccacccccttcagctccttcagtcctttcccttactctttcattgaggtccccagggtcaggacaatggttgcctgtgattatctgcctatgtctttgtcaagtactggcagagtctctctgaatacagctataccaggcttatatttgcaagcacttcttggcatcagcaatagtgtttgtgttttgtgtctgcatatgggatggatccttaggtggggcagtctctggatggcctttccttcagccatgtcctttagacaattttatgttaaagattttgagatgagttggtggccccatccctcttctgggggccatatcctggaggcggtctctttaggttctatctccctgctcttgggtatttctgctaatgctatccccattgggtcctgggagcctctaacatccctagctcatgggactttctagtggtccctcatccctcactgctgcatatttctatttattctcttggctctctggatttctctcatgcctctttccatacctgatgctgccgcccctttcccctccccttctcctctctcatccatgtctctccttccctctgcctcctgtgattaaaaactggggtgcagaactaaacacaattctcaactgaggaatctctagtggctgagaagcacctaaggaaatgttcaacatccttactcattaggaaaatgcaaatcaaaacaaccctgatatttccccttacaccaatcagaatgactaagataaaaaactcagacaatagcagatgctggcaaggctgtggagaaagaagaacactcctccattcctggtgggagtgcaaactgttacactcactctggaaatcaatctggagctttgtcagaaaattggaaatggatctacctggaaacccaactatacttttgtgcatataccacagggatatgtgtgctccaccatgttcattgcagccttatgatagccagaaactagaaacaaccaagatgttatcaatggaagaatggatatagaaaaagtggtacatttacacaatggaatactactcagctgctaaaaatgacgacttcaagaatattgtagtcaaatggatagaactagaaaatatcatccagactagaaaggaagtacatggtatgtactcactgataagtggctatacccatgatgcaactcacagaccatatgaagcttaacaagaaggaaggtctaagtttgtatgcttcaatcctacttagaagggggaacaatagacacttataggcccatttgtgtttgataaccattctctagctacattctatgtcgaaggttggataatgttgataagtagactaagagaccaggccctgagcaggttgcagtcacttcatggtatgtaacaatctcttaaccaaaatatttcctggtgttaggtctgaaatgtcatcactctttcattatctgactcatgtttctgcctcttgactgtaaatgaacagcaggagtcttgacagatgccttactgaagtatgggctaattaagatgtatcctgtttcttttacctgttattctgatactttggacttttctttggaaaaaaaaatggaaactctttatttaaatgatcaatgtaatttacaagttttagttacttggtttggaaatacaggatataaggtgttttgttaaaactattttccttctgattttaaaatgctagggatctttttgcccttaatttcttatatattgctcatttatattgttttttgttttgtttttgtttttgtgttagtaaatagcccattatatctttccgtcgttcatttagacaaacaaacaaacaaacttgtaagttccagagaagagccagatacttcctcacactttcttcatattttagggtctcatgctttcgtgaactggcagactggaattaatttcatcctaagccattggctgagttccatccataaatcacggtagaatgttattctaacaacatagaaatggatgtgtgtcctttccccaacctttacttctttggtcaggagtcagttatgagctaggctgcccaaacttcacatgtgctcccagaccttttattgatcttctttcagaatctgtctctattattactatttcaagactcagtgtcagcagaatattgttttgagagagcaggtcatatatttcattaggatgacatatggttgttctctgacctctctcctctaagttaattctcagtgttttggccatactctttgatgcctgatatctatgactcctaagagaggacacaagacaatttttttttgtatgccagtttcatagtttgtcaacacaatcaaaaaatggaataagttgacaactgtttgcacagctgtgttattttctctggaattgataataagactcttaatttaaaagacccatccaacagtttagtttgatttattcttcaaggaaacttttagaagcttatctctaggttaaatgttcagtgtgcacgttattgaattattttctctacgagtttgagcacaaagcaaaaaggttagagaaatctattcaggctgtcataactatgcctggctatgtgtgacagatgctaagtagcagaacctttacgttttttttttttgtgtgtgtgtgtttttgttgttgttgttgttgttttgtttgttttttttgtttttttaatacacacagagaaggtttagaagggatcctttatgcctgtgaacaaacactctgcaaatgaggaatccccatttggacaaaaaaaattgtccatttttaaaaaaggtttaaaaatatatacatagtttgctaaaagtttagatttgtcaaaacatatagatctggattaaaacatcagcttgaatctttttcaggcagcggtcttgaagttataggtgagtgatagaagtaatggtcgggcaaggtcatttgaaattgcgccagactttctcccctcacatttccccattttcttcccaaataaaaccagatctgtagggacaagataagtctgtgtcctggtggtatcgtgtcattttatcagagtccattgggaactgcgtgctgcatttattgctacaaagcttagagtctgtgcatggatgtctaatacagagagttaaatgtttattgtaaaaatacttgatatttttgggcaggggttaacctatcctttcagccattactagtcttttctaggatggagtcataaacaatgtataaaagaatatacaacttgagaaaatgaatttgcttctttacaacttctgttttgtgatgagagacaatatttttactattttaaaacattttgttaaattcatgtagtaggtttaaatttatatttatattacttatagataacagaaaactctattttgtacaaaaagagtactgttattggttgacagtgtgtgtgtgtatttgtaactaaaacctattgtcacatattaatatgctttaggtattaatcactaaataatcaaattttatatatatatatgtatatgtatatgtatatgtatatgtatatgtatatatatacatatatatatacacacattatctcactgaaataagtgctacacatggtttataattatattgccaccattttaaaggcttgagcaactattttctttcagtccccacaaaataaagacagtatatcacatgcccacagaataagatacaagattttgaaatcttaactcattattattagtatttcattaagtatatttttttaatgaaatttgaatactgaacagacctgaggaagaattttgcccagttttctcatcatatgagctcaaaggattggagtcctgcaggaatattccacagggtgatgttgtatacttcattattcttgtattaggggtcagagccccatccttggcaggagtccatgtgcctttgtatttcaccatgtcccttatggcaatatgtactataattttagaactctcaagtgactattagaccttctgacattggggccatctttatctcctgattaacttgatatagagttgaacattctgtatgtcattggctgtgacttagttagtgaagctttggaacttcctctccagaaaggagcctgactgtcttcctgatgagtcagaatgatgagtctgctgtaatgggtaaaatggagcagtttcatgccaggtattactagtaaaacacagagtttcatgtacatggttagcatgtatattagcatgcctcagtgatctatggtgacaggaacatactaggcccatagtgtactaaattagagtgttcaaggtggttgtatatcagcaatgtgaggctgtgtttatttttattgtctttggggcttaaaacaaaaaccaaaacctttcttttttttcttgataacctaaactgacacagaaaaatatattcgtttccatcaagccaaaacatttcagcccatctctctacacattaaatacattgacatgtctctgttaacttataggagggtacttttgaacgacctgtttagacagattaaagatatttttatgactctttatgtggcaatcattggaacaaactgacatttttatttctgtgggaataccagttgattgtttctgtaggccatctgcctgggggactgtggcattcttttacctttattcaggagaattgtaaataccaggaaatactttaaatggacaattttaaaatgctcacacaaatgttttccatctgagtatcatgagtcacggcattaattatgccaggaggacctcaaggaaactgtctgcgctgcctagaaggctctatggaagcctgggttaaataccatgatcatgacacttaataaagcaacacaaaaagcaagcacacagtgtgtttcatattgagttttctaaataatcttttatttttagacccagagtaaatttagtaaaactctagataatgggtttcatttttttggcatttttgaaattgaaaatatattaatgagatggaaactagaaatgtagcttatcaaggacaacctttcaacagatgacatcaagccttctgtggtgtcagaatgcgattcccctaaaaactaataatagaagcaaaatagttcttttgtgttgtaatttgtaagaatcatgtttatatggggggaagggagcatcaaaatttcaacttgctataccagcagccagttttgtaagtgtaaaatttgtataatctaaccttagtctctggatgttgttaatctattatttctgcaattttccctcatactcttaccaatttccaccgaatatattttatctgagtagtgacataaaagtaacatgctgctacttttgaatcaagactagtgttccccccctgtccccgaacatctgagaaggctgtgtgtgtacttaaaggagacagtgctggacatcccccatctaaaataggactgttagctatggcacttagacaacatgcatttttgtaagattcagttgtcaagtggctgcagggaacggtctataccattagtttgaaagggtttttaacagctgaggttcatcatttggggtatgtgtatcactaggtttctttctttcttttttttttcttaaagatttatttacttattatatgtgtgtacactatagctgtattcagacactccagaagagggcatcagatttttgttacagaaggttgtgagccaccatgtggttgctgggatttgaactcaggacctttggaagagtagtcagtgctcttaaccgctgagccatctcaccagcacggatcactaggtttctgtgcttcaaaggcttgcaaactcaattttacacactcatttaagatggaagaaatttgttttttgtagaatgagttctgagacttctcaaagattaagtactactgctgtccaaagagttgaaactttcttgtattctatgtagaaaaggaatccattgtctgtggctttaatttatgttttaatgattagttcatatatgaccaaatacactacaataaaagtttaaaacttcgttgcctttgatatatttatgttgttttaagaaagaaaattattgctgtatttaactttactgttaatatagcatctttattttgttggtaaactccatacactttctgttttctattgtatgtgcgtttacatgcacatatttctctgcataagcacatgtgtacaagtgcccaaggagaccaggagatagtattggatctgtagagttgcaattgtgagctgtctgatgtgtgtgaaccaagctaaggtcctctggaagagcatcatgtgataagtaggctccttaaactgtctgtgcagttcaaggacctttggttttaatattcattttaggcatattcgatccaacttttcccagataatggaaataaatcagtaaaatatgctacaactacaaagtttcagccagtggaatttcatctgtagtcttagaactgacaaagatccacaatcacagtagaggttgagccacgagtctttcaaagttgagaccatatcttgccagcacttcctgaattgctgtaaactttgatggaggaagggctactgagtttagtctagtattgcccacagggatttgtacccgattagacctttctctttttgagtagttaataactgcttctgccagaaaaccagatcaaagcttagcgggggagatcagtacattggttttatcagccattttccagccacggctcttctaacactgataacagggtggtggtgagggaaatcaaatgcttgcaaccttcctgtggtgccgtcctcttgatttgtttaagaacctgggaggaacatgttcacagcagggacacctggacagtcctcgctccatcctgtcagagtgtaaagctctttctgtgaatccctgctctgactctggcaactgggtgccatgttttctttgctctgtacttggcaagtcaccatggctccttcaggacctggtcatctgccagccatctccctggccttggattgactgcggaagagttttgtgaggcttgtgtttcttcccctattatcaaggcaaagctctgctgcttctgttccctccctccatagactccaggactcctgaagccttttgtctctcctttttactcattcaaggctgctgttaacagggagaaaaagtttgtgacaattgaagtcacaattatagcacttgcctataacaagaccttggcatcttagtgctgtctctccttttatccatcacattagcagctttaaaacaaaaactaaaacaacaacaacaacaacaacaacaaaacagagcagaagtcacaatcttagtctcttgatgcttgacacatgtgaagatttccttatgacaagaatctattctggctaaatttctacagaaagacccaaaagatcatatgtttcagagccttttgggagtagggaatgtataaaaatctttgagcagcattctgaagaaatgtgttttatgtaaagtatcaccagaaatatattcttagggccaccgattctgcatctgcaatctcactagaagtccttgtctaaatggtgttcctatatgttgtacatgaggttaggaatacatggataatgccaggaatggatataggagaactgaacctttagcaagcatttgtttaccttgtagtaatggacaatgtgaattaacaattgctatatgtgggctgacgaaggacaaactataatcacatgtgaaactgcttggcctttataccgcttgatccaagtccatttctgttgtaaacagaagtgtggatgcttttgaggtcggatcaagctagaaacctcacgttttaatttgaaaaaaaaaaatcgtgacctttcatttagagattttataagattttcatagtataaaaatcctaggtgatatgtgacatatttgtatggcttaaaatgttaaatgtgtacatgattatatattgacattttgtcttgtattaataatcccttgttaacgttgctgtcacatattgatacctgagtcttttatctgaattctagcatcagtccagtgggaagacctaattccttttatagctatttgtttcataatgtggttccaagaaactatcatgggccccaagcaaggaccagctgtttaggggctcaggataatcgactagacgatataatcatcagaaggaaaagttaatttaatttgtttgaagactttcttgcagccacagagaatgccggattgatttttgttttactacatggaaaatgtgcaacatgttataggagaagaggcacatttgtagaataaattatcttctgtgtattacatcactaaattcaggagacttaaaaaatacctaagaaatttaagaggcattcgttgcatgtcaggtttacactgtggcttgcacggtcagcacaagaaaggcacataaacagattttatgtagttgtgctgggctattttatttataaactgtccccttgcctgtgatacaattttatctggtcctttctgactagaaactttgtagcgaggtgactcagctgtaaccctgtgcagcctcccctcattcacaaagaaaatcaattaatgaagggtggtgtctttgtaacttatgccatgtctctccattccactgtcacatagattcctccatagattttttaggcaacaggactccctagctctaatcctaattagagcaaattataaactttttctttttaactccaactttggcattaatcaagtccatttgcagatatttagccctgtgagatcatggctcccttttccttcatgtgagttagagttagctctgaggccatgcacattactcttatgctctgtcctctgtggtcttgcacgtttatatagatgtctctatggaagatcctcctacagatcctcctggaaccaactttctgtttcttagtttctagcttcttgcctcaattatctctattttagccttatattacactgccccatagaaatgcctggcacattatagatgtatgtatttggtgagtttttttcttcagtgaagacaggacccatatggtttataatttaatcctccttttcatgccgacttctacagtaccagtcacaaaatttggttctccagttaagagtgactcctcagctccttcttgctattccttacctattcttgatttatgcttggtattgttttttgtttcacagatatttatctgtacaaaacattctttgttttattacttaaatgttacagacttttttaaaaaaaagtatgtgcagttgtgagtgtttattactggttatcctgaagtacttgctaatgataattggtacaaagtttaggtttgcttagctcttaccctgccaatgagattaatgagcttaatgggtaaagcatctatactcttcaggacacttaggaaccaattctccctcctttcttataaggttagtaaactttggaatttcagaacaacgttttaagaggacatttttctgaatctcttttattttactgaaggcaataaaattcctgttctgtgggtctttgctaatagtaattagatttcaccaagtgagataggagattcttgtaaagttgtgtactcgtcccatttgattttatttgataagggcattactgattgtgtacttgacatcacagtgataggttattatgtgttttttcacccagtttgttcctttcaatcagagtgatgctacaggaaatgatgggagaaaatcatatactgggtgaatggccaaatgtcattctcattaagagttcttattcacattgtattcatgaagccaatgataaaactaataaatgttccctcagaagaattaatcctacagtttccagttcctacaaaagtaggagcataaacttagacagaatttctccaagggatatgggaagtgttacttggcagacctgttgattcagactttatctcatgaaaactagtaaagaataatatggtgagtgtgagtactaaaactgttttagttttgataactgtatttaaggagcactaggtggttcggatacgggactgaatcagactttagaaatgggatattgtgcagcagtttaacgggaagccattatgttatagagattgtgaaataaatgaattgttaaaaataattttactgttcaatggggcatagtgattattgcaggataatgactttctattggcaatgtaagcagttaatgtaattgtgatggtctctgttgcctcctgcctatagaccctgtcctcaaagaggttgccatcataagcatttgttaaagttttaacttcttttacataaacctcacttaatggccccttcactttcttttcatttatatatttcttctcatgtagaaaagatgctttttcctgctcaataatgtatggcccttggaatttagtggcaaatgtgctttaatttaaatcatcatcatcatcaatttaacaggcacctctggtaatatgtttttcacttttaaaaagtgtgtcatgaagcaaaatgtgtttctgtggggaacaggaatgattataagataatcacggacccggagggtatagagatgggaaaggtgcaagccaatgtatctcttcctttgacataatgattatttcataataactgagtgcctcattccagtcttctctgccagcaccatccaatttctccattccattctaccagactgagacaggaataatagaatttttgtgctaaaatataatgcaggtgattctatgatggttcagtatatattttagctgaaccgtgcatttccttataagaagtaagaatggcccattaacagatggagttgaaataatagagaaaataagttcttccaccctttgctgggctatccctgagttgatttgccaggattcttgtttaagagaactgcagtttgtgacatgacagtggtgtgtgtgtgtgtgtgtgtgtgtgtgtgtgtgagagagagagagagagagagagagagagtcttggggacaatttctccctatgagatcctggcttgtgttgaactcatgatcttatcgccttggactcctgagtgctcaatgcccaacttttcaagagtagttttcactgttccttttagaaggtgtagtttactttattaacctttccaagcaagatgctttctacattattaatacaaagaaaagcaactgttaggtacagagttatgtggttttcaaagagcgtaagtttgaggaccaagtctagatataatgaaatctcagctgcgtcttgctctgtgtatacttacttatttcgtccagtctcacatttgtttagaaatgctagaggctccgtcttgcagatacatgcatactgaactttcatgaatctttcttcccttggacgtcctattctgactttggttggagtatttggggtgggtaaaggaggggtagattaaggtagctgctaatggctttatggaagagacccaggccttgctgttctgttctgggataatgtgattgactccagctttctgacctatgtcagggaggactgtttcttgtcagccagctggaggcctctggtgagtgcagtgcatatgagcccctcactgaagccatgaccctgtcagtaggaaattacagatttattgagtctcttcaaacagatcgcatgattgcatgtccttctctaaggaacacagtttagggttcaaaaggcttgtgaggtaaagtcactagagtcacacaaggggccagcctttgtgtgtggaggttgaagtgtcacagctggaaatccagtttacactaacagtcaaccttaaaggtgcctcttttagctaggtatgtaaaatggtttcaggttatcatgtttattaattgtatacccagctgattttgaatctcacactttccgtatccagctgcctcccttagcttctcttttcaccttgctgatgggcatgcaaaactaaaagaatgaaggttttcttctcaccctgtacacacccagaaacacattgattttaaattatacaccaccaaaacctagtttgggtgaagtaataaataaattaggaacagtggaaggaacataaagcaatccatattttattgatactcctggtgatttcccttcttggcctatgggttgaaaagtgaattccagtttttgactgatgaaaaagtagtagtgtgtgcttttccagcagatacccagcaggttttgtggcccttctagtagtccaccgttgatgctgacttcctactctccagctgtatattattgtgtatacattttgtttctgcttatttgtggaatttaaatatgaaagttcacatgtagttgactatgatgttatacatcgagaacataatattaaatataaaatgtttcattatgctgttttgcatatcatgtttttattaattctttgagaatttcatatatatatatatatatattcatattcactttttatttcctccctagcttctcccagattcatctctacacctctcaaccttgttccttattttctttttagaaataagctactgagtccaatatctgctctctgtttagttttggtacaggacttccactgggatgtgttcggtctagcaagaaccatattgagaaagttgtctgactatctttcaaaccatcaactgtcaacagctacagccaggggtagaggcatatgaccctcttgctcttctatgctggaagactgtctgacttgatcttgcctaggtagccatagctgctctgattttactcaggaacacagtgatcctgtcatattacaagacacgatatcccttctatcctcctcatgctctggctgttaaactccttccacttccttttctgaaacagacccgagccttgcagggtgggatacagacatcccatttgctgagccctccagagatacttactctcatcaagaaaaagttcttggataagccctgagaggtgttctcatctataagtatagagatacagatttagtttgtagtttgaattatgttcaattagcaaaataatagtagtaactttacccatcaggtccttcgaattctctaatgatgaagtagattaaccataccaggtgtacattttctcctctgaaataaaccttaattgtaagcagaaagtgtttggttgcccgtataacattgctgctactattgcattcatgggtatgccttaccacacaggtcattgttttagctcacaggtttcatagttggtcaacattattgatttctgttttcccctaagcagtcaacatagcaccttttgttaccatgaaaattagccagcagcgatatgcaactattactttttaaaaagtgagatgtaattttcacttgtatttttcagaaaattttcctcaaattttttctcctgtgttttcttttgcattttatggcttacttgctcccctatggaagctctatcagttggacttgcttagaaatgttttgaggagatacataaaactttctgagttgatagtcaagctagcacttacttgtttctgatagtataagcctattgtgaatttttcccattccctcttttgtgtcgactcccttgtactaatagatgtgttgctttctgtgtggaagatgcaggattataattttagaagaccttttagctattatggacagcatttgagtttatgagaggagcaccgcatagattgagaccctttgttcagcagatgcacaggtgtcagcagcacaactaagatacaacatctgtgcctgcataggtagcttatctgagagtatgcagtcttaaccctgaatgatgggtggcaatgggatgcttggttaatgccttctgtgtaatgagctgtgtacactcattacctataatagtctctacagtttggataatgatgtattattatttctcagtttcaagactttgtcttctgcaccttcagccatatttgatatttgatttgtttctacaattttgccatcctttgtgctaagaaaaggcgtctgccctattagtgcctcaggctactatggcaaaataccatgagtagggtaactgataaacaacagcgatttgtttctcacagttctgggaggtgaaaagtgccagaccagtgtccacaagccagtgccttctagatctgttttctgactcatgggagaactgcctccccatgtcttcatataggcaggcgtgaggcgtatctggagcctcatctgcaaaggcaggaatcttagtcctgcctcctaactacctccccaaatcccaaagacctcaccttctgacacatcacttcaacttttaaattctgaacagacaaatactcagcccacagcccatatggccccttttacatgattttatggctttcagatgccctctgaaggatccagtgagtattggattacttccgagattatcaggtccctttttgtttgcctttgagctcaagggagcagaactgaagagtgctaccaaggatgaatctgtgtgtagctgatgctgttcaatcagtatggtatcaagctattaatgtgtttaaatcctagaactacctcttttttgccgtgtttccttggaaatctaagcatctatatcttcagtgcttctctacactgagtgacaccgatgtccatctgaattaatgttttaaagcagttatgatgagttgtgtgtgtatatgtgtgtgtgtgtgtgagagagagagagagaaagagagagagagagagagagaaagagagagagagtaacaattattaatgtgttagtaaatgagtgacaataatgtatgatgcttactttaatagttaactttcctggacactgaaagttgagtctgtgttagcagagtttgctgctctgctcaacaggtatatgcatattagccacagctttaatagtagtcaaattgttcctaactatggaggttgtcctaatacgtttgatgctgaccacttggctgcaagagactttcagcatgctcacgtgttggcttttaggtgaacgtgtcaatttttctcagcattggttgttcatttttagcatctgtaaggtgttagtattagtgagtgttttacctaccccggtgtctttccttgagaatcaaatgaactaatgtacattaaagtactttgtaaactctcaatgcttctctaaagtggctgcagtgtcactgttaatgacagagacatgttcatttaagcacattattatggtactttgcattgcatttggtttaaatctatgctggaataatgcccacatgaaaataataggaatacacatgctcacacatgcgcgagcacacacacacacacacacacacacacacacacacacacacacacacacacactttgttagcactggcatctcttctaagtcatatatcctttgtgcatatttgggtgtcttctggaggtagcaggctgtagccaggactggcctgccatgaaatggcccatttgttgtctaaaattgctttagaatataaaatactaacactttcctccttttggatttatgaccccagtttcaaaatcatgaaaagatgcaagagctcacctttgattttaaaatggaagagtatttcatgctgtaagattcatttcctaaagtagatacttcattcaaatgttgaaatgtattcaaatattcaatattcaatattcaaatattgaaatgtaagtcacaaaggagaagggagacattaccatagcttctatgcttacactgattttccaaaatattggagagcttgtctgctgctggggaagggttggttttttgttttgttttgttttttccttctatttctccagtaagtacctccatagcctgttagtggctctaattttttcaagttacagaacttaattctttcctcatgattgttattctgttatttggatcatcaaatatatttcaaaagagctcacagaaggtgaaaaatgtaggattacaaaatgcaaatattgattattatttcctattttaaattaggaatcttaaacatattttccaaagagagagatgctctgttttgaagcatcatggtttttattttcacatgaaaagtgtggttgtattctgtaatttaatcgagtttcgcacactgaatctagggagaaaacatgttggaactggatataacattggggtatcaacaattctgggttggagtataactttggtgctgtgtaatttgtcatccataaaaattgtgatggcatccaaacctggaaagtaatatttgacagttatagcaagccatatagccttatccacacaaagcatgcttggtcgcttctgtcatttgcacatgtggacaagcttgtttcgggctgagtaactcttcgtattgtatcctggacttagtcaagtgactcttgctgttaatgccatgaagtaattagtccatgaaagggtctagcttgaaactgtccttaaaattagacttgactcttctggaacttgtgttatgtgaaaaaatttcaataacaaaccagttgctccttttccctgttgattgcactatctttgatgcacttacaaatgctattccatgagcctgcggacatttgtatttcagaggttcttgtgcttcgggatagccaattactatagttatttatttgttgattcaagctaaattaaattttagaagctagacatagtgctgggtcaagagggagaaaacaagagaccgttgctagccatgatcaggataaaataccacgtagtgatgccagcttgtaactagagagaaagatggagaagctagcagaaagtaaatcagcttggtcattttggtcaaaataaaattttcagatttttagatgattttgtaattaaataaacacttttgcaagtggctttaatgatacccagtccccccaccaatgtctctcagtgtttcagatacatgccttggtatcagttgtctttcagctttataaacattgtcatgcaacctacctttnnnnnnnnnnnnnnnnnnnnnnnnnnnnnnnnnnnnnnnnnnnnnnnnnnnnnnnnnnnnnnnnnnnnnnnnnnnnnnnnnnnnnnnnnnnnnnnnnnnnnnnnnnnnnnnnnnnnnnnnnnnnnnnnnnnnnnnnnnnnnnnnnnnnnnnnnnnnnnnnnnnnnnnnnnnnnnnnnnnnnnnnnnnnnnnnnnnnnnnnnnnnnnnnnnnnnnnnnnnnnnnnnnnnnnnnnnnnnnnnnnnnnnnttgcctattcctcggaataagcttctttaactcataattcaaattatatccctcttctgacatatacctgtactgcaacattggcaacattatctaagctattaaaaaaaaaaaaacttaactctgtgtgtgtgtgtgtcctgtataagtgcagttgtgagtgtggagagcaaacctggtcatcctccctttccacctcatttaaacaaggttccttgtggtttacctctttgtatgccaggctaactagcctggttgttttcagggattctactgtttacccttccatctcaccataggggcatgacaattacagatatatgttattctgtcagctgtatatgggttctgggactgtctctgtacgtccttatgctgtatcagtacctttcacattgacttaccaccaccaatctgcaaagaaactttggaggaagccatgtcatcaaatgtaatatgcagaggatatgcatatactctgtaggccaagaaagattttctaaactatatcaatgatatattgattcatggttataaacatttaaatacagtaacctataaaatttttctgtctaggtgactattgtaaggttctgtgaccttaagaccttcttcaatgaaataaaagccatcttattcattgctttttcctacatgcagcatggagaatgaaaggcattgtatgaatgagtctctttcctttttaacttcataagctataacttctagtgctaaaaagtaatgtcactaggaagtttataatcttttcctgaggattatgactttcacataaatgaatgaaaattgaaaatgcactgaatcattcttggaaaatatatttccaacttctctctctctttctctttttttcttctattctcaaggatttatttgaaagggtctattttatttttatggaaagaaagagaattcaaacttttaggaacacagcccatgaccttctttattcaactactgcaagtttgtttcacataatgaaaccattgcagaaatacagccaacctgatagtaaactacagatttgcccgcctttctccctagggatgggcttggtcaggtgtgtccctctggcctatatctatgtgaactcagtagtatgtgaacagtaacacgtaatgtttcagtttctccaatgacttttcagagagctttcctctccatacaggttgtccacaagctgtccagatctaccagactcttacaccttagcgcttccactgtggtgtgtgtttccatggtggtcagtattcttggcagtgtcattgcaattgtaaaagaagtctcatgctgggaactcagcctattaattggagcctagaactctgagctgccatgtctatttctcaatctgccatacagcagttatctttttacttgctccatcatgtgagttacctgttagaatccatatgtccgtctctgagttcctgtgttgcctttttagagatctgtaccattactctgtttcctcatagcttctacggctccttctccatgcagggcattttctgtgatacattctctgtagttggatgtttttcataagcctcttattttcccctcatgttgttagcctcttatacactattagatactgggtatgaatagttgtcttctatgcaggtataaatgctatgccaaaatgacaggagataaactcagattttaattccatgtttatcctttttaccttttacaggtgccttggatttttgttatcagttatatctgctataagcatgggcattgttaaaagaagcaaagtacagctattagctaattagactgcatgattaaccttgagatttcattgagatattttgaccttttcagtgtagtcaaatggagggtgtaattattaccgtgtttccacttagtcctgtttatcaatctttattaaaatatttcaaacactttcatgaagctaatttccatctttcagaataaaataaaaagtatggtgctttaaatatgctactaaaaaataaaactggacactttagtattaaggaggggatttttattttttcactactcctggctccatgtgagtcctcagattatattgtttaaatcattcttaatcctaattgatttctagggaaaacatattctactcattatccgttgccacaaggtcattgatgagctcctaagcagctaagtgtaaatctgcttccaggtcagtctcgcagttctgagagctgagactctgaacgaggctagtccagtcagctgggttgtttttgatgatctgcactatggtgactattaaagatgaacttaactgccctatcggtaaaaactaaattaagctttttaagtgaagggcacagaaagctgtcatttgattccccagactttaccctctttctcttacagggaaagtttatatttaaaccacaaattaaatctaaataaattctctgtagaatatttaggtattcatcttaagaatttaccttattttccaatttgggatttgaaaggcatttaaaactgctggacttagtggagcacacctttaatcccagcactctagagatacaggcaggtggagttctctgggtctgtggccagcttgctctctgtagagagttactagacagcccgagctatatagagagactccacttcactcaagaaaaaaaaaaaaatcaaataacaggtaggtcaactgagaaacctagtctggtagatagaaatatctgtatggtccacagtaaataaataaagtaaagcagccatataatctagaactcctttgcttgtggtccacaatggaagggcagtatttgtttccttgcaggctgcctgaagcctgtgcatgagtaagtatgcttgttgttaatgcacttttgattttgccaataagctttcaatcctgcaatcttcctgttgctactacactgactgtttttggttgcagatcaatcacatcctctcttttgtaaacctatcaaaggcattgctgttctgtaaggagaaagggcagacccaccagtgtcgctgcaagacaaggcccatcttctgaccactgttctctgtttagtttatcgtttgcactaactgttaggacatcctgttgtcagtctttcagaaatgggcctgatttggtagatgatgcccctcacgccctttctttgcttcaagttttaacattctgacctggaatcatttgcaatcagtgctttccaagtagaaaatcattagtgactccctcccaggtcccatgccattgctcacatgttcatagatgggtgccttctggtgattgttctctatgtgcctcctgcctgaaatatgtaccttctggtcactgtgacttactgtacttagaaatatttttcagaaaggactgctgcaaaggactgtcacttcctcagaagctttttgtttctcactaggtggacacattttctgactcctttgaactctgttatcctctgaccttgtttaacaccaacctctatgtgtaagattgctgaatatgtttttgtcttctgccacactgtgactctcttggggacaggaatcaaatggtagttattaaaattttagaattcataaatgttcaggtaaattaatatataggccatccatgcctgtatttttgttgtagctgggtatctaatgaagagactgcaacttctcattcggcttctcctctgctgattggagcacagtctagatgggtggtgcatcatcgcctatgtgggcatcacagcatttccgaaccattcccagtgtcctattgcctgtaggtcagaggactacatcttgagagaatttgctctgctttctcgcatgattctccaccttcagcatctatactatgtattgttacttgcccatgtacagtatcaatgcaaaggtgcagtaggttaaatatttcctgaagacactgggaattgcctctgatctccacaagtagtctatttctttgaggtaccagaaaggaagtaggtatgtttctgctctttgtatatgtcattaaactatgcaggtagtcaatgtggtatttctcactttcccttacttccgtttaaatcctaccagtaaaattaaggatttctatcctttggtctttcacccaccagatttaatctacaacctttgtttcatgtagctttcacaactaatctatgaaccagtctcagtctcatatttttggtagattcttttaagtctttgtagttgtatgagcagaggcaaggcatgttttaccttcactattataatttcttaaaccttctgccactcatatgtctactttattcgttgccataggctagttgtatttatcacaaaggatgctggctttgtgggccattctgttcttgtttggattgatcccttcatgaatctaaatattataaatagcaacatttcctttgattttaaaacatttatttctaagattaaaagtcaggatttgttccacacaaaaactatcagcatacctctaagaaattaatttaatcataatcataactgttgtaccttcatggtttttccaagattctaattgttttttgagagagaatcttgctatatagtcctggctgtcttggaacttgcaatgtagaccaggttgacctcaaactgaatgaaacctgcctgcttttgcctactagtgcttagattaagggcatgtatgagcaagctaggcttccaaattcttaaattcttaattctgtatgttgctgatttatgagatatgagcctatcagatatttatttcaatattttgcaaagaaggaaacgagccatgcatttttagtttattcatcttaaaaggcttccttaattaaaagtcaatacaaagtccacaagtgtgcttttgggtttacccttcatgtttttaaacgctaaaatcctggaaagcttcccgttacatttcctttgtcaaaatggtgtagaatgaattgtttactgcttcttatggttttgaactttgaatagtcctttggatagctttaaactccaacatcattaattatataattgtgtttaaattatttaataattatagtcaagaatgctactttccttgatgattgtatactcagaataaagtagaaagataatttttctatccttaatttcaactaacaataggtactctagctattctgtgaagttttgtaaaaacctatccttaccaaaatcataatttaattctagtgaagtaaaactgacagtaccatggatattatttaattcttaaagccgtatctttttttttttttacactatcgtattctttacaggtgttccctctccccccacccccagacagagtttcagtatacagacctcagtcttgggtcattctcctgcttctttcttgcccagtgttagtgtgcaccaccacaacaaactcctcctaactggttgtgataaaacgattgactattggtatgcttgactctgctgtgatgggatgagtttagcttgtgtgttaccttcagttacagcccatcacctagtttacttaaagcttacctttcctccttgtgcatgtaattctatggattccacatgaaaataggtatttacctatgacagcacatgttgaacttctttttttttttttcttaactgaatcatatggttctacattgaggcccatgagacatgagaatcacttaaaattagcagacagcaggcttgctgtgtagcaaaataagctttttttttttcagatatagttgtgtgagaatagtgatatacttctgctatgtgtaagattggactgttggtgttaaaacttaaaaggttctacttgtagattgtaggaagacaaatggtgcatcttggcaagtgagggaaaatagtactgtaattcagtgttacggtgaaagaaatagaaaccttaaccagtcatcttttatttttagctcagacaagtacctataaaatatagcccagatggggaagctatgatagtaaagatacggaaatgacattttgctgatgaattttctcctgccctttacttcccatttttatttttatacaaaatcttttatgctgaaagttgcttgcttatgtgtccaaggacagatccacagaatgaacactgtctttttcctttttttcttttttcttttctttcttttttttttcctttttgtggtgtgttctgatcatgaattatttcagtatacatttatttatttatttatctatttatttattttggtagaaattcattccattctcctctgctaattgtcattctggttctttctgtattgcaaaactccaatctaaataaattaggatattctttgaatagtgtatcatatttcatgcttacttctgaatgtatcttgttttgtggttactagtttctttttgttgttgctgattgttttgatttagtgagacagccttaatatatcacctttggtggtcttaaactcactgtgtagacaagaatggtgtaggactcactatgtagacaaggattgcctggaactcactatatggaccagacaacactggactaaaatttactatgtagacaagggtggcctggaggttgctatgtaaacaatacttgcctatagctcactgtagacaatgatggcctgaaattcactatatagacaaggcaacacttactctatagacaaaactggcctgacgctcactatgcaaaaaaacattggcatatatttcattatgtagacaatactggcctgaaagtcacttggtagacagggatgacctgaaattcaatgtgtagacaatgtttgcctggaactcatatcctgcctgtgcgtcccaagtgatgaaattaagccctggctagctctttaggtttgttttctgagtgcatcttttgcaggctccacctgcccatttgcctactgaagctgtaactgcctctacatatatcaaaacgttgatacagtttgttcagtggtctctaatctcaggcagtgtcaccatgattatgccttgaattgaagtgagaaaggaacccaggaaggatacataatgattgagatgtgagaaatgcacagtgtggttgtgtgatctgtaatgcactgagaggtgcctctccagtcttagagcctcctgcactacctcttctgcttctcatcatccttgtattctggttcttcttatgatacatcagtctcctgaggaggtcatggaatggatccctgatgccttgtaaactgtatatgatttctttgacagcctaaaattcactatatagataatactatcctcccagtggccacatgaagtaggcactaggatttgaatggaagtcagttactcagcacggaggctctggcatttcaagctgctgcacatttgtcttgcatggatctttgtgtatgtatatgtgttgtgtttgtttgtgggtgtgtgtgtgtgtgcgtgcacacgcacatgcactcatatgtctgtgtgtgtttgcttataagcatgatagatatataaaataatctttgatatattcagggccccaatacaaaaacccttgacagaatgtagatgatactgtttcctcaaaggtatatttgtgataggaagaccgactgtgcagagaacccaaagacttgtatttatttcatgaatatcattaattttcaatggaagttttaagagctcttttcagaggtgaaaatcttgtacagaacactgtttatcacattgtgattaagaaatcatatctttgtgacctatattaactggtgatctatattaacttgagctgatacatactaaaatttaaaagtccgttggcatctttttttttaaagtgaaagatttggggaaggaacaattgacttaaataactaataagtatcatcatgaatgggaaacacttgagcataagctgtaaaagtgattattgctgaatcacttaggtttttctcaagcctttgttgacactgttagtgacagccaattctctggctcacccgaagcccagcaatgcactgagcttccatgtttattgcagtgtgcagtctttggagggactttccttcaggcctttcctttaaacagtctgacatatcagagataaattctacttggcctttccacccctcagtagtcattattgtttcctgcattctgcctatagctttgactttcattgttttaataagtgttgaattgtttattgaggtgaggtggttctgtgcatacagttttaagtcacacaataaattcaaatcactattatactagatagatggatcaaaagaccaacaggtgataggatgagaggatgtgcactcagtgctgtgtgtaaagacaaaaaaatatatgatagcacataccctggttattactgtttggcccatcctagatccacacaatagagtgtttagttgactgtctctgaagccctgattatccccttcagactgttgcggtaaatttttccaacccaaatatgccctggcaatgaaaacacaactcagttaacatgaatacacgctgtgagactagattgggcagatctaccattacattaccatcttccacatctatgagaccccttagaacttgcggttactaaaggccctgtgcttctgctctgcttttcttcttcttcctcctcttccgtatcatctccctcttacattttctccttctcttcccaccttcctctccaccttcccttttatctgcccaatcatcagctctcctttattttacaaattaaggtgggaagcaggtttacaggaaatcacctgagtgctgactcattcctcgttttcagccactcacaggagaacagaattatcaaatataattagccccagggctatccacaacatcagacaattaaatattgatgggaagtttgatagactagtctttctaaggaaaagtggatcgtaaatatatctaaaggaaaatcaccagttttgagtgttttatgcagagtcatgaaatgagaagggtgcccaacaatcaaaatgggaaaagctgagatgaagaaggaacaggatggctcaggggttaacagcacttactgcatttgctaagtagtttcagttcctcatgattatcatggctcacacctgcctggaaccccgattccagatctttctgctggcctctgaaaccacaggctcacctatgtagtccaaactcaatgcagtcaaacgcttatacatgtaggacaaaaggaaatcttaagaaaaataaatttggacttgattacctgccataaatgtttcctcgattcagttggcatttaatgagactacgttaattactctcccaagcagcttacacccaaggaatggcgctgtatttccatttccatgtacttaatatatgctattgtcaatccaggggcacatctcctttagatattaaacaaatggctaaaccaacagacaggaattgttaaaaattccttggtttcagagaacgtcaaggccttctcttgagttatttttacaagttggattcttagaagggagctattaccagagctagccagcaagctgaccacacatgccctgacaccttccactctactgttactttctgctaatctttagttgaaaagaagtgcaaactgatcctgggtctgtagttgctaccatggcagatgattggcatcaccttttcttctgtgtttgctcatctttacatgttcaggatgcatgctattcatagtagagggcagataagattgctcactgaggaaaggtctttgaaccaagcttgacaccacaagctccattctttttattttttctttttcttttatcgaaaatagttttcccctcatataatatagcctccttctctcagtttcttctcatctcccctcccatctggatccatcctttttctatctctcattagaaaagaaataggcttctaagaaataatgataaaataagatgaaacaaaagtaacactttagagtcagagaaaacagacaaaccaacagaaggaagagagctggagagaaggcacaagaaacagagacacagttttcaaaaatccaggaatcctatagacgctatactagaagccatattatatccacaaaagacctatcagataagacagaaaaaagacagaaggaaaaaaaagtataaataacataagattaaaaaaaaaagagagataaatttaaggggaaaacaaaagaaacagcctgactaggcagcatgagacaaagctaccacagacttcattttctattggctgtttactgctgggcatgccatggacctcattgtccattggctgtttactgctgggcgtgtttgtatacccactgtggctcgcttagagggaagtgatcttatgaatttcattctaaacaaaagggatggtctgcaaattttacacatatgcatatacacatgagcacatgacacccccccccccaaccacgcacatatacacacaaacacacatacacatatatacccgcgcacatgaacaaatgcataagctcagacacatacatacacaggtgcacacacatgtacacacacattcacacacactcacataaacaagtaaatgaaagtaatgattttttattttaaagaaaatatgcttaaaaagagactcaattcttgaatctttagtttccagttaagatactctacagaagatcctttggggcctatcagcagaaacggatgacttaccgtgttttaactattcaagggcaggaattatgttctcgtgattcctaaattagtgtggtaaaattatgtctaacggtctcaagggagcatcagtttattatgtcaacaaaattttatgctaggtaaaatgagctaaatacccaatcctgcctttccctaagctgcaaaagagttaactagaatccactgatattaggtcgtatctttctgctgcacactgatacatgttttcatctctgactaacaagaggattctaggggttctgccatgatgtacagagtatgaactgtcagtgccccaagtgaccttgtatttcactaaaggagctaaacaacaacaacaacaacaacaacaacaaatttagttttacagggactgaagaagtgagttggtagatatgggtaattgttgcacaagataggacctgagttttaatctttaccttctgtacagccacacacatggctatcgctcgagtggtatgtgtggtgagataggagatttgttaggcttttctgagaaacagctagctttggttaaatggatttttagaataattttacgttggacataactttctacctacaaatgctgcttcttctactatagtcatcccactcagatctcccagcatcctcttctactatagtcatcattcttagctatcccagcatcctcttctactgtagtcattacacttagctatcccagcattctctgagtaaacttcagtataccaagccatcattcttgtcaattcattatttcatattaaagtttgatcatattgtgattttcatatagttttaacattttaaataaattctttgtttatttttactgtagccattttgtgagggtgtttaatcaacagaaattatgctaacaagttataccacccggtacattttggcggatagttcttcatagctctcagcttcagtttgccctgtaatcacactagctacagtgttttcttccattttcttcttattccccttttctttctgacatttggtgaattctatactccaaatattgttccctttaaaaaaaagtgggaaaattaaggttctcctctaatcatacattctaaagtttctcgtcaattgaactgtacattcaatgttacatcattatccattctcactgtgatgtcctcaaatatttcctatcaagatgaatcatctccattaacatagaaccatgcttagggatttctcctcttaacaacacaaaacaaaacaaaacaaaacaaaacaaaacaaaacaaaacaaaactctcctttgatgtcatatgttcttagacccttcatttaattcctgtgtattcactcatgcttcttttagaaggtcaacaccttttctcctgtggtcaagtcccagaatggtttcagttctgctagctccatctcagccctctggcctccggggcacagaatgctttacagctcagtttgtccagtagttgaacagtattgattgtgatagcttccctgcttctttcaatccttgatctctctttttctccaaggtagagttgtccttttacatcttgtagttaatgctatctgtaaccttgtccttttccactcatctactttgttcccagaaattctgagacttaataattcataaataaatgtcgatccaaaaactttgtttgttccccagctagctcataacttaattatccatttattctattctaagtcctgccacatgactgataattttatcctcagtttgactttgtcctcagtttcatgtgaccatcttcttctgcgtctggagtgagtctccttcattcccggctctcttcccataaacccctctctctgctggatgccccaccttgtaatcccacattggccaataagcttttattgacaaatgaatgcttttgtacaatgtataagacatactctctacaacatccctacatatttatatctctttcaggttcttgaccttctcttcctctttaactcagtgccattgaggtagacagtacgggggaggtaggaagtcccagaagctcaggctttcaggggcaataatgctcaaattcatgtgaataattctagtattggggagctgaagcaggctgattttacatttgaggtgattctgtgatgtagagttgagtctagcctaccttgtaagacagtatctcaaaacaaaaatgaactactaatgtttatgtaatgaagcttacataaggaagagaagtcagcaatacaagagtgatttaaattgtttgtaagacggtagaatttgaagatcaacatccacacttaaatgattggactttgaaagtcttttgtgtgatgagagatatgagaaatattgactgttgaaaacttctgtggttaggagctttagtcacatttatatggatttcaaatgaccagtttgtcattatttcagtctgcccctttataaatgaaggcaatggctaattagtgcatttttcttttacactagcacagtttcctatttaaaagttcaaatcacaaaaccacagatttaagattgtgagagtaaagtgtcagattattttgtattctttggaaattgactgtgtgcttcatgttttgaagagagaagattaggaggaaatttgacatcgaagcatttgtctttaaaagatgccccccccccccatatcgctgcaatggcacttttcatatacgagtctctgtaggccaggatttgtgctgtttcatattcattatctcagttaatccttcacaaagctctgaggtagatattaatagttcctgctataggagaagaaactgaagtttaaattttatatgagctaaagctatataagttaatttatttaagttttttttatgattcgaagtgataattaaagaacgtgaattcaatatatatctgagttgggagcttgagcatttacggcaaggacatagtgaaggaaaattacgagtgaatgttattctcatttctctagtgctcgcagtatcttacatggcctttcatacattgtttcatcgttttccttataccattcagtcttcacagggatcttgctttttaagtggatcagaggtgtccaggtgaagaagctatacagcctcattttcagctagttgtttgaggtacacagaacaccaaaccgaccactagatgcaagcttgctaacaccaagtttggcaatcatgatgtgagatgtttcctcctctctattaattccatttgcaggaagataagattgtccttcttctgtagggaataccactttacactctcccactttaattcaattcatttatttagttaataatccaggaatgttgctggattagcagaaatgtgattagaatcatcaccttcagtatttcaggtaatggagtggaggagaaatagcacaaaaggcagaacccatgcaccccatttccagggtgcctccaaggacaggttcacactgacatctggcgtggcttctattgctctcctcttcctggaagccccagtcaaccacttgacacccagcattagctctgacccgaagatcagcctcagcaagctacataattaaactgttgggatttgtttcccctgactggacagaagagcctcccaaggtgaggactgtgaagtgataatgctgattctgactttaggagggaaggaacacgagcgcagaaatctcttgaagcttctgttaatgaggcacagacggtacttagtagagaaaatgaggttactagaaagaaaacttacccttttcccctctttgataaagagccaatcattgcgccttcttttgaatccaggcctaaatttattgtcctgaataaacctcattttaattaaacaaataagtttttctcaagggtgtagtaatcttgcttaaagtcacatttaaggggaacgaggaaagttagagtattaagaagtagcactaagctgtgtcttgagaagttgaaatccttgaattggttccgacaaccacaaactgaaatagctacaatgattagccgtttgggatcctgtgctttatttgttaaaatatgttttaagaagccagtattatgttttctttgaatacttactctccttgaaacattattcaagcaaatcaaacttattctcccaggatctaacttcactgccattgcatatagatactacaataatagtcatgatgaccatatactactatttaaatttgatcataaaagtgatattatacacctataatattcatgttgtgtgtgtggggggcttctgatctctgtgactttcggaagagttggggactaggacagcttaaggtcctagcatggccttccatgcttacaggccagccctgtgtctcggtgcctccatgaaacattatttaactgtttatattctgttttctatttcttaccaaactcacccctgttcatgtctcaaaccaatggagatgtgatgacattcatactaaatacatttgcttgaagaaagaatcatgtgcctgtgagggccccctctcaccttcactcccaattccgtgctcatgaattaactgtctttctctcctgaaaccttttttccctcatataagaccacattgtctttcagtttcgctccgttctagtgaattctatagtcacaaagaacacagtggaaacagagaagactgaccaggagaggttgtggctggagtggatgaaataaagaggaaccacatattcctgactattttttccccatttttattgacttttggcaggtgcagggatatggcaaatgaatggggtttcatgttaaaaactctgtcgttctgccccataatatctcatcagtgtactcattgaaatggcaaaaattttttaaacaatttaagtgtatttaaacgttagattttttttcaaagaaaactaaagcctaaactctatttcagtgaaatcccctggacctgttggcttcttcctgtcaggaagttatctgatgaacttaatggaaatccactccaggctgcagggcctggtgcagtatggctccctctgtctcttcctgttctgaactcattttaaaaatggagtagtggaaaagtatatagctatcttaatgtggctgtaggaagagtcactattccagttatgagggagaaacggtagctggaggccagtccatggtattgggaatcatctgggctctccagtttgtgtctattagatggacagatagctgctgtgttctgatcattgtaactcagctgatttaccaatcagtgttttgccagtgctgacatggccaagcctcctgggatctctttttccctagccaccaggcctgggtccagctctgttagaattcctgctggctcccttgtcagccttgacttccatggcagtgctttcttctctccccttctcttcccttcccttctcttctctgcccttttagtctgccatcttgccatcatgttagctcttagctcatttccttgcagttcagttcccttctcttctgacttacccattcttcctcagagctgtccagttatacatagctaagcactctccccctgtaggtgtcacagggaagtcagatttgaaatagtaaaatgtatttggtagtgaccttgaccttcaagtttgtgtacagtcctttattactgctctgacttggttcccatccgtcagccagtagcctacactaaaagccattgacttcatctgtgtttctccacacctcctgaatcagcatctctgtcctgcctgtttcaatataattattatcttttccctttggttatcatttaaattctatcatacctactagaaactgcctgtttgctccttttggatagtctcccacctaataaccatgtttttccattagcctcattttatattacattgttactttaaacataaactcccatagcatttcctaaagtggttttcagaataattcacaaataatctatttaattccatgaataaaggagtcaagtagaacattgaattgctgaatactaaatctgtttttttttcttggaaaattgttgtaccacacattattttaagagaaatgactgaatacaattttgttaaatataatgtgtgtgtgtgtgtgtgtgtgtttgtgtttgtgtgtgtgtgtgcagggtggggggattggtgtgggtgtgtgtgttgactagagcaacaaaactctacaacagagcctctataatttttttttcctgaaaactgataatttgggacttttgacaggttagtgtcctgagctaattggcaaattatcacaaagtatcacaaaatcttgcaatacttgctagtacgtgcttaagcatattggaactttgtgaacacagcagtttagttactatgcaaactctactatggttatatgcagatggcttaagaaatcaaagtctagataaggtatagctaaaagtttctaggagaaaaaaaatcggattttcttttagggcgttataactatcatctactgtggacattctttaaaagtgactgttgtaaatgttttctatttcttcctgacaggtaatatttgaagctgaagtctcaggagggagaagtggttatattgccattgatgacatccaagtcctgagttatccttgcggtaggttttgattaagagttgtatttttctgtgtccttttaacacatggccaggactggcagaggctgttgatcgtttattgcctggccattgttggccattttgttgttattcccagccttcctggaatagaacaccaaaatgcttagtagaattttcaaatcaaggatttttcagacttccaacgacatgcatgataggattctttcatttctttttgattagtgaaaacaaaaatgtaagtgcaaacttcattccagtcagatgttttaagctgttgaggtatcttataattctataggggaaaaaaataaacaaaaaacaaggaacaaatctgagttcaataacagagcaagcaaacgctgccttgtatttgatctgctaagtttatactggaagaaatgaagaaaatgaatttactcaactcattctgaatttaggtctgcatttttttattattattccaaatgtctgagttaatcagtattaaataaatgacctcaaattcagtctgggttaattgactccatcttgtgaggtccttgttcaagcactcattgtttctcagacttcatacttaaaattgtgcttaaccacatcccccaaaacgactatcgctatcattcagtagggtcaggcagaatttacagacagcagtttacacttccttcatgatatgatttcccagcagaaaaatgtgataagtcctgtgtaagaggacttcgtgttccatagtcctccatggtgagccatttctaatgcactgaaaaaaaaaggatttatgatgtcagcatgttgggagcaagctttgtaccgcaactgagtggttatatcatgataacagagaacacttaggctggctcctttctggataattgtgtctagactggggcctgtgtgtgatatgcgtggaacggtcacaacctgatcctgctccaagttcaagttagcttagtaagcttgtttattccacagtgcaactgaactttatatctctccgccttccatgtctacacctcatgtatcagatgacaaggaaaggcttttgtgaatcaagaaattgatggtcatgaattgggcagaacagtcgccgttccagggtgattggtctcttgaagatgtttctcattgttcatattcaccaaggcttaacttggcctgtgtgtatttttcttcaatggtaaacacttgacgggacttcagattcagaaggaaatttgtaccaagtactgattggacagtcaaatcacccatgcgaaactatgtgactacagacatctcctttgttgctctgatcattctttggataactttcccatggctataagcaaacaggaaggagatactccttttcttttaataaacaaaaatgtcttctctgatgtacagctgttaaggttttttaaaaaactgaaagaacggtcagcttgtgggtgtgtagttaaatgtccccatagctgtcagagtgtgagatgtctttatatgcaccaactctgtttcccattagactctgatcggaacttgtttcatcaagcctgcttactttgatataactgttattactatgcattaacctatgctatggcagctattagaatatgcgtactagctctgcagagtcactctgcatcgatccatctcgaaaaggatgagttactttgtatgagacctgttaagaaggaaaactgtgagtgtaaggtaggaagcagcgtggtctagaagaaaggaacgtcaagttctttctggatattaatcttaagggtaggcttattaagaatgatattcttttgtgacaattagcatggcatgtcttttcttgtgaacaaaacatgcatttcccacccacccccctttttttaaacagataaatctcctcattttctccgccttggtgatgtggaggtcaatgctgggcagaatgctacatttcagtgcattgctacagggagagatgctgtgcataacaagttatggctgcaggtaaggccctgtgagctgctgagctaaagggatcacttggtttaaaaaacactgcattgtttgtggttgtgacttttctctctcttctccccgtttctgtcccatgcacaagggcaggctatttgtatgcgtttgtttggatgactggagattttaaacacacccttcacttttaaataatccaactaaaaatgcatgtaactaattgatactggccttggggtctagtaacactcagtgattccctagtgtcaggctggaactctaaagaaaaattctctggatactttggaaaagcagtaaaaatgaaaatttccttccttccttccttcctttcttctttctcccccccccccctctctttcttttcttttcctttttttttttttttttgttgtttcttttttgttgttgttgttttttcgagacagggtttcccctgtgtagccctggctgtcctggaactcactttgtagaccaggctggcctcgaacacagaaatccgcctgcctctgcctccagagtgctgggattaaaggcgtgggccaccacgccccgcgcaaaagttttcttaataaatattttgaaaagtgaacttctaagaagataatatttatgtgggaactgccagacatttttaggataagaaactaccatggacacacacacacacagagggggagagagagagagagagagagagagagagagagagagagagagagagagaatgaatgaatggaagagaaacaatgtaaaggtttctttgtttttgtttcttttgttcttttctttttttctttctcttttttagaagtttgtgtataagagttgctagtagatctcacatttgagtatctcccttgtatatgttaagtccttaatacctccttatttaattgattataattgacatagacgttgttggagaaatgtatatgtcatgaagcttccagggcatcagagaaaaatctgtagaattgagaattgttttgccctcgtagaacgtgttaaaggtgttgctgtcactgttaggtgctggaaagagggtcacggtgcaaagtgtgtgccaagtgcattcctaaccccagaagactggagctaggaaagttgcctgtttagctgactgtttcaaggcaatttttttttaacaatgtctttagcatctagacttccatttttcttctctgtgtgtggagtttaaataggtcgtgtgtagatgtcatgagaggtgcacatcggggatcttctttcattgttgtctacattgttttgagaggagatttcccattgaccctgggaaagctttcacagtgcctctgagctggaggtttgcctgcctttccctcttcagcactaggcatgtgctgccatagtcccctgtctgttggtgatttttacccacccctgacctgttagtagcctgtttctttctgcatcacggtaaggaaaaggctttagtttctttagaattttaaatacctgagaatcccaggacatttctaaaagacaaacctttaaaggtcaagttagctttttgagcatggacatcatgatttacttttgctgcatccttcagaatagtgcagttagtgctaggggtccttattagcttccccgtatttagggatgatgcttctagtgcatcatcattaaaagcaaatttagtataatgtctccaatgatggttacagggattataagtgtcacctgattcctctttcagtccaatgagatatgaccagagatgtacctcacattacattagcccacaaatcactactttggtaatttatttgatttgtagttattataatactttctgtttggcccaaatttgaaaagaaaaaaaagtgttttttttttctcttgtcatgttaatttttcctacctatagtttttgggaattagaatatttgacccaagagcatattatataagctacagtctatttaatgctgaacccattttctcatactttcagtctgtgagtggtttaaattatttcaatcctatttcctcatttttttttatttattttttttttccaatgggaacgttggttgatatttggtcttagctctgagtctggtcagcccactcttcaggaagcagaaatggctcctcagccagccactggttttatgctccaggatttaatgtgacattgagataaaaagggtctgtatccgaagacaccagctggcttgtggcaacaaagcccttctggaccgtgctggtctgagtaggctgccgagaaaacactgctcattttttctcgtttcctttccctgtggattggctcatttttattatggtcttttgatattccttctgccattttctgagcagtgctgggagaaaatgctctcagagagttttactctgtttctctctcccctccttggagtctcggcattggctgcacaaggtgattttgtgtttgtttccaacgttgacatggttgtcacatggtccccagcctgcacattgcatggtctccagcactgcacaagtttaccttgctactttctcaataatgccacataaatttccttaatatttttttgtcaaaaattcttctttacactccaaaaagatattaaaatataccatttacttagtttagtcatgttttcataaaaacatttttaattaaaaaacttatatgtgtgttaacctttgtcattttttgagacaggtctcagtgtattgccctgcctttcctaaacctcactgtgtaaatcaggctggccttgagctcacagaaatttgccttcctgggcttcattagtgcagggattaaaggcctacacaggcttattttgcctttttgtatgctgtggatcacattcatacttggttctgcaagccaccagaagagggaatctctgggattggagttataagatagatcaatgtcagctgttatgtgtgtgctggacattgaacgcagtttctcaggaagagcgatagtgttcttaaccactgagccatctgttcagtccctgaaataaaacataaaacattttcgtagtggcgatagatagcaattaatcacattggactgactgttccttacatgtgtatgagacaaccaaaaactgattattacttcaaaaactattcatcctttgcccaaagtcgtaaaaccacaggtaaacaggaagaactgtggtcccaccatggatgcctctactcagtcgttgaaacaggtaccaaattatttttatttcctatagaggacaacatgcgaggggtcgggatcctcaactctgactgcatttctacccttttggaacctagttaatcgtgacaggcttagatttcattggcccatctgggcctgtatttccttatctagaaaagaagatgtttggtggaaactaaaatcccttccacctatcacatgttaaattagggctctatattatttgtgtggatctgaaacatgaccttaatgacctccttttatttgatgaaataatgtagaaattttaggctattagttttatatgaaaagaaaggagctcttaaattaactttcattgtaagaacaagtacggaaaatgtctgcccagagtccgaagaaggaatgtacttgaatccactcagttaaaggtttcccattctgtcagaggaagtggaagagtaatagggcaactaccatgtaatagtaatagtaatagtaatagtaatagtaatagtaatagtaatagcaatagcaatagcaatagcaataccaaaagcaatagtaatggtaatagtaatggtaattgtaacggtaatggtaatagtaataaatagtaatagtattagtaatagtgctctaccatgggacaggtgtaataataagtgatggacatcctcctaggtcctccacacgatcacttggtagtgcctcagttagcagaatggcttgatatgggctaaagtaacaaaagctacagtggcttccaatactcaaatggaaagaaaaactacttgccacacccctccctgaaaggtctttacctgattcctcatcatagttgtcctttcccgagttcccgtgttcaagtacacctgaagcacacgtttttcctctacgtgtagtttgcaggttgtgctgctcatttcatctcagtggggatgcctgttaggtggattgagaggtgatggagaacataggatgttcagagatattaaactaacccacaacacttcgcaacctcgctcatgagggatttagatagttaggtaattaaannnnnnnnnnnnnnnnnnnntaaccagaaccacagaatcttcacaatcaaaacagcaatggccctgaaaagagtctttaattttccctctgaaatttcacaagccaggcctccatcttctgcactgttttcaacattatcttacaagctcctacacaacatctgacagagctcttaacactgaatggatcttctggcccaaagttccaaagtccttccatagtcctccccaaaacatggcctggttgtcacaggaataccccacttctggtaccaatttgtcttagtcagggtttctattcctgcacaaacatcatgaccaagaagcaagttggggaggaaagggtttatttggcttgcacttccatgctgctgtttatcaccaaggaagtcaggactggaactcaagcaggtcaggaagcaggagctgatgcagaggccatggagggatgttctttactgacttgcttcccctggcttgctcagcctgctctcttatagaaccaagactaccagcccagagatggtcccacccacaaggggcctttcccccttgatcactaattgagaaaatgccttacagttggatctcatggaggcatttcctcaactgaagctcctttctctgtgataactccagctgtgtcaagttgacacaaaactagctagtacaccatctgcataggtttgaggctagcttagcatatgtgtcacttaactccaaaagggcagagagaatttaaaagccaccgaccaacatgctgcctctgcatctttttacatattgactcaagagatattaaggcacttcttaattaatatattaagaatgtctataacatatttattcataatatttaataacttaaaatttctaagtatccttaacaggagaatttatcaacaggttggtttgctttcaagcaataggatactgctctagtgtttaacagtaaaaacctgaactgctggtgtgtgtaacagtacacatgccatggattttacatgtatggaatgccaccaccatgtattttaaataggggacagaataaaattaattcagtacatatgatcacctttgcattaacttttgaacacagaaaatgaggagttaaaataatggcctttaggaaaacgaaaggctgaaggaaaggctatccagagactgccccacctggggatccatcccatatacagtcaccaaatgcagacactattgtggatgccataaagtgcctgctgacaggagcctgatataggctctgtcagagcctggcaaatacagatgtggatgctcgcagccaaacattagactgggcacagggttcccagtggaggagttagagaaaggactgaaggagctgaaggggtttgcaaccccatattaagaataacaatatcaaccaaacagacaccccagaggtcccaaggactaaaccactaaccaaggagtacatatggagggtcccatggctccagctgcatatgtagcagaggatggccttttggggtatcaatgggaagagaggccctttgtcctgtgaaggctagatgccccagggtaggggaatgccaggacaaggaaacaggagtgggtagatttgtggggggatagggggaggagaatgggataggggatttagggaggggaaaccaggaaagggggtaacatttgaaatgtaaataaagaaaatatccaataacaaaagtaaaacaaatattgaaaaataatggccttttcatgactttttaaacatttgtttattttatgtatatgactattttgcctgtatgtcgttatatgtataccatgtttatgcttggcatccatggaggtcagaagagagcattggatcccttggaactgtagtgacatacagttgtgagtcacattcttggtgctaggaagcaaattcaggtcccaattgcctttaagtgttgagccatttctccagccccaaatcctggtcatgtataggaaatgtgaactagactggcactgagcaactttctggggtgccatgatcatgaaagaacgtagatgaaactttgggtcagtgggtgtgctcctgtaatacaacagttaacacctgctcaatgctacagtatacattttaactaaagaaagaaaaatggggaatactgaacacaccacacttgcttttctagtgctccactcactgactgaactcatcatcatattgatggcaatgccccaatctttgtaaatcctgccacctaaaatggttccattatgctccaaggtaatttgtaaccattaatttcactaaaatataaaagaaggttgtccttggtattctgaggataccttataatttacgtatagaggagggttgaaacgggtcatcctgtcatgaataaatggcagttctttcatgaaggtccagtataagtggacagctacatggcaaatcaaatagagaccattgctggaacatctgtcagaccatatgctttggcttcaggttctgtgtaaaaccgaaacgctaatgacgccatccatcatcacagagcttggcaggcaggcatcgttgaactgggcatagaaattcatgagtggatttattgaatggagcgcaatacgtgcgttggtttggtggcaccatttgttttggtgagttcaaatgaggctgtgtaatatgttactggtaatcttatgcagactgtagtcagagccatggcaattgggccaatctgtcagtaatctctgcaggcactggcctggtgcctcttcagtggacctgccaaaactagagagtcagccaccgctttgcccttggtgagtgaggcacattgctgctaatgtcctgtgatacagtgagtttctcagccaaaggaaatgtcattccttatggagcaacagataatttaggcaatggcttgagagtagtaattggagagtgaaattagtaaaatgagatgcaaattgctttgcaaaacaactagagagaggctgacctcttcaagtcccagctgttgccagctgtgagtcaataaaagtggtggatttgaaacttctggtcatgtagtatttaaaatggtggctcagttgccacaaatgcctccctctactgcacatgaacatttacatgtaagtgaaaatatgagacctgagctttagaaaattgaggggtaaatatgaaaaatcttcacctgagcaactgcactcctgcccagtccaaatgcctatttgctttcagcggtttcccgaagcattgttgaaggctcctctccaccatcctaggaagtagttggaacttatagcataccccatttctagggattttactgttcatgatagatactatttcatttagagaaaatatcttgaattttagcattaattataatgagaaaagaaaagctttctgaagaaattgatcaacattaccatagcatagtttatattgcaaacttcatccagaaataacttgaagggtacttttcaaagctaacctgattgcatatgttaatacctggtcagttcactctataagacattggaaagggagaaatgcaatacattgaaaagagtctgggaggtcagaagtttcaaacttctgacatttatagataattgatttgtaaactctcgagatgtgcatctgaaacactagaatagcaaagatagcaatgtagttattaagacaggaagtaaatatgaaaaacggatgtcagaatgattacaaggatatctatgctgattctattacctagctatttccaataaagcatcagtgaagatgtatgtgcatgcatctctatagaaggatggagaatcctttgtgtatgtgtccaggagcagcatggctgtatcatatgnnnnnnnnnnnnnnnnnnnntaatggtaattgtaacggtaatggtaatagtaataaatagtaatagtattagtaatagtgctctaccatgggacaggtgtaataataagtgatggacatcctcctaggtcctccacacgatcacttggtagtgcctcagttagcagaatggcttgatatgggctaaagtaacaaaagctacagtggcttccaatactcaaatggaaagaaaaactacttgccacacccctccctgaaaggtctttacctgattcctcatcatagttgtcctttcccgagttcccgtgttcaagtacacctgaagcacacgtttttcctctacgtgtagtttgcaggttgtgctgctcatttcatctcagtggggatgcctgttaggtggattgagaggtgatggagaacataggatgttcagagatattaaactaacccacaacacttcgcaacctcgctcatgagggatttagatagttaggtaattaaagattttgaggttatttgatgtttgaagatagttctgcattctagatatatagaaaattataaaaaatatgcagctcagacttacgtccttgtccacagtgaataaacccactgtccataatgcagtgtgtaggaatacttttggaaatggctgacagtgaacagaatagaagcagagtcaaattatgagcctttctgggagaaagtttttaaaatacgtattttcatatctataaaatatactttaagatattgtaaaggagacataggataacgcctgtcatcctttgtaaagcactttcctctcctttcaggaagcccagtgaactcacatgtactcgaggcttaaatgctaaacagttttggcaaattatcgacattaattttttgtacatgttttttattcccagcactatttaagcttttagttgtatttctaagaaactctcaattttagaaaattagtagttcacaataaaaggcttatgatcaggttacaagaatttagaatgacagtagaattttacatatatactgaaatcatttttgaatatcagcccgaatttgggagacaatacagggaatgtttatgtaggaaactaatatgaggttacatcttttataaattgatgttgttcatgtttcttttttgtgcttttttttaccccaagaaatataaatatcagttaaagtgattgagaagaaagtagataggacttgggtttattcagctcagttgatagagtggttgcctaaagtgtatgaggctctgagtctcaatattcagtaagcaagacaatgattagcaaattcaagtcaatctaggttaccatctgtcttagtcagggtttctattcctgcacaaacatcatgaccaagaagcaagttggggaggaaagggtttatttggcttgcacttccatactgctgtttatcaccaaggaagtcaggactggaactcaagcaggtcaggaagcaggagctgatgcagaggccatggagggatgttccttactggcttgcttcccctggcttgctcagcctgctctcttatagaaccaagactaccagcccagagatggtcccacccacaaggggcctttcccccttgatcactaattgagaaaatgccttacagttggatctcatggaggccttacctcaactgaagctcctttctctgtgataactccagctgtgtcaagttgacacaaaactagctagcacaattgaccccttgtcaacttgacacacaaacacatcactagtaagcctcaacccttacattcttattcatccccaaggtctaaataactttaaatgccccacagtctttacatattctaaaaatttcgatctctttaaaatatccatcttttnnnnnnnnnnnnnnnnnnnnaagtagttggaacttatagcataccccatttctagggattttactgttccatgatagatactatttcatttagagaaaatatcttgaattttagcattaattataatgagaaaagaaaagctttctgaagaaattgatcaacattaccatagcatagtttatattgcaaacttcatccagaaataacttgaagggtacttttcaaagctaacctgattgcatatgttaatacctggtcagttcactctataagacattggaaagggagaaatgcaatacattgaaaagagtctggaggtcagaagtttcaaacttctgacatttatagataattgatttgtaaactctcgagatgtgcatctgaaacactagaatagcaaagatagcaatgtagttattaagacaggaagtaaatatgaaaaacggatgtcagaatgattacaaggatatctatgctgattctattacctagctatttccaataaagcatcagtgaagatgtatgtgcatgcatctctatagaaggatggagaatcctttgtgtatgtgtccaggagcagcatggctgtatcatatggtcacttttagtgcctacagtcgatatggtggctaactgttctctttcccaacattctcatcagtagttgttatcatttgttttcttggtgctacctgttttggaagtttatggaagatgaagtgagatacgtaaactctcagcttttaggggttaatacaagcaccatataatttactctttatataaccccaaaatgtagtaatctggtcttaagttttaaagctctgtgttcaatcatatgaactgatttgaattctgagccctgtaattgtgggctgctgagacctgaacaagctgatgtaaagccgtgtccagagcctagggatccaggcatgttccaggatgttcatgctggagaacagggacctcaatcatttcagagaggaaagtaagcaccaaagactggggcattgggtgagatcattagagaaaccttggctcaagagctggaattcagcaaacacaagatgcacagaaaggaagatctgtaggctgttgctatagggttagaagacacaacacatccgttcggttgagtgaagtggagcagccatataagaaggatctcattgagagatcacggtgagaaaaggtggtaaataagatggatgatcaggtaaggacatgaacggaattggaagtagcaacagctgctgttggcaggactgacatcaggcaataaacgacacagactgggcagtgcagtcaaattggaaagtctgcgggaggcacagattaaagaagatgaatggttttggatccagtgggtaacagttaacagattttggggaaatgtgaatgctgtatagtataatcctctaagcctcaaggttttacttttatacttagcctgtttctcattttctggcttgaactaactggtcattagaaccattgattattttcattccttttctaccttcataatggccttcatacaaatgatcttaaataagaataaaggatgagacattctaatggattttggcttttataccacagtaaggtttgctagtatagttacttaaagcctttgatggtcttcatgttgtctatgagaatgaactttttggaaaacgccagatgcctctcaccttctggatgcttcagaatcactgttctcagaacaggagtaagaatagttctttctttcatagtgtcctaacttcgtgttgcctactgttgacctaagctgatagacggagtctagcctgatatttaattctaattgtctctgtggactttctcattaaacaatagtgattcttctaggcatctctggctttacaccgaattctgttccacccaagaggctttgtgctactactagtagctgccacctaatatagccagttgtttccccttgggtcatttgatttttatagttcacacattgtagcctgccttcatgtctttgttataacgcaccttgtgtgtaacgtttgagataaattcactaaccatgcatcatggctcaagaagtctgtctttgatattttagcatctttagatgtgtgtatgtgctgtgagcattgggaagattcatggtatgtaaattttagggatattactctttttgcatttgataatttcattataaagtttagtaccatagaatttttaaaatagttatataacctaggtgaaatatccaaaattaaccaggtattataacagactaatgtgtgatatgtgttttactcccttatcttcttccaagatttcttctcatcaaagtctataaataattgttactctttgcatgatggtaaaggcagtacccacacaatgggtgtggaggggttccttcggagtgttttcctatcagccatttcacaaatttcccaataagccacagtgttatatatatgtatgtatgtatgtgtatacatatatcagattttgacaaaacgttttcttctttccattgggatattttgatattctcttatttcagttttggttccttgtttgttgttgttattgtttcatttttgttgttgggtctttttgtacttaaaaattgcttatttttaacattagcgttcaaagtaatatatttcattgtgctattttcaaacatctttgttgattctaccaatctgaaaggcagatcaatatgtagatctaatatttatgagatcactttatagtacaataaaacatacatagtgaaagccatcctaattaaatatgactctgattgggggggatagtgagatagatagatagatagatagatagatagatagatagatagatagagaatgcttgtatgtatacttgtgcaaaaatctagagcagacttctattactgagctacatctccagccatcactgtcatgacattgaaatatgtcactgctcactgtaatgtggtattagtgacttaaaacaaacaagccccttaatccttaggtctttcctccctttcttttcctcattgtttacctattaagtactccttagaccttttatagtataatttcttagtctttgttttgccaattacttgacttcaggtcaatatggttccattttctctgtattttccaggaatttgcaggtgggtctgaggtcaaatctgatcctttgatcatagtataagtggtgtctggtgtgatagcaaagtccaaatggtcccatctctccttctcttagcgctgttagtccttaaaatccttaataattcttgtcgaaaatcatggttttaccaaacccagacactgtggcagatgccaacaagagcttgctgacagaagcctgatatagctgtcttctgagaggctctgccagtgcctgggaaatacagaagtggatgctcacagtcatccattgggtggagcacctggtcctcaatgaaggaggtagagaaagtacccaaggagctgaagggatcttgtagccacataggaggaacatcaatatgaactaaccagtacccccagagctccttgggactaaaccaccaatcaaagaaaacacatggtggaatttgtggctctccttatatatgtaataaaggatggcctagtcagtcatcaatgggaggagaggccctaggtcctgtgaaggttctatgctccaatataggggaatgccaggaccaggaatggaagtgggtgggttggggagcagggggaagggagagggaatagaggatttttg

SEQ ID NO: 44 - DNA, 5896 bp, Mus musculus
actttaactattgctattgctattgcttctaagttgctaagttcttcttgcttaggtcttccgggctggcttccttcccttctgctatccctacccagagctctttaggctctcggcccacactgcaggtggggtcccaggaaacagaagacagaacgaaacacttctgtgtggttagagccccgttctctttgtgcctctgcccatttgtcaactgggacaccaacccagtctgacagactccaactgcaatcaagaacaagccaacgaaagccagcaacagatgttctaccctctgttttagaatcagtatttggacttctaacgttgtaactattatcaacaatacgattataagcagccaggtagaatagcatcagaaattaaaatgcatttacaacatagttcagttctgttgacaaaaccaaagtcaggagctagaggtaagatgaatgtgagttcaagaccagcttgggcttcctatcgaactctgtctccaaaatactagccctggggattgctactccgtcaaaaagcatttgcttggcatgcacgacagaaccttgggcctgtgactacagggaacagtactcaggtgtcttcttcacaactgcataaaatgtgagttgtaacatgaactcactttatgcgcatataggcactgaggtgcaaccttaattttttttttaaaccaaagccagaaatttctgagttccgattcttggcactgtgccaacgctcagatatgcttgtggcgcaagcaacgaaaacatggaagactagagcttaagatagggttccatggaagagtgtgtgtccagggaagagtgtgtgcttagcttgggttcaatctctagcaccattaagaaagagagagcaaactaactctggactaccctgagcagcctctgcctagcatggagagcggcggccgcggctggcggccgacgctggagaccgtttcgcccgcgaggtagttggccgacgttgcgcaaggacgaaagtgctggcgggtggccgcggcgtctccgcgagccccccgacgaggccgggcgggctgctggctggcggatttcaccgcgattcccccggaggctctttgcaaagctgcttgaaacttctcccaaactcgccatggatgtggcggccgctgcgttgcctgcttttgtagctctctggcttctgtacccgtggcctctcctggggtcggcccttggccagttctcagcaggtggctgtacttttgatgatgggccaggggcttgtgactaccaccaggatttatacgatgactttgagtgggtccatgtcagtgcgcaggaacctcattacctgccccccgaaatgcctcaaggttcctatatggttgtggactcctcaaatcatgatcctggagaaaaagccagacttcagctgcctaccatgaaggagaatgacacccactgcattgatttcagttacctgttatatagccagaaggggttgaaccctggcactttgaatatcctagttagggtgaataaaggacctcttgctaatccaatttggaatgtaactggattcactggtcgtgattggcttcgggctgaactagctgtgagcaccttttggcccaatgaataccaggtaatatttgaagctgaagtctcaggagggagaagtggttatattgccattgatgacatccaagtcctgagttatccttgcgataaatctcctcattttctccgccttggtgatgtggaggtcaatgctgggcagaatgctacatttcagtgcattgctacagggagagatgctgtgcataacaagttatggctgcagagacgcaatggagaagacatacccgtagcccagactaagaacataaatcacagaagatttgctgcctctttcagattgcaagaagtgacaaaaactgaccaggatttgtaccgctgcgtaactcagtcagaacgaggttctggggtttccaattttgctcaactcattgtgagagaaccacctagacccattgctcctccccagctgcttggtgttgggcctacttacttgctgatccaactaaatgccaactctattattggcgatggccccatcatcctgaaagaagtagagtatcgaatgacatcaggatcttggacagaaacccatgcagtcaacgcaccaacatataagttgtggcatttagacccagatacagaatacgagatccgcgtcctgcttaccagacctggcgaagggggaactgggctgccaggaccaccactgatcactagaacgaagtgtgcagaacctatgcggacaccaaagactttaaagattgctgaaatccaggcaaggcgcattgcagtggactgggagtccttgggctacaacatcactcgttgccacactttcaacgtcactatctgctaccattacttccgtggccacaatgagagcagggcagactgcttggacatggaccccaaagcccctcagcatgttgtgaaccatctgccaccttacacaaatgtcagcctcaagatgatcctaaccaacccagagggaaggaaggagagcgaagagacaatcatccaaactgatgaagatgtgcccgggcctgtgccagtcaaatccctccaaggaacatcctttgaaaacaagatcttcctgaactggaaagagccactggaaccgaatggaattatcactcagtatgaggtgagctatagcagcataagatcatttgaccctgctgttccagtggctgggcccccacagactgtatcaaatttatggaatagtacacaccatgtatttatgcatcttcaccctggaaccacctaccagttttttataagagccagcactgtcaaaggctttggaccagcaacagccatcaatgtgaccacaaatatctcagctccaagcttacctgactatgaaggagttgatgcctctctgaatgaaactgccaccaccatcacagtactattgaggcctgcacaagccaaaggtgctcctatcagtgcttatcaaattgttgtggagcagctacacccacatcgaacgaagcgtgaagcaggggccatggaatgctaccaggtaccggttacataccagaacgccctaagtgggggcgcgccctattactttgccgcagaacttccccctgggaatcttcccgagcctgctcccttcaccgtgggtgacaaccggacctataaaggcttttggaaccctcccctggccccccgcaaaggatacaacatctatttccaagcgatgagcagtgtggagaaggaaactaaaacccaatgtgtacgaattgctacaaaagcagcagcaacagaagaaccagaagtgatcccagacccggcaaagcagacagacagagtggtgaaaatcgcgggcatcagtgctggcatcctagtgttcatccttctcctgctggttgtcatagtaattgtgaaaaagagcaagcttgctaagaagcgcaaagatgcaatggggaacacacgtcaggagatgacccacatggtgaatgctatggaccgaagttatgctgaccagagcaccctgcatgcagaagaccccctttccctcaccttcatggaccaacataacttcagtccaagattgcccaatgatccacttgtgccgactgccgtgttagatgagaaccacagtgccacagcagagtctagtcgtctcctggatgttcctcgatacctctgcgaagggacagagtccccttatcagacaggacagctgcacccagccatcagggtggccgacttactgcagcacattaacctcatgaagacatcagacagctatgggttcaaagaggaatacgagagcttctttgaaggccagtcagcctcttgggatgtggctaaaaaggatcaaaacagagcaaagaaccgatacggaaacattatcgcatatgatcactccagagtcatcctgcaacctgtggaagatgacccttcttcagattacattaatgccaactacatcgacatttggctgtacagggatggctaccagagaccaagccactacattgcaactcaaggcccagttcatgaaaccgtatatgatttttggaggatggtgtggcaagagcagtctgcctgtattgtgatggtcactaatttagtggaagttggccgggtgaaatgctataaatattggcctgatgatactgaggtttatggtgacttcaaagtcacctgcgtagaaatggagccacttgctgagtatgtcgttaggacattcaccttggaaaggaggggctataatgaaatccgtgaagtcaaacagttccacttcactggctggcctgaccatggtgttccataccacgcaacagggctcctgtcatttatccggagagtcaagctatctaaccctcccagtgctgggcccattgtcgtacactgcagtgctggtgctgggcgcacaggctgttacattgttattgacataatgctggacatggctgaaagagagggtgtggttgacatctacaactgtgtgaaagccttacgatctcggcgcattaatatggtacagacagaggaacagtacatttttattcatgatgccattttagaagcctgcttatgtggagaaactgccatccctgtgtgtgaatttaaagctgcatattttgatatgattcgaatagactctcagactaactcctctcatctcaaagatgaatttcagactctgaattcggtcacccctcgactacaagctgaagactgcagcatagcctgcctgccaaggaaccatgacaagaaccgtttcatggatatgctcccacctgacagatgtctgccttttttaattacaattgatggggagagcagtaactacatcaatgctgctcttatggatagctataggcagccagcagctttcatcgtcacacaatacccactgccaaacactgtgaaagacttctggagattagtatatgattacggatgtacctccatcgtgatgctaaatgaagtggacctgtctcagggctgcccacagtactggccagaagaaggaatgctgcgatatggtcctatccaagtggaatgtatgtcttgttcaatggactgtgatgtgatcaatcgaatttttagaatatgcaacctaacgagaccacaggagggctatctgatggtacaacagttccagtacctaggctgggcttctcatcgagaagtgcctggctccaaacgctcgtttttgaaattgatactgcaggtggaaaaatggcaagaggaatgtgaagaaggggaaggccggacaatcatccactgcttgaatggcggtgggcgcagtggcatgttctgtgccataggcattgttgtggagatggtgaagcggcaaaatgtggtggatgttttccatgcagtaaagacgctgaggaacagcaagccaaacatggtggaagccccggagcagtatcgtttttgctatgatgtggcgttagagtacctggagtcctcatagttcgctgagactatttgcagagcatccaagcagaaatccattcgtctgttgagccagcagctgttgtacctgttactgcaccgagagattttaatgtacggggtgggaggcttttacattggagaggcaaatgtatttttcttataaagttgtgtatcttaataaaaaggacttgatcagtttctgtgactgtatgagagcatccacatttcatgccacctaattttatctttaatcagaggcagatttggatgagaagtggtctgtgtctgtccagtgaccacacagccttttctctcctgctttctgtagagcagctaccacacattgcatgcactttgtaagtggcatttccctctctttttggggtaaaaactgtgggaccccc

SEQ ID NO: 45 - DNA, 4374 bp, Mus musculus
atggatgtggcggccgctgcgttgcctgcttttgtagctctctggcttctgtacccgtggcctctcctggggtcggcccttggccagttctcagcaggtggctgtacttttgatgatgggccaggggcttgtgactaccaccaggatttatacgatgactttgagtgggtccatgtcagtgcgcaggaacctcattacctgccccccgaaatgcctcaaggttcctatatggttgtggactcctcaaatcatgatcctggagaaaaagccagacttcagctgcctaccatgaaggagaatgacacccactgcattgatttcagttacctgttatatagccagaaggggttgaaccctggcactttgaatatcctagttagggtgaataaaggacctcttgctaatccaatttggaatgtaactggattcactggtcgtgattggcttcgggctgaactagctgtgagcaccttttggcccaatgaataccaggtaatatttgaagctgaagtctcaggagggagaagtggttatattgccattgatgacatccaagtcctgagttatccttgcgataaatctcctcattttctccgccttggtgatgtggaggtcaatgctgggcagaatgctacatttcagtgcattgctacagggagagatgctgtgcataacaagttatggctgcagagacgcaatggagaagacatacccgtagcccagactaagaacataaatcacagaagatttgctgcctctttcagattgcaagaagtgacaaaaactgaccaggatttgtaccgctgcgtaactcagtcagaacgaggttctggggtttccaattttgctcaactcattgtgagagaaccacctagacccattgctcctccccagctgcttggtgttgggcctacttacttgctgatccaactaaatgccaactctattattggcgatggccccatcatcctgaaagaagtagagtatcgaatgacatcaggatcttggacagaaacccatgcagtcaacgcaccaacatataagttgtggcatttagacccagatacagaatacgagatccgcgtcctgcttaccagacctggcgaagggggaactgggctgccaggaccaccactgatcactagaacgaagtgtgcagaacctatgcggacaccaaagactttaaagattgctgaaatccaggcaaggcgcattgcagtggactgggagtccttgggctacaacatcactcgttgccacactttcaacgtcactatctgctaccattacttccgtggccacaatgagagcagggcagactgcttggacatggaccccaaagcccctcagcatgttgtgaaccatctgccaccttacacaaatgtcagcctcaagatgatcctaaccaacccagagggaaggaaggagagcgaagagacaatcatccaaactgatgaagatgtgcccgggcctgtgccagtcaaatccctccaaggaacatcctttgaaaacaagatcttcctgaactggaaagagccactggaaccgaatggaattatcactcagtatgaggtgagctatagcagcataagatcatttgaccctgctgttccagtggctgggcccccacagactgtatcaaatttatggaatagtacacaccatgtatttatgcatcttcaccctggaaccacctaccagttttttataagagccagcactgtcaaaggctttggaccagcaacagccatcaatgtgaccacaaatatctcagctccaagcttacctgactatgaaggagttgatgcctctctgaatgaaactgccaccaccatcacagtactattgaggcctgcacaagccaaaggtgctcctatcagtgcttatcaaattgttgtggagcagctacacccacatcgaacgaagcgtgaagcaggggccatggaatgctaccaggtaccggttacataccagaacgccctaagtgggggcgcgccctattactttgccgcagaacttccccctgggaatcttcccgagcctgctcccttcaccgtgggtgacaaccggacctataaaggcttttggaaccctcccctggccccccgcaaaggatacaacatctatttccaagcgatgagcagtgtggagaaggaaactaaaacccaatgtgtacgaattgctacaaaagcagcagcaacagaagaaccagaagtgatcccagacccggcaaagcagacagacagagtggtgaaaatcgcgggcatcagtgctggcatcctagtgttcatccttctcctgctggttgtcatagtaattgtgaaaaagagcaagcttgctaagaagcgcaaagatgcaatggggaacacacgtcaggagatgacccacatggtgaatgctatggaccgaagttatgctgaccagagcaccctgcatgcagaagaccccctttccctcaccttcatggaccaacataacttcagtccaagattgcccaatgatccacttgtgccgactgccgtgttagatgagaaccacagtgccacagcagagtctagtcgtctcctggatgttcctcgatacctctgcgaagggacagagtccccttatcagacaggacagctgcacccagccatcagggtggccgacttactgcagcacattaacctcatgaagacatcagacagctatgggttcaaagaggaatacgagagcttctttgaaggccagtcagcctcttgggatgtggctaaaaaggatcaaaacagagcaaagaaccgatacggaaacattatcgcatatgatcactccagagtcatcctgcaacctgtggaagatgacccttcttcagattacattaatgccaactacatcgacatttggctgtacagggatggctaccagagaccaagccactacattgcaactcaaggcccagttcatgaaaccgtatatgatttttggaggatggtgtggcaagagcagtctgcctgtattgtgatggtcactaatttagtggaagttggccgggtgaaatgctataaatattggcctgatgatactgaggtttatggtgacttcaaagtcacctgcgtagaaatggagccacttgctgagtatgtcgttaggacattcaccttggaaaggaggggctataatgaaatccgtgaagtcaaacagttccacttcactggctggcctgaccatggtgttccataccacgcaacagggctcctgtcatttatccggagagtcaagctatctaaccctcccagtgctgggcccattgtcgtacactgcagtgctggtgctgggcgcacaggctgttacattgttattgacataatgctggacatggctgaaagagagggtgtggttgacatctacaactgtgtgaaagccttacgatctcggcgcattaatatggtacagacagaggaacagtacatttttattcatgatgccattttagaagcctgcttatgtggagaaactgccatccctgtgtgtgaatttaaagctgcatattttgatatgattcgaatagactctcagactaactcctctcatctcaaagatgaatttcagactctgaattcggtcacccctcgactacaagctgaagactgcagcatagcctgcctgccaaggaaccatgacaagaaccgtttcatggatatgctcccacctgacagatgtctgccttttttaattacaattgatggggagagcagtaactacatcaatgctgctcttatggatagctataggcagccagcagctttcatcgtcacacaatacccactgccaaacactgtgaaagacttctggagattagtatatgattacggatgtacctccatcgtgatgctaaatgaagtggacctgtctcagggctgcccacagtactggccagaagaaggaatgctgcgatatggtcctatccaagtggaatgtatgtcttgttcaatggactgtgatgtgatcaatcgaatttttagaatatgcaacctaacgagaccacaggagggctatctgatggtacaacagttccagtacctaggctgggcttctcatcgagaagtgcctggctccaaacgctcgtttttgaaattgatactgcaggtggaaaaatggcaagaggaatgtgaagaaggggaaggccggacaatcatccactgcttgaatggcggtgggcgcagtggcatgttctgtgccataggcattgttgtggagatggtgaagcggcaaaatgtggtggatgttttccatgcagtaaagacgctgaggaacagcaagccaaacatggtggaagccccggagcagtatcgtttttgctatgatgtggcgttagagtacctggagtcctcatag

SEQ ID NO: 46 - DNA, 96589 bp, Homo sapiens
  misc_feature (2687)..(2966): "n" at positions 2687 through 2966 can be any base.
  misc_feature (13107)..(13304): "n" at positions 13107 through 13304 can be any base.
  misc_feature (21488)..(23254): "n" at positions 21488 through 23254 can be any base.
  misc_feature (26987)..(27006): "n" at positions 26987 through 27006 can be any base.
  misc_feature (32504)..(32527): "n" at positions 32504 through 32527 can be any base.
  misc_feature (73853)..(73921): "n" at positions 73853 through 73921 can be any base.
caagtcgtttacatattcagttaaaaataaaactaatgtttgttctttgtgtaaaaggaatacatttgacttcgtgagcacgtattagccatccaaataaccaaaaataatcctagatcactggaaatgaagaaatattttttcttaatttaagaaatgtattgacaaaagaatacaaatcataaagggaactcttgagtcttgtctggctaaaaatcatgagaacactataccagagaaaaagagttggctgagggtgtacttgtaatataaacacttatgaaacactggctacttgaaaattcaaagtacgtatatagtgctgttcatgaatcaatgatctgtgagtgaatctgattgctgatccaaagtagaaagagaaaatgcctgcactcaacatcttttcctattgacaagtaatcagggtcattcacatgttcctacctgtgataaaatttactttttaggtgttcacttctgttactggtgcttaaatcagctaccagctacttgcatttatcttttaagagttagatatttgggtgaattcaactttattttacgtaagttgcaaacacagcatatttttattatttttgcatcactgtactatataatgtaacttacattaactctttattcacttaatcaattttttccacaaacattgattgatcatttattatgccagtcactgtgcaaggtattgtaaatcaaagataaaatgaccacaacaaaacacagaatctttgcccaggtttgtcatagaccatcagagatgcctgcagccttgtaaatcatttgctcatagctggtgttcaggaattttgttaactcagtatgttattgatacacgtttttaaatttaaagtcttttactttattacctttatataatttctaaagaccaattagaaacactcatctttgtatttgttggcaagatttttgaccttttctagaattgagccagaggctgagaacttcaaattatacattgttggagattagtgctcagaaaaataaatttaaatcctggaatattacaagaagaagtaatttaataataatataaacaacagattttttttgaagtgaatgttactaccaggaaaataaaatctgctttctaactgatatgctaatcccaccaagtccatctttagtttttgtaatgacttacccagttcacctacaggtgggtgccaggtggtgggaccagactggtctagtcaagtaatctggcttcagatgagccctgcctcctttaccctctgaatcctttgtgctgtctttctttcctctgaccacattcctactttcagtctccctaccagccaactgtagccttatcgtgaggcttatctgatccagtgccttaattttttgaaaatgaagattcaatttaatgtaatcatttttccttaccattgaatttatggtctggtatctcaaatctttgattggattcccatcactcacttcaaatgtacttgaagcaattttactttccactcaattttttctttgtttatgtcagtctgtcaaaatctcttctctgctaatgcttgatgctattctactctgtgacccttccccctgccacccctgtcaccttcccaaataaaccagaactacatattatccaactaaatctgagagcatccaggagttagcttgctggctgtcatagaccctaaatactgggttctgtccttccctaattatagcattactagcctctgccattttgcatttcaccatctattcatcccacctccagtggaaatatgtattctttctgcctggtcttcctaatatcaaacaaactccagttctacagtcctctgtcataccaactagaaaatcttgttatatagagttttcgtgtttagttttattaggaaagctaaaatcgccaatggattctataaatttgttgactcaataacattctatatgtgccaagagctgagctgcatacttgaaatagaaatctacttaaggcaattagtatgtgcacccgtgtgagtggtagactcctaaattaatgactggtaacaatgctgtgtgataagtgcaataataacagctagaaaatgtggtactaaagctgaatttgtgaggagaggtagaaatgagcatggccaaaggtcacaatgatgcatttacgaattgcagatagcctaggtcatggagagtgaagggtctgtgggagaattgacagcagctgaagctggagagacaaaacagggagcaaagggagaggttgtttagtgccagccccacaactgaaggtgggcacaagaaggactgtaagcagaagttaccatgggcagttttacgtttttagaaagatcactctgatagaaacatagagaatggactggggataatccagaaggctggagtagtccctgtgagaagtgctaatgggccatattaagaaagtagcaatggaaatgcaggtaagactgtggctcctacataaggttttagatcagtaggatgtgtaaagcttcatgggaagggagtttgagtggagactttaggtgagagaagatggtagcttttatatttgaagtggtagcagagcaaaaagacatctcagaattcaaggttttgttttttgaggttattaagtgataaatattttcagtattgctaccccaaatcaaaaaagtaannnnnnnnnnnnnnnnnnnnnnnnnnnnnnnnnnnnnnnnnnnnnnnnnnnnnnnnnnnnnnnnnnnnnnnnnnnnnnnnnnnnnnnnnnnnnnnnnnnnnnnnnnnnnnnnnnnnnnnnnnnnnnnnnnnnnnnnnnnnnnnnnnnnnnnnnnnnnnnnnnnnnnnnnnnnnnnnnnnnnnnnnnnnnnnnnnnnnnnnnnnnnnnnnnnnnnnnnnnnnnnnnnnnnnnnnnnnnnnnnnnnnnnnnnnnnnnnnnnnnnnnnnnnnnnnnnnnnnnnaatgaccacagtgaaaaatcccattctgcataatgcagcactaagtttcaccaaccacattgtccttctgttacccattactgcttccctatgctaatgtagaacatgtgcgatgcagtgctggcaagtgtggttctttgacgaaattaatttttgattttataatcattctaaaaactgaacattgttgcctgacttaagtagaactttgaatctccttaccaactttttgagatctatccttacaactgtcatcacttgacaatcattactgtgttcaaaatgaatattgtctacatttagaatgcaattccctaggaatacataattccttttcttttctttctaaaaggtttcttcgtaaatgaattaaaactctaacctgggaaaatataattacaaattataatgcatagaacgtcccatttattaaaagattgacccaatatagctgtgttttcaaagaatgaaaataacagcagcatgttgtaaaaacacaaaatagtttctctgtggtgagactgtttattgtaaagttaataaatgaatatatattttatttcagcattttccaaatagaaactctacccattttgcgctgcaggaagctacccattctaaggttactttgttttgtggagaacatctaatttgcatttcataacattaagcaccacctatttagtttgataattaaaatatagtcatgaaataaagtcaaaaccaccatttcttccacagttaaattaggaaaagaaattgtctgatgttctaagttcactgatagcttaacagacaaatgtatgttagggttgcatagctttaaaatctggggctatcctcatccacctgcagaatagtctgtttcattacataaatttaaagatatcaaatagttctaattttcctaaccactatcctgacctagagcttacttgaattccaaataaaaccatcttgaaatttaactagagatggaaataatctttttgccctcttttatgggcataaaggtcatatggtccaattagatcaaatagatgttactttaattttatgtttattctctagaatcatagtaggtagaatcgttataatttttctaatcaaaaataggaggaagtatgcccttcttgttaaatcttctttctggcctctagaatcccagtccacagcttgcttatgaccttgtgagaagccctgagccagacctgtcttagcttagcaactctggaattcctgacccactgaagctgtgagataatgtttgttgctttgagctacagaatttcagggtaatatgttatgcaggaagagattatacatgtacccaagtagtataaatcttctctttcttcagatttctgcccaacggatacttttatcacataaggatttcttgaccaacccatataaaatagcactctgcattcccatcattccctctttcccttagcctgctttatctttctctagagcacttatcccttcttaatatgtgttggttttctgaatttatttttttatttgtgtctccccactagaatgtaaacttcatgagaacagagacttttgctactatcttcattattttaacctcagtacttaaaataattcatgatatgtaacagatactcaataaatatttggtgaacaaatgaactggatctaaaaatataacagccacattctgtagtaagcttatcatctgctaaaggaaagacatatacctaaaaaactatttttaacagtataatatcaaatcatatttgtaatgtaccatgttggtgcatgtaatgtgctacggccacatactgatgtatcatataagcaataaatattagacagcaatgctaggtcttttgttttttccaccctagagtttttgagaataccatttatggttctgataaatggatctttggcattataattgtcagtgggttaggaactagattaaacatgcatccctgtgattgtgacttctacccccatgtcatccttcagtcatcctcatcttaaaaattactccattgcctttagaagacagagtactgaggaatgaagatagttcaagaagccttcatggcagaagtagaaaaactagacaagaaaggcagaaattcttgactgtatgtttagtatatttgggtaacaatggtcataccagcttcgaatggaaaataaatatcaggagataaaacaagaatggagatataaggtaaggaatgtggtaatttatcaaccccagcgtaaaaagtacagagtttgactttgaatttgactgtacttcaaattttaatgttgctattatcctgggctagtgatatgtaatacatgagatattaaacactttattataaaacaggttttgtattagctgattttgccaactataagctaatgtaaatgttctgagcacatttaagttaggctaggctaagctatgctgttcagtgggttagatgtattatattcatttcaatttacaatattttcaacttgtaatgggtttattgggacataaccccatcataagttgagaaacctccatataatgtagtaaaatatgtcattttaattttttaaaaaataaggaagtcacattttgtgtattgaatgattaatgataccaatatattgatttaacctaattacagaaatatttttgaagtttattaaaaggaatggggaatatattaactatgggtagagtgattaaaaatattatgatgactttggaatagttttaattactaaagtactgagctcacctaatatttagatctagctagagtttagttccattaggtaattagacaaccagaagaatgaagaagcacaatcccatttcatgtaattagtcaactcacttctaatgcgatttcttatttcttatttcatcttttaattaatttgtattgataaataagaaaataacaaggacagaaacagatttaaaaattggaaatgtggttagagaacagcctttcagattgaacaatgaaggaaagatagtttcttttaaacatggactagtgtgactttttgttatttttatagctgtttttcactaaatgtaaatacttcttaaagactcaccatgattacaattgatttctgtgtgagttataaaaacgcctcttcaatgggcatgaaaaaaggtagaaatagatgcacaaagtgatgcatccagaaagacactgactaaagactgagcccaactaaggagagtaaaatgccactagagaattttgagggatactggtacaaggaaagatacttttcatattttcagtatcttgaaaaggtagcatgctgcggaggtccagaacagaaagacagcagtacagcagacaggtgtatatcaagattttaaactgaaacgggtatttctgggtgatgttatagaaaagtagtacaatttcagtttcgtttgggtgtaaaagcaaaagggagtatgagagatgactttaaaagactctgaagatctacttctgggtagctgtcccagtcactttaaatgcttaccatggacagtcacaggttcctaagtgaacagagttgaaaagaaagtatacattttagttttgttgtcgttttaaactgtatcaaacttgagaggggcagaaagcattctaaagatggtagaacactagaagtttcagtaaataaaagtgaatataaggtccgtgaaagccaggtgttttttttttaacctctctatcctcagagcctgcatgatacctgttaaatatataattgttgaatgaaaatgagttaatggatacaatgtcacaggaagaaaggtaaatgagaaaattcttactcttcaaataatgctcgggatttttcaggtgaaaaatgtactttcatggagaaagaaaaagagtatcttagatatgtcctaagcaaaaatatcaacagaaaaggcaaaagcaatgtattcatttcataaacacttaaacgtccattatcctatttgaaaccacatattccagtgtggtttcaaataggataatgggcgtttaagtaagtataatatgtgaaaatgtaatggctattgtatcagcttttggagttaaacatatttgggattaaaaatatctagaaactggggtgaatgttatatcatgaagacatttctcctggtatgagtggtggtagagtgggagggttatagagtgcggtgaccaggttatctccaactagctttccatctaatgttactcattgcacaaagaatgttttagaaagtatgcttggaagccagttctcagaagtctttttgtatttatgtgtcttagtttgctcaggctgctattacaaaatactaggtggcttaaacaagaaatatttctcacagttctggagactgggaagtccaagatccaggtgctctcggatttggttcttggtgagggcccctcttctaaacctaattattttccaaaggccccctctccaaatactatcactttgagaattagggttttaacatgaattttgggggagggggcacaaatattcagttggtaacactgtagtataaagtagagaatgaacaaagtgaggttcctggtttaagttttaaggggagctctattcttctgcctcagtttcaatagtaacagaaatgtaatacttcatttctgtaatgaccattcaaagaataaatgaataatattggtagagaaaagatatataagattaaagtgcatggcactgtaatttatatttgtatataaattatgtggaaatcattttcttaattctttatgaaacaagcatgttacttgtattttagaacttataaaattgaaataatttatctttcattttaattgagagtagggccaaatctgaaagttcaacccaaggcattgatttttattttctatgggaccatacttaaggctctttcccaaagagcctattgcaccttttcttcctttactcttctccaacactggcaatttactttgctcctcacagatctagatagacaagctgtcttgcatgaagtatccttaatttgtaatgtagaatctctgtcaatgtaatagaattagttaagattgaatgttcactagattttgtgtttttttttctagaggtatgggataattaatgaagaatctatttttaaggattagattaatgattaacaaggataggtaattattattattctttagggcaagaatataaggttacatttgtttggagagcatgtatgagggagtttatatgcatatgtggatgtatccacaggacatgcaaatgtataatatacaaatatgaattataaatttaaaataaaacatagcatatgtcagctatgatcattctcgtctttctccagggctatgcgtatgtattttctatatcttaaaattgacaaatgcctgctccatggatgcctcagagaccatgcatcttgtcagtagcattcttagaagcttagcaaccaacttggcagaggtatagggaatgatgcagcacatataatttgaaataacatagacttctgccttgcttgctcaaatcacaatttctaacattaatacaagttctgttatctttttagaggaaacaagatggatatgaacctactgatttattagcaatattttaatggaaaatgggagcttaaataactaggaagaaaagaaaatctgtaatttatcaattaaattatgatttaactctttcttttgatgtccttttgtttaatctatgaagatcttttatttgtaggcataagagtttatattaaattagaattttatgccagagtctaaactgttttaattttcatagatgcatgttcagtgtatctctctctctcctctctctctctgtctctctttctccctccccctctcctccccactcccctctacctacccacctctttctttttcatggaagtcttttaaagaatgtattctgttcctcctggagatccattgaatatcaatatgcagccctgcatacaatttatgttcaacttacctaagataccacatatatttttccagaatttttaggaattttaaaacattttaaaatatatttataatgtataaaatatattataataataatgtcaactttcatggtaatattttacctgaaaaaattttaacgtaaagaattttctactaaaaaagaatattgttaatataccagcttcagagttgttaaaaaatattgttagatatccgggggatctttattttaaatttgccttgtttttctttttgtttttttctctcctttgtaaagtaattgcaattatagaaaagttttaagacttaaagatatcagaaggtttaggttagagctttaataggccaaatgccatctgtttctacaatttgtaacattttattattaacaactccagaagaaggaggcggtctatttcggttgtgaggacagatttctgtccatctgtgcccgtattgccgcatgtcacttgtattttagatctacatagctctgagccagtgtagatgccatggcaaggtcaagaggtggagaagcctgtcagtacattctgtctctgaggctgtgacaaccacaaatgggtgcttctagcaccgccctgaggcagtcattctgttagaccttggagctggactttctgtaatatcatttcaagggaaaatgttaactttaaacatttaaaaatatcagacaaagaactgaatctatgatgtgtctttggttaatgtcagaatccttattagggtggctcattcctcaacatttaaaaatgttgaaagtcctacggtgattgttcttctttttatcagtttctttgtaactacagtgatgttagggacagcagcatctatatggatttttcattttattgcgaaatagctgaaaagagtataccaggttaagactaactttaaatactttgaaatgtggtgtgttaatagtcaaccccttaaaaaaaatcttagtatcttaaacctctaaatatgtgtgtatatatatgtgtgttctttttttcttttccccaaagtgcttatcagattgttgtggaagaactgcacccacaccgaaccaagagagaagccggagccatggaatgctaccaggttcctgtcacataccaaaatgccatgagtgggggtgcaccgtattactttgctgcagaactccccccgggaaacctacctgagcctgccccgttcactgtgggtgacaatcggacctaccaaggcttttggaaccctcctttggctccgcgcaaaggatacaacatctatttccaggcgatgagcagtgtggagaaggtgagcttcctccaggatttgctttttccctgctttgaagaaaagctgaagtcaaattttatgaatactcagtagcatccgtcaagaaaaaaaaaaagaaaaagaaaatttgcatgtagggggttctgttctcaacagtgtgcgcagttttggggctacagtagggctgaggccgcacgccagttccatttcacagggttcctgtttcctagtaactgcttctactcgagccttcctcaggaaagcccacaatagcaattgagagtaaaatgatttgaaaacgtgggtgtgctgctgctgggactccaccctcagtaacgatcaggcattgttctgtcttccttgctcagtggtggcacacttcaagagattaaatttactgcaggataaacagaatgcgtgttccacagcaggctaataaaaccttataaacttttcagggttttcaagccaaatagtaaataacatgtaacaatcctctgattacaaagtaatagggcgcctgtggtatatctgactgaacctaaacaaaaggcagcctggcgatgactggctgctgagccattacagaaggctgctctctgtttccctggttgcccctccttttcccattttggacacagttgtttttgaacactgctgctgatcccaaatgaatattgaagaggaaaacacaacaggacattagaaacgaccggcagttccgtatgtgagaaaacaacctggcctttcatgcctcatgctgttctctttggaagattttctttcctaaaacttatttttatttatttatttatttatttatttatttatttattggcagacagagatagagggaagacaaatgttgaggatagaaattttcacaatttaaaatccaatagaatgatgacattttaatagacttgaagccgtataggaaattgctgggtttatgtaattgagtccctaaggtgagcacctgggagtgatacatgatatacaattacatcagtcatattatatcttagaagagtttaattggaagacataacaatccttttgcatttctgcaggggccgtgagagctttgggtattgattggctgcttttgaatcaaagctttgttgtttgcttgcctgtatgcttggcttgtaggtagcaaagaaaaaggccacagcatcttctaagatgtgctccagagtcagaggctgctcatggttgaagatgctcttctcgtttacctttaaagaactgaggtctttagagagtagtccagtgtccactttctgcctacatatcattccataccactgttacaactgggctactataaaaacagaacactatggaagttattagtccattctgggtataatatagcattgagtaggaagcatagttttgtgtgagggttttgatctttagagaggttccaaattaactttggttatttggtctattataccagaggagtgttaatgaatgtctgttacttataaaggattttctctgcattctttaaagctttttgatatgaattttctcttccaattgttaatatatctgcactgtggtttaatcaaagtacagaatagcaacaatatatttcacagttatcttggcaaagagttttaaagttgatgtgacttctacaagtagagattggtaatgccattagaaagttaaacagcaattgcttttaagaaatgaaaatcctttggggcctttatgggaatgtgaaataatctcttgcaggttaccatgaaggtctcaggccacaagtaatagaagtgcaacattttatttttaattactaattcccccctcactgctttattttaatttaaaaataaaaaaataaaaaatgcttaagtggaaattgtaaactcttttataaattatcaacatatagaactactcaagatagagttataaatgcatcttgcaaacagatcgcctctggtttgttcactggctttgataccttttctcacctcttgtgtattcagggatgtacgctgactcaattaagtcctagaggaggaagagtggggccaaaagtagctggcagggacatgtgtctcctactgccacctgacagcgttaaaaataatcatattttttcttgtcctttcctactgcttctactttgtatacccgctctgtctagcaagaggaggaaaattatgtatgctgagaaacatttaactcctaatagctaaattaaaagaaagaaagaacagataaattacaccataactatgatgtaatgttttgatgatctttctaactgctatcatttagctttttagtcatgctaggatccagatgaaagtatgtaatgttcagctttggtctcagtctacagttctcagatgaaaattaaatttatatttggaactgtttttattagctttgcaagtacatttttctgatagtttacgaagcactatacatgaaaatagaatgctatactacttgtcacaaactaacctgtttcattgcaaggtaaaaacaaatatttacatctctataaaaactaaaatatttttcaaagttcttactttagatttttaagtatccctaggggggcatattttttaaagttttcttaatattaaaattctgttgtttataatccctttttatgaccccagatggatcttcataataattatagtttacgaaacaggaaacattatctgtacattgactcttttttttttcatttttactctatcaggaaactaaaacccagtgcgtacgcattgctacaaaaggtaagaggtttgctttttttgcttgttttaactactctcaccccctttctaaaatggaaggannnnnnnnnnnnnnnnnnnnnnnnnnnnnnnnnnnnnnnnnnnnnnnnnnnnnnnnnnnnnnnnnnnnnnnnnnnnnnnnnnnnnnnnnnnnnnnnnnnnnnnnnnnnnnnnnnnnnnnnnnnnnnnnnnnnnnnnnnnnnnnnnnnnnnnnnnnnnnnnnnnnnnnnnnnnnnnnnnnnnnnnnnnnnnnnnnnnnntttctgttatagttagttctgtgactcatgtgggtgtctttaacaactaatggggtgctacttcccatcctctagtacttgactgaaggaatcttgttatgataacaggaaagatctagaaaaccttagaagggcttatttctgccatttagtgtctgaaaaatcttgtgctgctgatcaaccaatatcttaggaaagcgtcagcaatagcagatgaaaatagcaagttgcttgtttaaaaacctctattactttccattgtagacaatcaaacataaaaagaaccaagctaattcatgtttacataagattatagggatagagattagtccatatcttcatcagtagtgcagttagcttgaagatcatttactttttttaaaacttattctgagaaaccagatctgtgatggctagctcataaccagggcaattcctgctgacctggcatattatggcttagctgcctagtttctttgacaagagaaaacatttgcatctttgaatgagtatttagagttccaagtgggggaaagtctcctacattctctgtgtttttaattcttcatttaagagttacttgattgtgccaacaaagaataaattgctacttggtgtattctagcaagagaaacatgaaaaagctgtctgcatgcagacgtgggcctcctcaaagggttggttcttggggtggtttgctgccggaattagtagcagacccacatttgtgtccagtagttgattcatttggggtaaaaatgaatggccatattctgtttgtactggcatctttcctttcatcagttttctccatctaatcatcagtctgctcaatcagcatttgtgctttactcctgatttgtaaggcaataaagaaagactttctctttgacgcttgtgaataataaagaagctttatggaagagaaaaaaatatactttttcaattcacttatgaagattccttttggtagtttttatttaaaaaagcaattcttaaagagaaaatatacacagatacatacgatgtataaggattttattttaaaaatttagcttactgatcaggaacgagagttgaaatttttaaaagataatagaagaaagcatttaggtctatatcacctgtgtttttccagatttaaagtagaaccaaaattgtaaaagtgtcccacattgacctctgaagttctttagatatgtcatgctatgtttctgtaactgagaaatggtagctatatattaccctaacataacttttttattcagttatttcattatttgctcttgcctgagatgtttgtgtccttttatcgctctctcgatacaaatttaaaaaaatgacaaatatcacatgatatttaaactataggaggattgagatcctggaaacagtcttaccatgtggcatagaataattgacagaaactttgaagtggtaaaaaatagtccattatttgtctaataatccagctctgctacacttctggatctcaggaatgcagtgtggtgtggtgtagtgagtaagagaaaggactctggccttacactatctgagttcaaatattgactgtgtcccttaggaattttttagtattgagaaacttatgtaaaccctcattccaaaaattaaataatagagtacctacaccttcttattgttgtgaggattaaaataacatatataggccagacacggtggctcctggcactttgcaacgccaaagtgggaggatagcttgaggccaagagtttgatatcagcttgggcaaaatagcaagaccctgtttctactgaaaatttaaaaaaaaaaaaaatgttagccaggcttgatggagctcacctgtggtcccaggtacttgggaggctgaagcgagagcatcgcttaagcccagaagttccagtttacgttgagctatgatcgtgccactgtactcctgggtgacagagtgagaccctgtctctaaaataataaaataaaatatatatgaagtgcttaaatagtgcttaacatattataaacagtacatgtgttaactatcttatcattatgctaataattttgtacttaagagggacataacttatgttagacagttatgaatgaaatatgtataaaaacaaatctaaattttcgtgatcgagattgctaggacaggggagaaactaagggttttttgttcgcttgttttttaatgtttctgccctggtctaatatattttcttctctgaacctttagcattttttccacatatgaaaagctaaccctgtttctacaaaaactaaaaaaaatgagccaggcatggtgacttgtgcctgtagctccagctacttggaagatgggaagattgcttcagcctaggaatttgaggctgcagtgagctatgattgtaccactgcactccagcctgggtgacagagtgagactatgtctcaaaaggaaaaaaaaaagaaaagaaaagaaatgaaaaagaaaaactaccacatttgttaaagtaacatcaacttattgcctgactacattttaaactaacatgcaagtatggtcagctttggtgtgaaatttttcaatatgaaaataaaaagttttctgacagggcgttttgaagaaacatttaatagtcaaaatggcataatcatatgactgggaagaggcatgaaggaaccttctggtgaaggagtggttcagtatttcacaggtgcatatgtaggtaaaaatctgtccaactgtacatttaaaatgtgtgcactttactcttataaatttgtgtgtggatatataggtagataggtaaagtatttcccaatataaaaaaatgaattatacattaaaaattgcatggccagagttagaaacagcactgagaatattatagaggagtctctggagtttgaaaggctcaccttgctagcttcagtgaaggtttccttctatcagacgaggtgcatcttcagtacataagccactttcagtgagaaggacaaccctgcccaggaatccctgggctgaatgaaaagggtctagaaaggacctttcttggtcctggatgactcctatgggcaagtcttgtgtttcagctgccctacagtcagaccctcccctgcctcccaacccccaccccctttccagtgtcagttgtgagtactgaagagctagaaccttgctagaaccttgctttcctaatatcctttgtatttagatcaattttgctgaaaagaacttagttctctggaaaatctggtgtccctccataagacattccagtttgcagtgtgtccttttaccacacaaattttctgttcaggccatatgcaacagtctgttgctttttttctcatttttttgaaaacttaaaacattccaaatgtagtctgggacaaagtaccttgaacaaagtgtgtgtttctctcactcactctctctctggaaattattttcacatcccctttattttagaaaaagttgtattttgtatggagaagccagagttcattgttacatgttagtatcatatttataatagaaaataaaacattttactaaaacaaaaaaaaattatttagccaaatttgaagctctgatttaatagtcttatacatcactatatgccagggacaaatacagagtgagagtcatattagatacaataaatatttgttgagttggtaattgaatttgaacaaaacgtaaggtagatgcttctgctttcacgtttaatcaaacaggttacagtactgtctgcaattatgaaaagtatcagagcaatatgtgagttaagacaaatttattaaataactagagttgtttttatttctttaactgtgcatttatattgtgatatatatttcatattctaatatagaatacttttgccaaagctaagactttattttagtaacaaagcagtcagttaaaaatataatctataaactaatgtgaattaaattaaatttaatcctagtctgtgtctatatcagttttattcaaatgagttttcttcagctgaattctgtgataggaagacagtttagctcaaattgtcttttcattgtaatcactgctattcttatgaccatattctatagcttctttgctttcctggtactcacatttcaatgtgaaggacctattcaaatgaattaaccagaatgaatgagttgatatattagagcacagagtccaaagagaatctagctattattacttcttataataagtcttaaattcgggatacaggacattataatgagagattaaaattctatcaagtgtcttaaggatggacataactaagtagcataagaatgtaccatgttttgctaatgagaaactctgacttcattggtggatgtctttaaattttacagtcaaagtagaaataatagctctgaatatttttatagttctcaagcataagatcagaactagaaattaaaaaggagtaacacatacaattttcaacattcatcttttcccagcattttgaattattcttaaagttggcgacagttcaccattactactgtatatctggaataccctgtgtctaactgatttcatcttaattcacttcacattggaccccggaacctctctctctgctctcattgctagtataagtagactcttctccaccatgttcctagagaaatagccaagtcaccgaaacagaaaagatatgagttgaggaccttcaagggtgcatgatcactgttttcatcccaaccccaagttagatggaagttaaatatttctttgctttaaaagtaacaaactattattgtttgcatatggagtattactagtctaataatttttgacagaatgataactgggatgctaggatatagagagaaatggaaaaaaatagaacggacctgaagatgattcaagcattttgcttttatggaaattaaactgttttatgagaagatttctgacctattaccctctctttcctgaggagcctgttgcaggtaccttacatttatggccacgtctacgggagagaagtgatgacattcattcataaactgatcaaactgtcagtgttaactgtggaaaggatagagtttctaacctaatttgtaatgctgtaatcacatacttagaagagactggaaaaacataaattggtacaacctaagggaactaacttataatccatttcagcaaaaaattcaaaaggtaggtggttatatcatcaatattcaaaaatcaatagtgtagcagcaacaaaacagtattttaagatgttgtcatttataatgtatctctaaaaattagtgtaggaatatatctggtgaaagatagattacatctctacactgaacactacaaaatcttattgagagaaattaaacaatacctaaattaatgggatggcacaccatgttcatggattagaagattcaatattggtgaaatgtcagtgctcctacattaatgtgtagatttaaagcaatcaaaatcccaattttgttaaaaaaattaacaatctgattctaaagacaaaatggaaatgcaaaagaataagaatatgcaaggctactcttaaaatacagttcctggatgttatcaaggccaatataaagttagagtaattaagacagtgtggtaatagcacaagaataaaaattatgaccagtgaaagagaaactccagtaatagatgcacacacacgttcaccattttttatgacaaaggtaaaactgtagggaagaggggaaaaggtacccttttcaataaatgacagtttttccatatctatatggaagacattatatcttgacccctaactcacactatataaaaaaatacagctacatataagagttataacagtatagtttttagaagaatatagaacatattttatgatgttacaatagtcaaagattgactccaccatcctccaccagaaaaaaaaaatttaaacaattttttaaaaaaataataggcaaggattttttagacaggagatagaaatatgctaaacaaaaaggaataaatgataaattctacttaagacctctttcctgtcaaaagatgccattatgagagtaaaatagaatttacagaggagaaaagatacttgtaataaatatatctgaaataaggcatatcaaaaacatatttaaaaactattaaaactagtgaggagacaagagacaatccattagaaaatggagaaaacacttgagcacttaagagagaaggaaatacaaaatgatcaattaacctatgaaatggtgctcaacaggaaaatacaaattgaaaccacaatgtgattccactacacctataccaaaattagtaaaatgaaaaagtgtagaaaataccaagtcttaagaaggatgtaaaataactggaaatctcctaccatcctgctggtgggggtataaatttgcacaaccactttggaaaactgtctagcaacatggactgaaagtaaacccatgtcccaacaattccattcctgggatactcaccaaagaaatatgtatgttaatacacccaaaaacatgtagtacaaaatttatagcagcactgtttataaaagcaacaaactggaaataacccagcaacaaccagtagtagattggataagtaagttgggcatattcacataatgccatgctctaaagcaaagaatgcaaactatgactacacaaaataatatacataagtataaccaacattatttgagtaaaagccagacaacaaagaatatacactttattgtttaatttgtaaaaaagagataaaataactaataaaagttaaaaggtatgcagtacctatatagatgtattatgatttaaatattatattatctagatatgtatctgtctcaggggttcccgagactaccctcagattcggtgattcacaaggaggactcagtcatcctgtgagttgtcctgttctcatggctacgacttattacagtgaaaggatacaaagcagaataaggacagggagaagtcacatggacaaagttcagaggaagccaggtgcaagcttccaagagcctcttcctatggaatcacacaggacatgcttaatttctccaggatggaattgggacagcacatgtgaaatgctgtctatcaagaaagcttattagagactcagttcctaaggtttttagtgggaactggtcacatggaccccttcttgctatcatctgccaagattcccttctcccagaaggaaactagacttttagcataaagcacattatttgcacagtttaggcacaatgaaccactcttctcagggaatgatgggaaccctcccaaatccgagttcccggacatcagtccaaggtcaactttgcaagccgccctttccaagaatttcagtcttagtcctgctacgttaactcttttctgtacaatatctatatcaagtgtctcaagggctagttaaaagaatatttgaagaaattagagaaaattccaaaaattatacatacaattaaggaagtagaaaattggatgtagaaaaataattagaaaattaatcattattgacactaagagagaaatctgagggataatttaaggacttcctttagataatgagttatgacataagataaagtcacccatagcctgtatctcccccaaatccttccctaagtagagaatatgggcctactttatttgaaacacttctgaaaagtatttcttgaaaacactctttagaaccttctaagaaatgacagctcatttagtcatttgccattcagattgtataccagcttatataataccttgattcattaattatttgctgaacaatcctaaaaattatgtttatccattacccattcatacttttactatctttctacacccaatatgtatgcagttcaggttttcaaactcttacttgagtaaaaagggagaacaggtatttaaaagcatatttctagccaggcgccgtggctcacacctgtaatcccagcactttgggaggccgaggcaggtgtatcacaaggtcaggacttcgagaccagcctggccaacatagtgaaaccccatctctactaaaaatacaaaaaattagctgggtgtggtggcgggcacctgtaatcccagctacttgggaggctgagacaggagaagagcttgaacccgggaggcggaggttgcagtgggccaagatcacaccannnnnnnnnnnnnnnnnnnnnnnnnnnnnnnnnnnnnnnnnnnnnnnnnnnnnnnnnnnnnnnnnnnnnnnnnnnnnnnnnnnnnnnnnnnnnnnnnnnnnnnnnnnnnnnnnnnnnnnnnnnnnnnnnnnnnnnnnnnnnnnnnnnnnnnnnnnnnnnnnnnnnnnnnnnnnnnnnnnnnnnnnnnnnnnnnnnnnnnnnnnnnnnnnnnnnnnnnnnnnnnnnnnnnnnnnnnnnnnnnnnnnnnnnnnnnnnnnnnnnnnnnnnnnnnnnnnnnnnnnnnnnnnnnnnnnnnnnnnnnnnnnnnnnnnnnnnnnnnnnnnnnnnnnnnnnnnnnnnnnnnnnnnnnnnnnnnnnnnnnnnnnnnnnnnnnnnnnnnnnnnnnnnnnnnnnnnnnnnnnnnnnnnnnnnnnnnnnnnnnnnnnnnnnnnnnnnnnnnnnnnnnnnnnnnnnnnnnnnnnnnnnnnnnnnnnnnnnnnnnnnnnnnnnnnnnnnnnnnnnnnnnnnnnnnnnnnnnnnnnnnnnnnnnnnnnnnnnnnnnnnnnnnnnnnnnnnnnnnnnnnnnnnnnnnnnnnnnnnnnnnnnnnnnnnnnnnnnnnnnnnnnnnnnnnnnnnnnnnnnnnnnnnnnnnnnnnnnnnnnnnnnnnnnnnnnnnnnnnnnnnnnnnnnnnnnnnnnnnnnnnnnnnnnnnnnnnnnnnnnnnnnnnnnnnnnnnnnnnnnnnnnnnnnnnnnnnnnnnnnnnnnnnnnnnnnnnnnnnnnnnnnnnnnnnnnnnnnnnnnnnnnnnnnnnnnnnnnnnnnnnnnnnnnnnnnnnnnnnnnnnnnnnnnnnnnnnnnnnnnnnnnnnnnnnnnnnnnnnnnnnnnnnnnnnnnnnnnnnnnnnnnnnnnnnnnnnnnnnnnnnnnnnnnnnnnnnnnnnnnnnnnnnnnnnnnnnnnnnnnnnnnnnnnnnnnnnnnnnnnnnnnnnnnnnnnnnnnnnnnnnnnnnnnnnnnnnnnnnnnnnnnnnnnnnnnnnnnnnnnnnnnnnnnnnnnnnnnnnnnnnnnnnnnnnnnnnnnnnnnnnnnnnnnnnnnnnnnnnnnnnnnnnnnnnnnnnnnnnnnnnnnnnnnnnnnnnnnnnnnnnnnnnnnnnnnnnnnnnnnnnnnnnnnnnnnnnnnnnnnnnnnnnnnnnnnnnnnnnnnnnnnnnnnnnnnnnnnnnnnnnnnnnnnnnnnnnnnnnnnnnnnnnnnnnnnnnnnnnnnnnnnnnnnnnnnnnnnnnnnnnnnnnnnnnnnnnnnnnnnnnnnnnnnnnnnnnnnnnnnnnnnnnnnnnnnnnnnnnnnnnnnnnnnnnnnnnnnnnnnnnnnnnnnnnnnnnnnnnnnnnnnnnnnnnnnnnnnnnnnnnnnnnnnnnnnnnnnnnnnnnnnnnnnnnnnnnnnnnnnnnnnnnnnnnnnnnnnnnnnnnnnnnnnnnnnnnnnnnnnnnnnnnnnnnnnnnnnnnnnnnnnnnnnnnnnnnnnnnnnnnnnnnnnnnnnnnnnnnnnnnnnnnnnnnnnnnnnnnnnnnnnnnnnnnnnnnnnnnnnnnnnnnnnnnnnnnnnnnnnnnnnnnnnnnnnnnnnnnnnnnnnnnnnnnnnnnnnnnnnnnnnnnnnnnnnnnnnnnnnnnnnnnnnnnnnnnnnnnnnnnnnnnnnnnnnnnnnnnnnnnnnnnnnnnnnnnnnnnnnnnnnnnnnnnnnnnnnnnnnnnnnnnnnnnnnnnnnnnnnnnnnnnnnnnnnnnnnnnnnnnnnnnctggaagtttatgttggtattggacagcatcttgaattcaaactgcattgtaaaggcaacagcaaatcactgaaagtttttgaagtgaaagcaagttaatcccagctatatgtaacattttgggttaaaaaaaatctcaatagcatatatgttagattgatgcagttaaatagtagaggtgaagaaacaagctgaaagcctggtgtagctcttttttctcagccttttctcttttcttccctttttttccttaaaaattcatctcacaaccattggggtggggcagagcatggtaggacccacaccagtgagagatgaaagcagcagcagtggtcccacagaccttgtcagagcctgagtcggatggaggaggcagtctcacagagtatcagcctcgtgtggcatttcagaagtcagttagattcagaagcttgtcttcatggggacggtgggtggcacaaccccatgtgggaagtcagagcttgagcagggagtagagtgtccacatgtggaggtgaactgttggggttttggagcccaactagggtgagtagaacatcaacacagtaggcaatccaccttgggaaatcagagcccaagtgtggtgaaaaggggacttgtcagggacgcatagcatggtgtgaggtatcagaatccaaacaagatgaagagcttgggggtggggagtcagactctgagggaggttaagagggtgtccacgcaagagggtggcccatacagcatgtcagagccttatcagtctaggtgtgtgaacttccaggcagaggttgatcatgtgccggttgcctgagtctgcatggagtgaggagcacagccgcacagggaaggaggtgacagcagagatggcagagattacgtgtgtggcagggtgtgggggtgcagggagaaagttaaaaaacacaggtgaaactgtgtgtataggggtgtgtgtgtgtgtgtgtgtgtgtgtgtgtgttccatacacatagtccactgagacagcctgggagcaacaacatactgatggaaaatatgcctaatatccagatgttggtgtctaaataccattatccaataaaagtacctggggctctttggataaatggctcattccagggctggaacaaggaaagtacaacatgaaactagattattattattatttgccagaaagcgctaaaaaaataatgagggcatagcaagaggacacaattgccaacctcaagggggcccctcattggctgaactagaggcctattacttgagaatcaaaataaagatggtgattgattataacactgaataaaataggaaagcacaagtccttactgatataaatagagaaagatggatgagaaaccaggtatttacatagtttcaaagtagctcccaaaaacttaataattataaaagggtacagattaacctcacattggaagagcctagcagatgctttgaccaaatgatgaaggtgaacagtatccatgttgggaaagacattatggtttcccactaggatgcaagaaaagcacagcatcacttttgtgatattccaaccaaagatgtatatccttaatctaaacatttaaaatatcagacaaatccaaattgaggatattctacaacataactgagctataattttcaaaaacgtaaggccttgaaagtgaagggaaggctggactgcgcaggctgaaggggaccaaagagatatagcaactaaatataactaattagatcatttagatacaaagaacatcattaggacaattgggaattttgaatgggatctgaagtttagacagtagttaattttcttaagtttgaacgtcattttgtgatctataggaaaatgtccttgtttatgggaaatactaaagtattctggataatggaggcatcagggcagtcacttactcttcatgcttagtaaagtgaaaacaagggagtagtgtatttgcaaattttctgtaactttgtgtgtttttccaacatataagtgaattttaaagctgttatactaaaatatggggagcagatgagtgattacattaaagaataagaaataaggatatggaggatatgatggtggagtacaagttaacatgtcttggtgtgtatctgctgtgaacaaggaagctgaagacttaaatatgatgctgaacttctgtcctgagccaaccacactaggaagatgtgatgtcagtcacagagacagaaaacactagaaacaaaggctgagattaaaaaaaaaatgatttattccattttggaaaagccaagtgtagggtaccaaaaaatagctaacataaatgtaattggaaaaactagaaataaaagtgtggagaatgtctggaactagagaacttagaacttgggagtggtaaaaacatatgaacaagataatatagaaagatgaggagagctccttgcaggatacccatcttgagacagtaggaggaagaaagtgaggtaggagagaagctagaatagaagcaaccggatcgaaagatgcataaccagtggagtgccttgtcacaacactgacgaaaggaagatataccaagaaggggccttataaacgatagttaatattttaagcagcatggaaagctcaaataaaataggatgagaagaggcaactgggtttgcaaactgggatgtctatggttgagtttagaaaagggagcattcaattagagtgactgggcaaaaagatagcgaatagaagcaagactttagcatgaactggagctgagaaaataaagtggttggggagactttcttttccagaaatacattactgataaaaaggagattgctaggactttaatttaggaaagaattattaagcatggtagagactggagcatattttatttatcagaggaaacctaccaatggagcaaaaaatattgaatatatataagaaagaatacatttctagaggaagtaggcagtgatataattgaacaaatgcagaaacatatcttttaaaacaatagggaataattgaacctgtgagggcaaatggacaagtgacaccaacagaaaaaattgagaagtgtattagattatccatttaaacaaattaaatgaagtcctgtgcagagagtacaagtatcagatgtggaacaagagaccaggaaatttttaaaagtttgaaaattcttgaagaacaatgtgaaagaatttaaatctaagaacaattagcatacatactgaaataacatcattttgaaaatttttcagcgtgtaaaaatcattctaaaaaattcctagtatcggctgtatgccatgactcgtgcctgtaatcccaacactttgggaggcagaggaaggaggattgcttgagcccaggagttcaagatcagcctgggcaatataacaagacctatttctataaaaacttaaactaaaaattaaaaatgcttagtgtaatagtttgtttcctgccttgtatctctggtggcagccagcacataaagagaataaagaccttggcttgactattaaacatatgaattaaataatcagcatcataatgtttaaaataaatagtcatgtggttacatattatgatgcaagagaagagatatcctgggagttatgttcattgcagttgagacaaataaagtcactgagaagatatgcttcaagaatggagtggaagagtttatctcaattgtactagaaatcaagaaaggctttccatttataaaatagcctattnnnnnnnnnnnnnnnnnnnnttataaaatagcctattcaaaaccagaattgttctaaaatatgaaacggaatttggttagctgtatatttgaaagcaaaaaggagaatacgtctcaaggaaggtgtctgtgatacattaagaacatggagcaacactagagagtcacttgtacaatgagacaggatcattgtgcaacttgcatgctcactgtctttaggttcagttctctctactgaaaaaatactgtttgagattgtttgatattgatttgctctatctatttttttttttcttgaggcggaatttcactgttgttgcccaggctggagttcaatggcgtgatctccgctcaccacaacctccacctcctgggttcaagcaattctcctgcctcggcctctgaagtagctgggattacaggcatgcgccaccatgccctgctaattttgtatttttagtagagatggcgtttctccaggttggtcaggctggtcttgaactcccgacctcaggtgctccacccgctttggcctcccaaagtgctgggattacaggcgtgagccaccgcacctggcctatctttgtatatgtaatttataaagtgccctaattcattataccctcatgcacgcacacaagtatttgtaaattagcagctaagaattttgtgccatgatgccatcaagaatttatactgcgattatttgtttcttaaggaaactatcgtaacaagtaacatttttatggttagatttaaatgtgctgaatcatgcaaatatataaattatattaaaatttacttaaagaatctttaaaagtatttcactagaaatatgctttatccatattaaactaacaaaagaggcatttcaattgaatttttattttatattatttaataatatttagcatattatgtcatttaaaattttctcaatatgtaaatagttatttgtggaaccatgtacttgtttacataaaattattcttaaagtaaagcaagcgggcattgataagaaatcaagatgctgaataatccttagactaaaactaagaaacaaaaccaatggtatgggaaattgcaagtattgtaatctgtttatgtaagtagtttatattttgaaactactttggttgtatctaattttcccatcctgtgaacttctggattttttagaacaaaccttgttacttagcatttagttttggcagaagtttgtatgttagtcaaatctatttcttaaaaaacctgacatttccatagataaaagctatgaaatctgatagaatggaaaaatttctaatataggtaaatttatttgaacatagtatttatggtgaaagaggttttttttaatttaataatgtttcttgtctattcatgagccattttttgatttctgatttcatttggatatcaatatttctatagcaaatatttattttatgtccatagtataccagacagtgttgtaggccctggggatagaaaagtgaatagagtaaagcctttgcttttatggaacttaaattctagttgaaggaaatagaccaaacacaaacaaataagtacagtcattccttagtatccaaggaggactggtcccgggaccccgaggataccaaaatcagttatgctcaagtccctgatatgaaaaggcatagtgtttgcctgtaacctatgtacatccttctgtatacttaatctctagattacttataataccaaatacagtgtaagtctgtggttgtttgactcttcggatgcagaacccatgaatgcagagggctgactgtatgtggcatggcaaatggtgataaatcctttgaagaaaaataaagggtctggggataggaaatactggaagaatgtgtctagggcattactactttatatacagttatcagagaaagtctcgctggtgaggtaatgtttcagcagaaacctgaagggaatgagggcatcacccatgtagggcaggagcattagaggcaaagggaacatatgcggaaccttgaggagaatttttccttatctgctcagagaaggtgggtcaaatccaggggatgagctagaatgttctaaatcagctcttctcaaagttaagcttaagtcagaatcacttgggggcttgttaagcagattgctgggcctcaactccacagtttctaaatcactgggcctggaaagaggcccaagaatttgcatttctaatgagtttacccctgacactgctggtcaggtcaacaactggtctaagcaagtcccattcaccctctgccagtgattggtttagcgtcgtagatgtaatcctatcttggcatgagagatctaaggctacatcttcttagaacgtaggacttcaaagaaatgttttccttcctgatttataaacagagaggtgggaaggacaacccccaactcatcccttttacctaggggcattgttttatcaggatatggtgttcagaaagttgagccatattgtctaaacaaattagccaactcagagccctaacaaccatgaggttctcagatatccattgctggacttccttaattttagatatctgtatttgaaaaaaaaaaagtcattatggaaatcactactagtaggtaatctgttatttgcagcatatagtgtttgaactgatattaagtttttattttcccttaggaattttagtaaaaatagtggctagtttccaatatgtagtgtaaaggttcaggtatttcacaaatgattgcaagaaagcacttaaagttcatgtaacctaatcattaccatgatatttttaaaatagtgaatctctttcttggtgtcagtctaaaataccagaaaacactttgactgccttgccataggtactttggtggaacttatcttcactggcaccagatatagctggaaatcagtaacagacagtatccctagaagccatggaaagaaaaaaattccaaaagctaaggtatacatgtgggcattcatttttcatttgtttgataaacctaaagttgatgtataattactaaagattcatatagtctggagtttacctcttcattttgtatgtttatatcctgggaatgtctaagtcagattattatttactcagaatattacttatggtaagcaatgatgatataagtccttcctcactccctctaaaaatctttgacttcagtgctagcttgcactttaaacatgtattccaatattaagaaacaatcacttgttacaaaagagtagaagtacatgcaagattttatccaaaatccaaatacataagacataccagcactgatcatgttttgtctaatttctccattcttctttcttttgtggtctattcactaattacttgatgaagaatttgtttttttaaaagcattttcttcataatcttaattttgtctgatgctgcctttgtcaaatctttcattggtgcccttttctctgtgcagatggatgaaatgcttttgtaagtgacagacattcaaaaataacaaacatgagaagaaaaagaacagtttatctgtcaagaagttacagtaaaactgtggaagctccatttggttgtactccatgcgtttagaaactttttgactgaattcatttccattagagtcaccactggtgaacttgaacaactccacaatctccactcttaaattgcactcttgtgtttcatccctcacagaatttacaaaagtggagggtggtttaaaagcaagggtttaaaaaaatctatatttaaatgggcttcagggcctgaaatcctagtcttaatttcttaaattgtactaagatgttttatttttagtctgctgcacgttgaaggaaataggaaaacattagcaataaattttcagatacttttttaccacttttttttaaagggatggaagttaggatcaactgtggtagattcgcctagccattcagaaactttgggcagggatgtggcttttcttggtccctagggtggaattagcctggggaaagctgctagcccttctgaaaacttgtaatcagtgagcagaattttgtagtttttcctctgagtgcctgagcactcttgctgataatcacactcttttctcctgcaagggagcaagtgtgtatcattcttcctgcctgttggatctatgcacaagttgtcaaaaattaatctgatttaaggtttttcttttcctgaactcagaagggaggaaattacagaaaagtatattagtaatagagtaatagactatagcctgagggaaatgaaagcatatctaagcgaagccaagccaggaacaagtacaattttaatgaaaaatcaatgtttcatgacttagaactgacttttgttaggcactaatatttcctgcttttctgtcaacatccttatcattataaattcttttttgtttcaatataaaggtactaaaaaattaacagctaatagattattttcaacctgtttgcaaggctaaagtctctctttgcctttgaaaaactggagtagaataaaaatgttatattaccacaatggatttaaaggctaacgagtggtcaaattgttaattattcagaaatttcttattgaaatgaagaactgtctggatggactggactgtaaagttcatgagggtatgggtatcaacctccttataattgtgtgtgcctgatatttaaaagatatgtattaatctctttggaatggctgaattaattaatattgttattcagaatattatttagtacaataattcataattattcttttcaatgccctgaagatgtatcagtgttttttcctgctatattttaattttattgacataatttagaaacaatgtggagtggtcatttttcttttaatctaatacagaaaaagataaaatgtttatgaatagaagttctgcctttgcttttgctcctgtccccacataccctcttagaatggacaaaatacaggaagaaaacttttacctgagttcttaattttatttacatcttacattaattttcacctttttgtgagaaaaataggtttaaaaagtagttgattttttaaccttgcctccacctactagatggagagtattgtcattactgtaaatagaggaaagaaatgatatagaagcccatgacttcaagaagtttatggtccaactcatgacacataaacagatctgaaaaaagtaaagtctaggtaaaatacctcaaaaatgtgtgtgtgtaatataagtatgtatactatacgtaagtattctactaaagagataggaagttttcaagaacagcgatgatgacttgtggaaaatttctgagaagtcattaattctcatctacatcttaagaagtcagctgaactttcaactgggactgggtgtaagcagaggcagaaaagttgtaacagacaggctatatgaggattttccccaacaaatttattcatttattcaacaaaaaattttaaacactccctgtgtaccaggcatgattctagatgacagcattaaaatgnnnnnnnnnnnnnnnnnnnnnnnnctatatgtatactatatatatatacacacacacatatatacaaattaagtaatcaagatagttttgaagttttgatacataattcagtgaagaaaaaaagagcagtataatgtgattttgagtgagtttcctgagtaaaactaattttgaaaggatttcggataaatcctcactgagttgatgtttcagctgagacttaaatggaaaaaaaaaattagcctgtcttataagttgccagaagagcttaccaaggagaaggaacagcagatgcaaaggccttgatgttggaacaaactttagatattcaaggaatagaaaggatcatgaaggcctggtaaaccatggtagagaatttgtgttttaagtgtgaaggagagccactggagcatataaacagggaatcatgatttgatctgtgcttttaaggatcactctggatactccatggagaagagattgtaagctcctcagagtgtgtttagagcacatactgctgcaatggtggctaagactaagggagtggaagtggcatgagagagaaatgggtgtatttaatacttttagatacagatacatagtacttgttgatagattaaatgtaatgtaggaaggaaaataaaatgaagaatgataggtttttggcatgtgcgactaagtggatgagtttgctatttcatttggttttgtgacattgtgcaaaaaataagctctttgaaatctaagtaagttgaaatctatgacttctttcccagataggatgaggattgaaaatgttggatttgatatagtagaaaaatctattgttattagaaaatagaattatcaaattttccagtttgagttacttagcattatatattccaaatattttcctagtttcttttgtaggcattttagggatttcaaaagcatttgccctacttttgtaataaactatttttaaaattaaaaaacagtgcttaaatacacaaatctgtcatatacagaatactaaaaaatatggtcccttaaattttgccataaagtttctttattcctgaacagatgtaaaaaaaaaagttttcttctaattcttttatatgtataacttgaaattgcaatgttagttactgagatgatagtgtgtaataacattcagattctatatattgataacatgcaaacaaatagtacattaaatagtttctataatatcacatctatctttctcttttttttttgccccttcaagcaacaaaatgcattatttttaaccctatgcaaccatctttcttaacctttggtttcaaatttagaacacttcttttcactgattggctttatagtatgatattggtcataagtgaatttaaacttataaagttattaataaaatagttatactccatttcatatttctttttcaaaatgatttcatactaaaaagtttggaatccttgacctaagtcaatgccctcttcctatggatgagaagactgatgtttattgatgatttgattttctgaggcagtacagacagttgaaagtgtgggaacagaaatcaattccctctacttttttcaatgcaccacatttatttcacactgtccatgtagaatcatcagttaaaatgataatatatgttcaatccctattttcatatcaacaagaataatatgagtatataattaccagaggtctatcgtaataatttctctaatgtgtttaaagaacaagccagagatttttatttgatagagtatactgatagcatcaaactgaggatgccatttgtttattagggagaattttataatttagagtttttttcaaataatatcaacagtaaagtctaaattacttattgcctttaattctaggaatgtcgcattaagtgactaatgaaacggaaataactactgcccatgtaacttcataaatgcccttcatagacatttatgtcagagcaaagatggcaaaatacttgataatgacattatctccccctcacaacctttattttaatgctgtcaatcaaaactgagccagttaacatttctagagaataatattttatcaaatagataagttatttgtaatcatgataattcttggttggggcctctgtgataggctgaataatgtccccccacaaagatgtctacatctaatccccagatgctgtaaagatgttaatttccttggaaaaagagaatttgcagttgtgattaagttaaggatcttgagatggaaaagttattctgcattttccaggtagatcgagtgtaatcacaagagtgctgatacatgtgaggtagcagaatcaaaggcagagaagggatgtgatgacagaagcaaaagtgggaatggcctgctttgaagaagactggggccatgagccaaggaattcaggcagcctctagaaactggaaaaatcaagaaaacagattctctcccttgagtctgtagaaaaagaaagccctgccaacaccttgattttagtcccataagactcatttatgacttctgatctctcaaatatataaaatataaatttgtgttgttttaacccacaaatttgctataacttgttatagcacttatacctaatgaatacaaattctggcacctgcaagtgtggtcttactgtaattgatatctaaaaacatgaaaatgactttggaatcggacagtgggcagaagcttggaagaattttgaggcatatgatacacggcctaggttgccttcaacagactattagaaatacgaatgttaaagtgtgtgtggcaaaggtgcagaagaaaataaaggacatattggaaactggaggagaggggtttcttcttaggtggcagaaatttagctgaattgtgcagttctggggaaagccaaatttataagttatgaatttggatatgaggtaaggtgatttccaagcaatgttgaaggtgtagcctttccagacacacacacaaatgtatattatatatacacacttttataaaactatatatatagctatatatacacagacattaacacacaaatgtgtattacatatgtatacacttttataaaactatagatatataaaactgtatatctacacatacacagtcacacatatacacacatatatatacatatataatatataatttgttggtattatcatctatatgtagtggcagttcaaccttcactttgattatgaagtagcaaatgctacagaaaagtcttaagtatttttatacttagcaattaaaaacagacctttatattgaaactctacatgaaaaggattacattagttttattgcagtattatggtaatatgatttctgcctcttttttctatatttatccaattgcagggaaaaagtattaaaatccagtttggcctcattgaagcacatttgcagagtgttatagagcattggtttatgactattgccctattatagacaaacaaagtattctttatcctttatcagtgtagtgactgaaattatgaattccattcagtttttaatgaaatgtggattacttcaaagattatctatctgatttaataaatgcattagagtagaaagttaattggatctttcttgaatgaatggtgaccactatgtgtgattcataggagggaaagatagaatatgatattctttgagtttgttttatgtgtttaaaacttttaggttagaaaatcaatttttgtgtgatcggttttctcaaataaattatgtaacccctattgatcttacaaaaatcatggagaaattttaattcattttaaaataaaaatatcttaaattttgtaaaaatgggttattaaaaaatgccatatactgaaacacatgtgtagtttattgtgtttttagtttacaggcagagaaaatgaattttaccccaaacatctgcatagttctagatttgccacctcctgtttttgacacagatctcaactgagcttctaattttggaatcttgttccagttcttatatttcctattctgtattcaagagctcattctgtattaactggtaaagaggttatcatttctgcttggtttatgtagacactctatattcttcattgtttaacaaaatatagaaattcaggtgcttgcaaatatgatggtagaggtgacaaagtgatactcatcacattttgtatatcgttagtagtggcaggaagagccttacagtatgagtattactaacccttacgtacaaatacagattatcttttcgttaacaatgttactctttctgagagatgttcatgtgagagatgttccatattttcaattcaaacaatcttgtaattgctggctgctgctgttgttcacagcacttggctttgcatctgtgcctcttacaattccagtcttgccctttgtttgaggaaacttcctggttcttgtatacctcctgctttcttgatctatttgctgctgtttcccaggtgaaaacccaactgggctatgcatctgaggtagggatggtttcactgtcctagcacatctttcctctattcaccctgatcaccatcatcttggttttgactcttatttaaaaaaaataaaataaataaaactgctttgtattatgcagctattatttttctgacaagttcagccactgtggagacagtttgaagtaaatgtggctcattgttggtggtctaagaatgtctaaagactagagcaaataagaaaatgttaatagagagaaggaaaacagaggataaaaattgaagttcctaagaagtatgtagctaaaatttcgccttatctaattcaggcattttctcttggctttcccagcacagtacttcttagcgatgataacaacagcaaccactttattaatttgctttttttaaatttagaattcacatcatcatggtaacaacaaccatcccttgaatatgtctttgttagttgcttaatttgctacacctaactcttccaccaggcgctaaatattgggactattggccatccattcagaaagtattatgtgcttcctgtctgtaatgcactaaatcagacattgtgctccaaagaagagggttgtaggagggaaggcatcacacctgtatgcagttactatgcagagcaggcttgggataaaaatagacattggccacatctgtgttaaatcatgagctgtgacccttctcatgacagttccccagctctgctaagacacgttctttggaagaagttgcttcacttttcatttgggtagaatatttacagtccaagtaatagatttcctataatttagaatttactaatacttcctttaaacaagtatatgattatccaaaatgtatataggcttttttgattccagttttataaaacaaatcactaatccaatgttgtgttttaaatagaaactttgctgtatgtaatttcagttggcattcgttatatatttacttaatgtgggcatttcttttcagacttatttatgaacatagaccctatctgtatttctacgtctacctgagtatagaaaaatacactgttttttaaattgttatcctaaaatagtggtctgaagcttgcatttttgaacttaaaatagtgtcttggacttattttcaagtaagaaaatataagtattccatagcatgagtatatgtttaatccttcctatactgatgaccatttagtttattcagatttcttgggattacatgcaatgatgcaattaacatccttggttaagatctttacattctctgttataggataaattcctagaagcaatattgtcaggtcatataatatgtatacattttaaataattacagccaaatcaccctcagaataattatacaaatttacattccaaacaatatgttagaatacctatttctccatatccttatcactactaattagtgccagtctttaaaagtttcgcttatgtgatgggcagatatggttaacattttgtgatgtttcatcataacatgattcagttaatgataacactgcttgttgtaaaattgttgcatgaagaatgaagagacagttgtaaaattgttgcatgaagaatgaagagacaaacgcagttaactgttcaacttgtgtggtgcattttgttgcactttgaaaaatgaaaaaaatcaaacatttaaagtttttttattgatggctgctccttaagaaaagcctggaaatactttagtttgctttggaatgtctttaagtgcatagtggtcctgtcgcatttcctgagctgcagtagattctaaatcatcttgatttaagataggcttttttgtaatcactgacagtctctgatttcagaattctgcagacattgtcattgagtggagcagtatctctagaagttataagaactgtactttttgctcttaataaaaagtaaagtgtgtcaaaataatcaaagtggaagaaagcatatgtaacagccatacaaataaattgagattcattagataagctagttggtagaggcaaatgtgaagaatatttttaaattcactactaagataatttttttaaaaaatgttaacttaaagttgctatttttaaaatttgcataatgctttgaagaatgacagtaagacaaatgtcatcacaatcataaaaaatgtgtataaagtacattagtattttaaatttctcctagaaaaaaaaattgctgcatctcttccaagatatataaccaagttagaaaaaaaagttagataaatatgcgtattaccagttaagttcagtttgacttctgcttaccagatgttttgatagaagtctttttcagtgttcactatgatgcctgtttctcacattgctgtgaaacatctaagctatatatactgttttttgataaataacatatggttttgaaaatcagtgttaaaaccacatgaaaatttttaaagtgaaaaattcagttttactctcaatataataattgttttaaaaatctttaaaaaataatgttaaatttcaccatgatatgtacagctgtctaaggagtctattacagggacaaatagaagaatgttatacattgctcaactcaggattacttccttttttttagttttagaagaattcagttttagatttaaccaaataaccagtaatgtatacatctccctgatctgttgtcatgagcacaaaatttatttactgacatgatgctaagaggttttctgcagatactccaaatctgactgggttttgctccatttttctttcactaatcaagacttcagtgaaataaatacatagtaaaattctaataatgctagacttatttcccaaatgtcttgatgttaagtgaataataaactccagatctgattttgtaaatattattttaagatatgcattcttaaatcttgataggcagatgttctaggaggctccaagagagctcaattgggtaactctctcagaggactgacttgctccatatttgcatcatacttttgtgtggtttcattcacaggcacagttgcccatcgtgcaggatatcattaaatgacctaaattaacttttctgcaggaagtggaggaatctcaggataggagaatccagttttaaatacccctgagacttaaattgattcagtcttaatctgggatgactcaaatgacttagtatataatgtctcttgtttctctaaaagagagtctctcaatgacagaggcctaagtctggagatcaagtatgtagtcctgttgactgagaacaggcagaaaaatctgattaatccaaaggaaaaaggcgagggaggtggcagcacagtgaacagatttgcacccaagcacaactaaaagaatgagttagggagggcggggagcggcggcttgtggctgtaatcccagtactttgggaggccaaggcaggcaaatcacctgaggtcaggagttcaagagcattctggccaacgtggtgaaaccctatctgtactaaagatacaaaaattagctgggcatggtggtgcatgccagtaatcccagctactccagagactgaggcaggaaaatcaattcaacccgggaggcagaggttgcagccgagatcgcaccattgcactccagcctgggtgacaagagcgaagctccatcttaaaaaaaaaaaaaggagggaggagacggaaagaaatcagttcgtttattttcaaaatgatcaaggatgaatggtaggttcctttacaatttttgatgtatctatttttttaccaactctttattttctttatttatttcagtattttagtttattaagtacttgcagtgttattaaacatagactgaagaatggaaatatgagtaagatatgtgtattaattttaggacactcacatcgtagtacttgtccatgttcctttttttgcctttttccattgatgaaggttatcttctctcttgctcatggctaataattatcactttttctcttaacaaattattttattgttgttatcatttcttacctacaaagttactattctctgtacaactctgttgctagcaaccatcttacaatttggttatccataagaccaaattttgtctctaaaacatctcctgggtgtagctgctcccatgaagacaatatagctacaatggagtatgaatccatataaaactcagtagtcttattgggctcattctctcacagccctgggagaagccttggttgcctgtgtctctttctcatattttgaggcatgcttatggaacagaggtttcccaaccctattcagaccccaaatataacaactgtttgtaagaccctctgtactatgaaaaagaaaaatccattccattccatttaccaacatacgtaatttcaaaagataaccaaagttacctaactttaatattaaaaagagctaaaggaactaaaacatatgcttattgcctaaactgttgaacacaaccacattagaagacagaaagaatactctgatgtttgccactattctgagaatcaccaaatgcaactactaattatgcagactgtcctgtagatctcaggatgtctatcagccctgccctttcccactaaatattatagagtcttaatctaactgggagacccaagtgtccctacacatttcctagatgcctccagaaggcactatctgctatactgagaaccattgctatagaactttaccttcaatatcacttcttatttgtaatgtctgtccctggtggctctgtagaagattttgctctcaatcttccatgagcaaatagaaacttggaatttttttttctgtttcctaaaatagaatacagatatgtccacacttggaaatatgatatatttttatgagtatatcttcaagtggcagatcataaggtgaaatcccaacttgccttatattgtatcattaccatgttgtcgttttgtgtccagatgacattggcagtaagcagcgaaggattcagtaatgttttgataaaaagagcattaatgtaattatttatttatttatttattttgagacagagtttcactcttgtcacccaggctggagtgcagtggcacaatctcagctcactgcaacctctgcctcccagtttcaagcgattctcccacctcagcctcccaagtagctgagattacaggcacttgctacaacgcctggataattttgtattttttgtagagccgggatttcaacatgttggccaggctggtcttgaactcctgacctcaagtgatctgcctgcctcggcctctcaaagggctgccaggcttgagccaccgtgcccagccaatgtaattgtttttaatctgcatcatcttttgaataaaaagacattttaaatatcagaaaatgaccactgtctaaattttctttaaccagcataaatggatgtaaactaagtagtttgcaaattttcatgtctgtttcacttttatctttctccttggtaatatgttttctgacattgctgtgaaacatttcatattacttaaaatgtgtatctttaacagatttttcacttttcagtttaaacatttcacacaatccacacgtatttattaaggacttatatacttgacataacaccaattgatgtttcagtcatcaaatcttgaacacctacttctgattgtctaacccttctttttcaaattaacaacaaaacaaaccaaaacaactgtctcatacaactactccattctccaaagagaagttgtaaattataaaactttaacagtcttattttttctttgatggcctacttaataaatctaaagggactataggtttacaaccttggagtgttgcttttgatttttttccccctgtatcagtccctaaaccaaaacatttacagtactgtgtatatttaataattttgtactgactgcatgaagatataaatgtgtgaatgaatacagcttgttaaacatgcaagtatatttcttcaaagaagagtttacggattctttttccttagcaaagggaagttgtattaaacattgtggtggttgaaatgctgctaatcaaaaattggtcatcgatttgaatacatcttatagcttttctatcatgttgttggtttatttctgaaaacacaagggagaagttgattgggctgccttagctgcctttttctatggtgacaggtgtttagactttaatccctctaactgtgcacatagatgtttctggtgaaaagaatgtactgccctttgtataaaaaacataataatgataataatgtaagtttgagaacggtttagtctacacagttattgacaagaggtacagcttgtactggaggaccagtctggattcaagaagatggtcctaagtgtaccgaagtatatcttttcgtatgaagatataaagaatagaaatatgagtggtatttgaggtgtccgcatcctctttggcactcagaggactctaatcaaacccaatgttgtgtactgaactattcctgacttgtgaaattcatcttttatcccctactttaactttttttttttgagacaaggtctcattctgttacccaggctagagtgttatagctaactacagcttccacctgggcccaagaaatactcccccctcagtctctcaggtagctggaaccacagacacaagccatcacactcagctaattaaacaattttattttttgtagaaactagatctctctacgtagcccaggctgatctcaaactcctgggctcaagcaatcctctcaccctggcctctcaaagtgctgggatcacaggcatgcaccactgtgctcagctaccccaattttaccttttaaacacaaaagctttcattaaatgtaaagccaccatttcctttgactttcaaatccatgtatcagtaaaataaaacaaaaatttatttgaatgcaataatagcagacatatgctgttctaaaatcctcagaaatctggcagtggaaactgtgaagatagttatgatctcatgaagtttgaatatagtcctaaactctttggaatgagagatttgtcagctggattttcatgctctaaatctgacttcaataactttcactttctgccaagatgtatccattatacctcagtatctcctgatattctccaataaaatccactgtcaaattaaaagcttagttctgtcgtttgtgccaggccccaagtgctacccttatattccaaaatcagtagcgctttttccaagttattactcagggagtataaccaactagaaaaaaatttagaaatactagaagcatgttctcctagatttcctacatctatccctaccaacttcccaaagagccctgtagtatcttcacctaccttcctatcagctattcagacataaaaacagctgctttcttcctgggaagatcacgtaatttagaactggcttggggtgtacctctgggttaccaaaaatgattttttaaaaatatctgtcattcaagaaaataagatctggggtcaggtccaggcaatattgtcctgagggtgcttttcttcttctcgtggctgatattcccgcagtgacatatgatataatatgcactaagctgatactgcttcagtaaccatgtctgtgtctgtgacaggtgctactgactcctttcttcatgttattgatctaaaatattttttaaaatgtagaatctacaaaaccctggaggcctttcatccttggaagctggaattattgcatcttttcatccttcttaaagaggggaatgttttcacccttacagttaagttgacagttcatatgcgatgtttacttgactttttatatctggttacaataaatgtataggctgttaacacataataaataatgactcatatatttgatttaaaatttcctggattatctataatcagaatttagaatttctctcctagaagtgtggcgagctgaagctattagagctgtggcctttacaatcctttaacggaataacccatctcctgttgctgatctgaaccgcataactggctaaactagtgcaggcagcatgattcttcacacacaaccagatgccagaaagaagaaaaccacaaaggggctgaaaaacacagcatagagcccagaagcaagagggtaaggtggggcagaaaccaaccagcagtgattggaagggaagattaagtcaggaggcagggctcaaagggcatctgaaggtgagaggcagcagcccgaggatgcctcaggagtctgcgttgtacaagaagctggacattagagataggtcgcaggtcaaaatcagatagaattttgcgatcagagcagacacagcaaaccagaagcacttgaactgttcaaatagcaccttctttccacagcaagtccttgctgttgtgactgcgaatacactggtccactgaagcctgtgacacttgcaatttgggagcttatcacagccggaggaccctgacacagggtgagggtgcaggaaagacaggacatgagattgaggatgctgactcagacaggtcactggaccgttccagtgtttttcttacagggaaagagtgtaggaggcagtgcatctctttgtctttgtcacttaacttttggtgttctttaaactgttctaaattagttcaagatctacaaattgaaggctaaagaagggaggataaataaagcccagcccaagcagttttgattgtagaaacatttggaagtatttgggttgttaggggaaaggagcatagctgattttttttaaattgatttggagtttggttatttgtcatttactcattagttactttcctccccaacaataacaacaaaagataattaccatagtctgttcttacatgaaacactgagaaattttatgtagacattgaaattacttcatcagtttcttctgtgaatgattcatttcacatttcccagtcttatgtaaattactctgcagcatttatatagcattagtgtcatgcaatttgtatcattattgaacatttattttcttttcaaacaaagtgcaaagtgccagaggatgggaagtatatctttagctgcagtttgaaagaaaatgtaccaagcttggtgtcggatgacctgggttctacaaagcagtcgtgtacgtttagccaaatcacctgttcaaatctaggttgcccaaactataaatgcacttgaatgagtgatttttcaagaatgtggggcaaaatgaagtcagagcattcaaggctgtggtatcttatttctgtttcagctactgtgtctgtgctctcagtgtttcatatattgggtccctacgtatgattttattttttaaatttctactgctaataaaagtttcacagatgtgatagtgtccagtatttctttcaaatttgaagtttcatttgatttaatcattttatctatcatgtcatttagtgtaatttttgaacctagtaagtgtctaataaatatttgctggggaaaaaaatgaatgctatggttcaatcatgcaatactcagatgttcgtaaccatttccatgtgaaaagtttagtataggctgtagagaatgacattttagacttttgaggggaattatttttatgtcagcttgaaattcttcttgaacttgatttctgacttgggggaaaaaaagcaagcctgatgtgcacaagctttatacagagaatcaactgtttttaaaagaataatccagctgctatctgatcagccaggtaggagttgttctgtggaaatgaagaagccctccattttcagtcagagtcacgcatataaaggctttgataagattaaaataatccaagaatgcaatttcaagatgcacagctagaaacagcaactaagaaatatccatatcttacaggacacagctaagggaagagtcaggttttaaggaccgtctacagataatgtcaggatgtacagataaatatgagcaactgctgattgagctagaaacactgctggttaagttataaatcttatgatttttacccttcaaaatgcctctttccttgctgctttatatttttttaaagagcggagtatgttgtcacttggaggttgtgctgctttcctgtgactttagtcacctttggtgccctggccagatcccttttaccaagcctgtaaaatgcccagtttccgtcagtgttagctgctattggctcacagcccccacttctcttcagaatcacttgtagctgaaaaacatttactttgccaaaccttatgtgcccatctcccagcactatcagctcatatctgatgactaactgacatggggaatacaaaaagccagtgccctcacttcattaggtcaactctggggcaattcatgctctagtgctccccgtgacatcaggctgaagttagacttatgctaatgccacattctcacttagctgctttccctttcctaccctactttcctctctccttttcatctgacaacactcccttaataaatcatgtgcatccaaatccttgtcttaggctctgcttctagggaacctaagcagtgatatttttgagagtatagattctttcttcttttatctttcatcctcaatctccagcacatctggatcatgatgctttacaagtattttgaagagtaagcaaagtaagaaatttggccttcatttggtgtgttagttagtccttgcattgctataaagtaatatgtgaggctggattattattattattattattattattattattattattattattattattttgagatggaatctcactctgtcacccaggctggagtgcattggcactacaacctctgcttcttaggttcaagtgatttttctgcctcgcctccccagtagctcggattacaggtgcccgccaccctgtccagctaatttttgtatttttagtagtgatcgggtttcaccatgttagccaagctggtcttgaactcaaatgatccacctgcctcagcctcccagagtgctgggattacaggtgtgagccactgcatgcagtcagagactgggtagtttataaagagaagaggtttaaatggttcatggttctgcaggctgtagaggaagcgtagtgctggcatctgcttctggtgagggcctcagggagcttacaatcatggcagaaggtgaaggggaaccatgtatcacttggcaagagagggagacaggagagggaaggtccacactctttaaacaaccagatctcacaagaacactcattactgtgaggatggcaccaaggcattcgtgagagagccaacccccaaaaccaaaaacctcccaccaagtcccatctccagcattggggaatacatctcagcatgagatttggagggcacaaacacccaaactgtatcagttgatcaagaactgaccatggaagatggatagttgaagtcacaagcagtccagcacaattctaaccttaccatgaatctgaattcttagctcactaaagatttaggaacagaattggggagtagaattatggtcatgtaaaaatagagtccgtttaacatcctaaccttaaatcagaaaccatcaaagcatcatatcaacaaaaaaattgttttcacttatgaaaaatatgaatattaacacaattttgttgcacacttactctctgccatatgtcttacactaggcattgagaaaatactaaaaatacataggatatgttccatgctctcaagaagttgtgaattgtgaaagaacctgatagttgaagtaataatttcatgcagtgtgcctaaacatgaaatagaattccatacaaagtgacatttaaataggtagaaaaaccagagaccatatccacactggtaacagcatgggcagaggtttgcagttagacatgaaagttaatgcagtgttcaagaatatactgaggagttagtaagaaattaggctaaaatgtatgttgatacagatatgagaaagggctgtaagactcaagattcactttatcttgagggcagggtggcagctatcaacagtgctaaagcactttctcttccactttaaaaattaaaacagtgtggtaaccttaaaaggtgttctgaaacaatattctaagcaactgttatcacttttgctttttccttttttttatcaggtgcttacttaaacatttctcataattgcaaagattgtgacttgtaattatttgtagttactattttaccatgagctttacccacatttttatgtgttttaattttaagtggctaaatattattataaatagtgtgtgcagtataatttatattcgtcattttcattttccctgaaatctttgtaggctattaagaagaacaatgataggatcatatttaagttttagaaaaatgacaccttaaaagctgcaggtagattaggatgagtaggacttggagtcagaaacttcaataagggagtggctgcaatatagactaggaaagaggtgataccaacctgtcagtgtcctcatcggtaaaagaagatacagctgggcacagtggcttatgcctgtaatcccagcactctgggaggccaaggtgggcggatcacttgaggccaggagtacgcaccaacttggccaacagagtgaaaccccgtctctactaaaaacaaaaattagtcaggcacagtggcacacgcctgtagtcccagctactcgggtggctgaggtaggagaattgcttgaacccaggagaaggttgcagtaacctgagatggctccactgcactccagactcggtgacagagcaagactctgtctcaaaggaaaaaaaaaacatacaacaagcctcataagtgcttgtgaaagctaattgaaataatatattaaaagagtttggcatttagaaagctctgaaacgatcattcatttaacagaggaagctatgaacattttttttttaaaggtcagtttgacttttaggcacctgatttcctgaaggactctttgaactctttgaatgtgggtactgttttatgcattttcatgtgataactaaacagcctgatttacattcttgcccaatatacgtatttcttcaaataatgaactaatgaattcccgggcaataaataccttttggttaaatggacaaacagttctgttcagtgggaaacatgctagtagagtctgcttttaaaggaattgctgtatgcagtattctaagaaataatgaggaagtatttttacttcaaaatactttgatcataatatgatgataggtattttcttctcttgcctgtgaaagtgtgtgttaggtatgtacattatggggccaaactagtgattgttgctaattaggatatatgtggcgcattctatcaagaatcccagttttctgggcactgtgagctgtaagtcaagtcataaaaaggagtgaattgtctttttcatatatagcactgaaattgactggagttaattatttaatgcctacctcccctactagactacaggctgtgtcacacacctccctcagcatctagcacagcaaatggatttagtaatatttattgaatagattaagaaatacagagtgaataaaataggacactggttggagtgttgggtcaaccacaattttggtgtgatatattctacatatcacagtgagaaggaaaatgatataaaatgaataatatcctccttaaagtactatacaaaaagaatacttcttatattttttcaagatgatgtaatcttgtcaaatatataatatgttgcatgccagtgctttcttaatccttaatagtaataccagtaattgtatattaagttcctgctatgtgtcaaatacttctaggtactttaaatgtatattcagtaatcttcagaacaagcctagagagcagaatttagttatttcattgtaaagatgagaaaagtgggtctcaaaaaaagcagataacttgtcccagatcacacagtagtttttcttggtacctggagtgattttcatccctctttcaaatacaaccctttggctattgggaagtagctattacaactgtattttttctttaacttgatgtaagggaaagaccactttacacatatacaaataggagaaagttttgccagaccttctgcagctagtatttacatgagtgagtagagaattgtaagaggttctggtagcagtaaaaacaaattacaaacaacggaacatgaagagaagatgttgtctaccaacatctgtcaaatatggcagatgatcttctttgtcttattttgttcaataccactcaatatcatcacttaggcctctctctcttactgtttagatctcttgggattctcttaattttttaaagcctataccttgaaaaattctgtttaaaaatacattggaaagcatatagattttagtaggctgaataatggctactggaagataccaggtcctaatcccaataagctgtaaatgttatcttttagggaaaagcggtctttgcaaatgtgattaagtaaaggatcttgacaaggtagattatactggattaacagtgtgggccctaaatccagttacatgtattcttataagagcaaagcagaggaagatttgacagaggagaagtcaatgtgaccacagaggtagagactggagtcatgtaaccccaagtcaaggaatgccagcagcactggtagctggaaaaggcaaggaatgagttctcttctagagcctcagcagcgagggtaaccctactgacaccttgattttggcccagtgatactgctttggggccctctagttcccagaactgtaagagaataaatatgtgtggtttttagccatcaagtgtgtggcagttttctgcagtggccttgagaaactaatacagacatagaaaattattttatgactttttcttttagatgcagttgttaagtcagcatttgatcttatttgagctagatagaaccagggttttctaatctacaaactattgattttcatcttgatttaaatgtgtttacttattcttcctctataaggtaggacaattttgcaaaagatgtataagaatgtgtgtctcctttcaggttcagctgaaataatcttcatataacaaaagttagagaaaacaatctgtctgagccagagacttcgttatatgaattcatacaaactaatgaaggaatacaaaacttggcctcacagggagagagtggagtgtcttatgcaaatctttgttgtcagccacattcctacatgcagaatgcaaaaaccatgtttcagtttgttgaggatttggaaatagcttgagataatcttaatttaaaaggactggcaaattctttcagctttgtagaatttattccacatatgtcaaagacaaacttgttgtactgcaaaataaactagtactgtgtgatcttagttgaaaaggtaaatattacaatttacattctattctctcatattcattcttttggtacatgttaataaattgcaaaactatattgctgaaaaatctaatgatcctgaaaaatctaatgataaattctagcaattatcagtgattacaatataggcctggtttgttgttgttgttgtttttgtttttgaaaaggaatcttgctctgttactcaggctggagtgcagtgccacgatctcggctcactgcaacctctgcctcccaggaggttgcaattctcctgtctcagcctcccaggtagctgggattataggtgcctgccaccatgcccagctaattttttgtatttttagtagagatggggtttcaccatgttggccaggctggtcttgaactcctgacctcaagtgatctgcctgcctcagcctctcaaagtgctgggattacaggcgtgagccaccatgcctggccataggtctcattttgtacactaagaaaatgtcaaattactaattttcatacttagtgctaaatttacatttatcataaatgtaaacatgtaatagagaaccagtaattttttattttccttaaaaatgatcctggtaaataagagaattgattcataagatcatggtttgttgatgccatagcaacataatcttatattgagaacatcatctgttacaatgcaagtagttgtggccatgtgcctagaatagacttagttattaaagtacattgtgatatgatagaataagatttgtccagatgtttacagagctcttacaaggaattattttagtctgtttctaaattattttagtgtgttcatctgggttgaaatgttatgtgcttaaaggattgagttactgtgatgacttggaatatttaagtagctttgaattgtgcgggtatgttaaatgcctgtttgggaaagaaaaataatatgagtgaacagagattaaaatttgtgaattatctgattgccctagagatgtctctatttgagtttaaaataagagattggcctggtgtggtggctcatgcctgtaatcccagcactttgggaggccaaggcaggcagattgcttgaacccaggagttcaagacaaacctggacaacatggaggcacctcacctctaccaaaaaaaaaaaaaagaaagaaagaaaacattagccaggcatagtggcatgtccctatagtcccagctactccagaggctaagctgggaggatcgcttgagcccaggtgggtgaggctgcactgagccaagatagctccattgcactctagccctggagacagagtgagaccctgtctcaaaaaaataaaataaaataagagatcgaatagttctgttttaaaatagtctaggtgagaaatgatagtttggttttttttgttttaatcatattgtttaaaagaatacttcccagcagagttttattgggaaaccacaccaaaataaggaacatgctgggggcaaattcagtggtgaacataaatctgaatgttaagaagacaaaggaggcaacaccagctccagggcagaaggagagttgagaaagttaggaggggctgacactaccaatctagcatccagagaggtttgatgaagaaaatttgactttagggagttgtgaatttaagatcagaagtgatttatgcgtagaaaatgatttctgtcatttcacctgattcttgtaacttcagcttgaagtttctaatttcaagaaaattagaaatcactcgtcagctaagatttggggaaaactgttaatagtcacatgtgatgttattaacaatttattggatagctttatcgatcctgtttctcaaattatacttggttttacagattttagcctttggtttgactcttcttttgccccatttttcttggctgctccagctccactgctgagttcactacaggtcagagaactgttcagtatttttaaagcagaaaatgcggtgaggatgggattttgtaatgtaagtttttaatctccgtatctgagcattttggttcgtgcagtgatcccaagtagctgagatgaggcaggctccagtatcttaacctactaagtatgtgtaaacttgatagagaacacaattttcctttaaatatcttagctctctagtctctcaaattgtgaaaacatattgggggcagattgtgaaagaaatatgttcataaaatataaattcagtgatatccatggaaagagcaaactcagagtgaggcagatggaagaggaataacttggatcatccaggtgggttaggtgttccaggaaatactgaggacccccagccagctgtttgatctggcaatactggaggacggtgcctcagcgatcccttcaaaatcaatgaagatttttcctttactccgtaagctgggggtcattgacagtagttggactcatttggagtgaggtgcatagaaactggcttttaggaattcaaaactctcatggaatatgtgaaccacttggattcagtggatttgaaaataatcgaaaaagtaaatatactaaaggtcaaggaaaaatgaagtcacttgcttaaaggctgctgagtattagattttaagagaagaaacgtaagggaccaaaagttttcatggcaaaaagacaaaacaagcacccctctgtcccccgaccttccagccccgctaccaacacacgcagtgttttatgaagtggtcgcaggagaatctgaagcagccataaagaagaaaggagtatgagagatccaactgtgccactaacaggcacttaatttcttctgagaactaatttataccaactactctagcttttcaaatagcaagcaaaagccaatttgcatttacattgtaaaactctgttttccaaacagtggcgtacagagtgttggtggtcaaatctctaatgtaagcgagggatttggggatcaaatatttcctgaattgttactctttgctagagagtcaagataggcgctggtatgtaccctccaagaagaaataaatggaaaacacacacaggaaacaaacctttataagctttcttcaacattatctcatataattcttagaatatatataaaagaatattactactacattttatagacaaagaaactgagattcaagttatgtaacttccccaactctatacattggtgaatggtcacttcagaaagccttgctccttctaaaactccagcctacctctattaggctgtgatttaaagttcaaatgagaaacacagccaacaagtgcagagaaattccgaagtcccttgggggattgagggctggaaaaggctttgtggaagagatgaaactttctttctttttttttgagacggagtctcgctctgatacccaggctggagtgcagtggcacaatctccgctcactgcaagctccgcctcccgggttcacaccattctcctgcctcagcctccctcccgagtagctgggactacaggcgcccaccaccacgcccggctaattttttgtatttttagtagagacagggtttcaccgtgttagccaggatggtctccatctcctgacctcgtgatccaccagcctcggcctcccagagtgctgggattacaggcgtgagccactgcgcccggctgaagagatgaaactttcttatcaaaagggtccaatttagacaagggaagatgttgagtataaaaaggttgattatctagaattggacaatctatagcccactgaagtattttgggtgtgtttgttagatactttgagaattagaaattgtgaaatgtagttattagaaaattttagacagccaagaaccatttaaaaataaggctcccatcttttcattcattcactcaaggccaaaaaatattttaggattaaaaaccaatctcaaactctaaaatatttattaataatttagactttatactaaattatcttggaaaagctagagctcaactaaaatcattttttaaatctggttcatctgtttaatattaaggcagtctctaatttagtaaataaacacctctaaaaattgtagtgcaacctctattaacgtgatttaaaccatgttgtgtattctcctgagatatgccagattaaggaattatcgaagccttggtggaaaatgacctactcaaaatgaaaatggaattcataactaaaagcatcccaaaaaacagctagtcttaacccttcatttcgtaaataagcagagtgggaataggtttaaaatgtcgaccatctttactattttagatcacatcacgttcttataatttgagcactagtaaaggttttatttgttttctatttctttctctaatattcaaatgtgattttgttcctgtttgtgctttgaatggcatgtttggatgactgtcccagatctggcattctgagattgtaccactaaaaatgtcaagtgcatttgccttttaattacatacagtacctggattttaatattttagatttttccctgaagaagagacttttctggtcctgtagtttgtgggagggaaaaaaatatcactgacattatcatgaagctttttcccccaacgtctccatatatccacatttatcatttcagaacaatttcattttgggtcaggtttagttgttctgtagcttactttgctataaacactatgtttaaatatataattccgcactgtttgtttgtacttctttctcttatttcccattaatgttcagctcagcttgttttactcttaataggccattactacttggatgtcacatatgtaataatcagtatgtggaaggtatagtttcttgtgatttacactcctttccttcctttacctttggcataaatgtgaaccagctcattactttccagggtatttctttttttacttccccaaattaaattttaatttcatcctattgttattctctgatttttattatttcaggtgggcaaaaaagtcttatttgtcaatgaaacaactccataaccactgaactcccttttgcacctactacatagacaaggtacttaaagcatttttgcttttgagatgatacagttcctcaacttaaaaaaacccacaccatctacctccgtgtcttcttcagaaaggtcttctctcagctccaaatctaacacagtcaccaaggcactccaccttgtccttctattttaattctcagtatggaagtcctcactatcaggtgatccttgtttacttgtctattgtttactagacaacacagggatgtaaactgcacgagagtggagatattctctgttttgttcagtgatgattcttcaaaccctagaagtgtgccaggtacatgccagggacaacaaataattcatttaattaatgaaaggaaggaaacaaaaaagtaaatgttttctttgtgtgtttaagatggggcatggaacatgtatttttttttttctttttgcttctaaggcttcctctcagaaccctcccagattccattcatttgtctatccatttaagtctgcttttatttgtccccaaaagaatgtgactgactgccaatttatgtgtatttatatctccccagcttttcctttctttttgttaggtagtagttgaggttgacacctctattgtatcccccacctcacccccatgttttgaaaaggcagtgttaaacattactcctaatataggcagcttaatcacatttctcccaagtgaaagtgccagatgggagtcagaaagcataggctatatttttaattatgtcagaagttaatactagaactattaaaaagccactttcctctcctgagattgtctttctttatttgaaaactggagttggactttttttgttgaatgattctaagaaatgttttagattgtcaagaaatcagatacaaattcatccccctgtggaggagccctatctgtgcctcttctgtaataccagtagccatggtatgtattgcagtatgatgctaataagtacagtcatttgagtacttaccatattcttcttctagtttatacgctctctaaaggaagaacacttgttcatctttctggttttttagcctagtacaatgttttgtacccatcagataattcaacaaatacgtactaaatgataaacaataacagattcttatctctgttttttttagaaagtagacttccctccatctaatgctgcttctgtgatgctataatatttatggtgcagaaatctagatttagaaagagaactttattcgaatctgtttatacattccctaatacttactgaggctctatgaagtaccagatattgtccttagcactttacatgtttcaatacatttaatctttgagtcaatctagaaggtagactcaatctccattttaccaataagaagtgaggagcagtggttaacttacctaaggtcaacttgtggcaaagctggaattcaaactctgattaatggttttgttttatcaaaaaaaaaaaaaattaaggccacctgacaagaatgttcactattagtgtttttccagagatgttgaagctctttaccaactgatgctatgaaaagcagaatttttctcttaaagaatgttttagattttataaattagttcagttaaccctagcattaatgtatttgtttcaaaaaaagtttaaaactttaagcagtatattatagttgataaatgctcttatataagtagcataccttgacaaattatgagcatttttaatatgttacctattcattgggcaaatatatattaaaagtttataatgtattggtaactatgtaaaaatcattagccataaagacatgaatgagattatatctttgcccttgattcgctccagacctagtgtgagttgtagacttgctgagaaatatttgcaatacaatttttatttgggttatgggaaaatgattaactggtatttagaggtgagagggtagttaagggaaaggtgttaggaacactaaagaacataaaagcccatgatcccacttcccattttggaagcctggcaaattaggttctcagaggacctctgcagaacagtcctaccctggataggacacatctgtggatacattgctggacttacagtggctggtggagatatctcaggactcactattctgccaaatatatatatatatatatatatatatatatacacatatatatttatttatatatgtataaatatttatatatgtatatatatttatttatatattatatatatagagagagagagagagaaggagagagagagagagtgagagcgagctgaaaacagtgagcaacaggcagaaagagaggttggtaatacctgaagggggatgctaaaactatattgcccttgagacttttatcttcagactggtaataagagtgttgcctagcctgggactcccatatggagctggcagaggtggtctgaggtctgagacacctcatagctactggtaggagatgtaaattatctttgagatgaaagcatgatcaatttaggcctgcagggttcccacaggctaacataaagcaattaactcacaatcaaaggtcaccaagcattcttgaaagtaactcactttcaagagtgagagttagcagaaacaacagatgtaaatcctcaaaaaaactgcaggtattgggattgtcaaatacaaatagccttgtacaaaatctctaaagaaataaagtgcaaatcataaagattaacaagatgctatcaggaataactaaacaaagatccgtttacgaagaaccaaatggaacttgtaggaagggaaagcataattgttcaaatttaaaaataactctttggatggacttagtagcagatttggcaaaatgaagagataatttattagctagaatttaaatctgaagaagttacccagaacaaaacataaaaaagagctaagatgctcaagaagaaaagaactaggcctgggaatatctccataatatatacaatatgttacagaactatagtagttgaaatcatttactgtcagcacagaataatatgtttcctctaagaataaaatggaaaatccagaaagtgactcatgtacttaacgtaattttgatataggacagaagtggctgtgtagatcattggatcaattcaaaagttatgcacaggtaactggatatgtatgtggggacggaggaggacctgaaacaactttctactatacatcttggactcttttaaaactttcaaataaaaaagaggatttttgaaaaactcagctttgaaggagcttcttaaacaataggccctaaccataaaaaaaaagattgatatatttgacttcattaaaattaataactgttattcataccataagtaaagtaagaagaaaagcaactgatggctttcagggcacattaccccaaaatatggcaccttggcatactgaatattttaacctgaaaaaagttggagaaagtgacaaaaacaggaagatctctctgaccttcccttgaagcagatcataagaccctcatatgagaagtgtcctccttatagctaggggggaaaataaaaagcacctttctttccgaagataagggacacatagaagaatctgaacaaacaggccttgctaagttttctgcagtttactatacttagctcatactcttcgccctatcatagtcctttataacgtcacccttcatcaaacctgctataaaaacactcgggtttaactgttgcattagttcttcatttccttatgaagtctaccatgacttgtaaaacttatattaataaatttgtatttttctcttcttaatctgtcttttgtaataggggtcctagccatgaacttttaacatcttgaaaggatggttttcatcccttatacagtctgataggagaagatatttgtaatacaaatttcagtcaaagctatatactgagcatttcagagaaaaaaacaggtagagatatttcaggtatctcaaaaggtcattttagtagtaatcaaatatgtattacatttcattttctactactgaagtgacaaaaatcaagaaggctgataatacaaagtggtaagatataatttaaatggggttggcatacgctgctggtgggtatgtaaattggtaatagtttggtattatcttgtaaagctgaatatttacaatctttgttttatcaaaatgggatggataaaactcagggaccacagtttgccaactcctaaaataaagagtatttgagaaatggtgaaaggattttaatgataagagtatatgaatgaaagtgtctcagaagatgaggttgaaaatgttgattggcacctgcttgtgaaaggccgtatgtgtcataacttttgccttttcctcttgaatgtaaagcagtgaagtcatttcttcgcatttaccttttagaaaactcatccaactagcaatatgtaggataaatctgaggtagccaacatgggaagcaggaggactagtgaaaaaacaagattgggtcttgaaggcagtcgaaggtggggtggagaattcagaaccaatttcagagagaactaagcagatagaatcaactgtgtttaagaagtaagacagtgcactaacgctctattttacctaattgaatgaatttagtgggaagcttgatgaaaaattaatatgcacattaaaacatttcttcttcattactatgaaacaaaataatattttactttttttaccattatatacattcctaaaatatacttattttattgctttcttaaaaagtatttctgtcacttcagaattttgtacagcattttgaactgtgtttttaaaaccaaaacaaatttagagactctaagactagaaggagatgccttaagcagtgtaaaattaattttcaatatctgcagtattaatctgtaattttatttcttagttgtttaaagtcttcatagacttttgcactattttccacatcagaaatctttggatcacgtccatatcattattaaaggagaataaattattttccaactactgttaaagcacgtggcatttagctgctctcttttctcaccagtaaaatctctggtagaccctgttttagtcagtgatctaatactgggcaagtttcataagatcacatgcaatgaggaagccaaattacttcaaaagatcattgagttaaataatacatacttcaagacacccataaggtttaggtgtccagtgtggcagcctgtgtaataaataacatgtgctttacaaaacctgtcattgtatatttatataataggcagctaagattttttaaaagctgtttttcagtaatttcatttttcctattcatagtttttcatttctatgtaatggacccaaagaactgacatctagattatctctacctagagcagcagcgtctactactatttctactatcccatgtgttttagtttacaaaaacctttcacaccattatgttacttggtattcctaaaagctacacaagatgggtaatgttattaatttttttttatagatgaaggcattcactctaaaagattctcacttgctcattgtcacacaacagataagagaacaaactaagaatcaaaacagggtcttgctgatccaatcccttgtgctttcagtgacactggacttttcttgcacattggtttggtgataggtggtgacagatggtggaaatggttagctctataaaggaatgtaacaaaggggcttgaaatttccagagacaactcagaaatgtttgttatcaagttcatcttatgttaatgtccacaacagtaagagatatgtctgatcagagacatccttgtgttttttaaggagataactgattttctatatgccagtgcaacctagcttaggcaggcttagtggtggtctttcatttattcaactaatattttctgttctgttgctcctttttaggtcctactagaaattcaatggtgagcaaaataaatatggtttttgctttcatgggctttaccttaacagcaatgggaagctattggagggctctaatcagtgaagtgatatgatacagttgaaatcctagaaaataccgtgtgctacaatgtgggttttgaggtggaacaggcagacagtatattcagagatttaacataggtggctgctgtgtgatctgcctgagaggatactgatctgaatgaaggtagtagcagtggggatgggaaaagtgatgacaaagaatatttaggaagtagtaattttgtaactaattgtgtgagaaagtgactgtgcattccagtttgcccaagataattccagtttttgttttccttcaaaagcatcccaatttggatgataaatgttaatcctagagataaggaaagtggaggattcaagaatgatgcataggtttctggcttgaagaactgtatggatagttttgccatttactgaaaggggatacactagaaaaagaactggcatgagataagattatgagttcgggttggacatggtgtgcttaaggtgactgtcatacattgacgtgaagacatattaatcacatgactccatgggtcaggaattcgggttgcaacttttggtcagagatatatcgattagagagtgatcagttatcaggatggtaactaaagagatgaaaatggataagatcaccaagccagaaagtatggaacacagtgtcaagaggcataggtccctgaggaactcaaaggggcacctatttttaagggatgagcaaacaaaaatctggaaaggagagaccagagtcctcagaaaactaggaggtacccaagttcatggaagtcccaggaaaagggtgttccaagaaagagggagtagacaggaatgtcacatgctattaagaggtcacataaaataagactagaaaagtacacattgaattcagaaacttgcaagtcattagaaacattggttatggtggtttggtgtggatgggggacataagcctgccggtaggattttaaagaatgattgggaagtgagtgggaacagtttctcagatctataactgaaaaagaaagaaagcactaatgaaatgccgggaggatttgcagaatttgagtgacaataatgtctctgaagacaccataagattacttaatacattgtacttacaggcttctatctctaatgtccattatgaaagtagaagaattagtttgcctaatcacagctattaagatagttttaattttttaggtaaatttgtgtgactttaaagctatttcatttttaagtagtgggagcaaggacacaattgatcaagtcactttagctatttttaccccccaaaatgcatcctagaaatttgctcaataaaaataaaattgtgccttagttttttttctcgttgtacaaagaattatgcttctcttggcttctgaacactggggattccttatatgctctttggcagataaaaaaaatggtaaagatttatggccaaggaaagcatttctgaaaaaggtgctccacattgtctttgtgtatgtgcagaaattataaacagaactcaggggcaccaccactataatagctttttgctctctttgaagaaaatggaaaatgctgacttaggggctactgcttgtatttcctttaatgaatcttctaagcttgaatgattttaaataggatatttatgttcctcggttatagcaagccaagtacttaaaaaaatacatgtgattaaaatatccaaactaataaatatatacagacatatttagtaaaaactactgttcatagtagtaatagtaatgatagtaataaatgccacagctaaagactttgaggagaattcacagtcaaggaaaacaaccaccaaatcacatgtatttggagaatttgattagacttctatacttaagtttaataattatgttgaagattagtgaacaactcttggcacaagaattgtcttgacagacaggcagccttacccaactcaaataaataacttaatgggcttttttttctttattaaccacttggtaaatgtgaattgaagtctagtttttaacaaagacatatagattatgactttattatctctgatttgcataatagattatgaaagtctcaatgctttgtactcttggtatacctgcaagcgttttagtttctatctatgttaaaaaaattactttcagatttggctttttatttctggaaatatgtttacatgaattcattaacctatctatattacttgtaagatcttaaaaatgtcttcatcccctgagtttgaaattgttttacccatcaccctcatgtcagttctgttattttattactaaacctaggtaatagtattaaagctgctgttcttacttcatgatgatagtttatatttgcacctacatacattatatatattatatttgtacccatatacattatctgcttctggtagggattagcagctctgaagatttttgtaaaatgtagcatatgcgactcataataaaatatatttagaaaattataccataatagcatgtattttatttaattaaactgttatgaaaaatactgacctcattaagcaagaactgctcttccagagaattttcagaaacatttaattctataactcagatatgtcagaaaatcactaagggatcattatcattagcccctgaaagccaagtgtctcatagaacctgaagaaagtagtctttgattagtgaataatgatgatttgttgcatggactaaagctttttttctagagatttctacatcaaacttctgtttctcttcctatttgaagtagtatctgtggcaaaccaatgtaatttgagttacaagcaatgactatgttccttttaggttttttcattcaactttgtaatatattccacctgttttcaatatctacatatatagagatatagatatatgtatatatttctaacgtcgccctggaaaggaaaagatctctaacatatttactacatgttttggtaaattcaaccataaaataatttgaaagccttaaggtatctctgttcataattatgaggttagaaattccctacagccggaatatatggaaagtgtcaagtcagaaagggaatctcccttagtttcccaaaatacaccagccaaagccttgctttttctgcttgagaataatagttagtgaatctagtctatggagaagtttttatgcaattgaaataagataaattaagacagttatagtgaattgttttacaaagttaactgttctgacgcttttatttgagctatgtctttctcaccagtttagctttaaattaccattttatataatgatatttacattagatatatttattctttcagatttcttactttgagaaattaatagttaacctcaacagtctccttttggcagaatctgtggctgttgggaaaagtggagcagatacttggatgtatagaactatgggttgcggggagggggatagagaagccaagaggagaaggtaaagaagaaaggatcagaatgtagacaaatggttgatttttaagagctgattaacagattgtccactggaaaggcatgaggttaggtttagagatttctttgcgtatctgttcatgtggacaccatctcttgactccaagtgcaaggtgctgtgttgggtgcttcaaggcaatttcccaaatgtgtctaatcctgagaatcacctggactcttgttacaccaatttttagcagtaggagccatggatctggagacattgagaaattttgtgttaaaagacagaagatatagtagattttttctttgctcttgagcaatttataaactatccttatctttgtaagcctcagttcctttatcgataaagtgtagataataatactttccttgtcaattttcaaggtaaatgaggtaaaaggaaaatgtcctcagagagttactggggcttgtaaaagggttaaagttggtaattttaattgattgtgtgtatgatgagtagtcagatggttttgagaaagaaaggaagttagggcatacaaagaagtttttaaaaataatcatcttctcaaagttgtttcccaactttattatctgggttttatttaataaaagaatttgaaatattccttggtgtgtctgtttttctttgcctattcttctcttgtgccaactcaactattcatctcaaattatatatattaaatcataaacacatgcttctaacagttatattaggcatttatttaacctaaccccttctgtcccagacaagtaccattaatactgccttaaagcaccaagcataccacctggcatttgagtcaagaagcatttgctgaattgactgataaacctctaaatctgaccccatctctttccaatgtactagttgctagacaaccttatgttcggactttcaaggacacttggggaaaactagttcatcattctctttgatatttattgtggaggtttgttttattttttgtgttaacaaaacctcttgtcagaaagatttccttacctcaaccctaaatctcgtattgtattttagcatgcttctgtatttacattgtgggattatttttattaatatacaataaacaagttgtgtttcttggaggtaattactgggaataatttttttctgtgattattagcttctttcagtaactgatttttttttttatccatttagcagcagcaacagaagaaccagaagtgatcccagatcccgccaagcagacagacagagtggtgaaaatagcaggaattagtgctggaattttggtgttcatcctccttctcctagttgtcatattaattgtaaaaaagaggtaaggcctaatattgtcctgtcccgctcacttaccatttatgtcactggttttaaaaacctgtttttctcaagatcctttaaattagaacaaacaacaggaagaaaattttaattttaacaatgttgtcagcacctgagtctattggacatgctttctaataaattcttatttggttatttgcagtttaattttggatataaacatatgctttttgttaagttgacctagaaattaatatccgaatttaaatgtctcaaatgcaaaggtacttgagatcatttatcttatatttgaagtgttattattaacaatggcaaaatatggatttattgtgatacttgggctgtggtctaggaattattttgtgctctttttctgtatttttctacttcttggctacaaataagatatgagaagaatataaacattatttagtaaaattgtacattaaatattcattgactaaaaattttagccttttaaaatagagagtaaattgttttaattgaacattaactttttatactatatcaactaatatcaccatcttctgacgttacttgaagatactgagacctactggaatttaaactgagctttgctctggagaccaaagtatattcctgatgaaaagcatttcaaagtacacagtttttataatatgagctattgtacattatataaaatgccataaatctgtaaggcattgtcttggaaactaatatagcactctaatccttcccatcatgtatttgggttaatgctacaatttggaaggacttttaaaaaaaatatttataagcaaaagtacagtcctaaaatagtttggtgtatagaagtggttgtgatcagtgaattctattgaaaaatataataagtgatgttgcttatattacattaaattatctagtttactattatagttattttatacttgaaataaagcattaacattatagataagactcatactacatgttttaatgattccatcagagtttattttaatatattgcctctttacgattatcccctggagatatatatgttggagaagacacatctgcattagaaacattaggtatgcattatagtgttttgtgttaaattagctacatacgtgctttccccaaatagtgctttctcttgctgttgtctccctctgtggttggaaaatacatcatatgtgaggcaaaagttttaagtattttagcaataaaaatttgccagtaaagatcaataaaaatcaccaaatgtaaccttcagaccttatgtctctgtttagtttaaatttgtatttggagacttaagtaaacaatttagagagtaaagttaactaaacattgcttcacaatgttctggtcacttcagattggatgtaaacatgaaagtggcttctgattatatcctcattcagctagaattgggctaaactattcagttttatttgttatttatttgaaaacattcatttgtcttgataactctccctatccaggcctctgatttagcaataatgaaaaaattgaaaaattaacctcctaaagtatgctaaaaccatcactaagcaagattttgggggaaggtaaaatgctctgacagctctctaaaattgtgtaatatgacaacttgattttctggttcatatattaaatggttaagttaatgagcctctctattaaaatatttaacatttgagctttcataattatgctttgattgtcttttgatagaaagtatgctagggcttttgcttctgttcctcaccatcacctttatacccaggaaaagctgcacttttaaagatagaccaggtttcattatttagatatgttaccttctaatatatagtatttatatctacattacttgaatttcttacttaccaaagcaattttgtaatgacttttactcatatgtagcgtgtcacacatgtaccatgtatgctttaatcacaagtatgtttatcatacatataaaaaagtatagatatagcagcattgcattggatattatcatcaagtatagcttaaaactattaatataaaatgtttcccttttaatatataaatttataataaaaataatggaaaaggaaattactttagcctcttatctacattttagtgggaaattgttaagtttgattttatccctcactgggatgaatacatgtagatatatttcttatgcggaaaacagttccatgtctttttggttgttttgcaaaagaatggtgtataattcaattgagtaaagttttacagctaaggatatgtataaagtaagtttttaggctaagaaaagggatattgcatctttcaaaacgcaatgtcattttttaatttaatcgctattcaattatttccaaatgtatgccattttttcattggttgtgtattatattttacatgcacagcatgaacacattaataactcaaacataaatttgaaattatgtttcaatacagtaaatgtttgtgtatgatatcatgttcacatgcatctactgtagaagtatctgtgtatatatagtatatggtatatatgtatattcacataacatatgtatatacctatgtaccattaagatataataacttgtttgtagaaatttaggtgttattctgtatatatgatatattaacataatagatctttatgttttgtatctaaagaaaaataatctatatagtacacaagttctatgcacagctgttccatctgtcatatttagataatggatgatattatgcttaactgcatgttgaaaatacacaatccatttaatttttcaatattttggcaataagaaataccagcatgttattttttccaaattatgtattttaaattttatttttatattgcatatctgtctgtttaattgcatggcaaaaaaaactaacaatgcatgagcaaattgaaatgcaaagcaaaaaaaacatgaattttattttattttattttattttttaacgcacatttttctgctttattgaatgtgacagagtcacgcttttcattcaccattgcttctctttttccactgtctgtgatttgcttgccaggaggagctactattcttactcctactacctgtaagtagaaaatgggtgatgtacaactttacgtgtgttaaggatgcagtatcccttttcaaaaacaaaacagaatgcttgcaattttggtgacatttcaaaaaaaaagttttttcagactctaaaactataaactttatctatcacctattttgccaatctttttaaaaagggatattgtatttctgtatgtccagctacttttaatttagttataatttccataagtagctttagtctagagccaaaaacataatttatttactaaagttaaacctgtaccttatcttagcaatatggcacttcactcatctggtaaagaagagatagtggttgtaactcacaaatcactatctttatgtagcattgtcatgtctgacaaaatgagccaagtggtgtatttatggaacactcaaaatgcctttacaggatgcaaattagttcaggtctgcatgtgataacatctttctccgtatttctaggaatccaagatgggttatagcttcagaacatctttggtccggccattaaggcaatcattgtgcttttgttaaagaaaaaaaagtagaaaaaccatggtgttgcagcaacaaagaaataaaaattctttttagaggaaaaaaatgagtttattgtaacttaagtaggacaaatgttttctaaaactacagccaaaaaaacctttgtcaactaggaacagatataggcatcacattgctccttttctcttccagagtctgtaactcttccgaaactcaagcatgatatgttcatttggataaggatggagaagatggtccattctatttcctgagtcatttttcagcttatcaccttatatgccagagtagtttttcatccaaatcaaaggaacattacagcaaagcattcttggactttgcttgaccagtatttgatccgccagctttcaaggtttaaagattgaaattaagaatgtttggggcacatatcccacagcatttaaatcactagataaattcaagctagctttacagcaaaacctttataagagtctccattctccatgactataacacaattctgccaacattttaaatattataaacattttgcttcctaaaatctgctaaaccaagtagctgtacactaacagtgctcctaacttattgtgatgaatcataatatccttgttaaattatgtttgatgaagccagagataatcaactgtgccatttcatacaatgatggagcactttccccctttatggcccacccatacatccacctgcagaagtttgtgctgttggctgctttgataatgaaagtcatttgcacatctgtcaaactcaaagtagttgcaaaacgaatttcttaactgttctgaagtgcacattatgtatgctagttactcaggaggagacaaagcatcaaacatactggaatcactaagtatttaattatgagactgtcaataagcttaacattaaccattgatgtagctctgatgttaaaatgagattcccttttttggtggatagacaacatttctgtgttccagacaacgtaacaggttatactaatattattatagtacatggggctactggtaattttaatcataactacagatattatcacagagatatgcttttaaaggctgcttaaccatacctagtgatgcttatctggattagaggggtttttaaagataaaaatagatataaattagagaagagcttaaaagaaaaccagatgtgatctttgagctaatattcattgacattgtcatagttactatctgtttttgatcaaaacacttaacactgatgtcaatttttctttgttttagaagaacttgaatgaaagcctacctcacagggttgttgtgaggattgaggtataaaaaccaaggtgataattcatggctggcagatatttacaaaggtcatatttccccataatttgtcaactaatctaggtttgtgaatctgaaaagttaaagtccttcattgcatgaaaattttaacctgtcatgcatttgacaaattcattacttattgtttttctccaatcatgaactacatataaattatacatattttaaagtaaagcctcagggtttaaatttttcttttctattggctttgaactgctcatcttcaaaattttaacattgttctgaatccaaatttcagtttgtgctatttttattcaattcagtctctcatattttttgagaaatgaatttattcttcttatcccagaaacaaagattgaaagttatttcctaaagcaatttttgctgttttaaaatttacaaatggcaaaatatttattctatatattttgctgaaatttgtaacgactagtgttcaactgctagagtaaatactggtgtatattaactagtgttcaactgctagagtaagtagtgccactttgaaatgtgtcaatttaaaaagtgtaagcaaccagatacagcgtaagagcttagcctttagnnnnnnnnnnnnnnnnnnnnnnnnnnnnnnnnnnnnnnnnnnnnnnnnnnnnnnnnnnnnnnnnnnnnnattgagttaacaaatgaaaagtgccaagtatataacaggcctaattcatctattcaacaagtatttattgaagcctgctatgtgccagacactgcgtcaagtgccaaggctatgcagatcatccttctctttgtggagcacatagtggggaaaacaattgaaagatatttgcacctatcaatcaataacactcattacaggggaagaatgtggtagtatagaaaatacctagcctaatttgagaaaggttgctttggagtcaggcatataaaccctccctgacgaagtatctattacactgagacagaacagacagattttagccagatattacaggcaaaaaaatgttgcaggttgaagaacaaacatcttgtatgatggcctagtgggaagtttggaaagtgaaagtccataggctaaatgtgaccttatgatgtttcatgtggcccatacactgtttcaaaaaataaaatcacttgaagaaaatcaagaaaattaacatcaatcagattcatggcttgtctttaaaaaaaaaaaattaagccagagagaagttcaacagtgggatcaaatgcccctaggcaagttgcccctaaactgctttccagttcttcacagccattacccttccttatggtatcttgccactgacagcagcactcatttatattacctgtctgaacctacatattcataaaggattttgaccctcaagtctagaaaaagattaatagctctttgaatgtatagcacaaatgttgctaataaatgatggtggtgatggtgtagtggtagttatgttggtggtggtaatagttcttgttacactttgtcattgttttcttattactaatactgtgattctgtgattatcattatttattatttctaaaatagccatctgcatcctcgaatcttagcttatgactatcttaaacaacatagtgtcagatctgctgtgtacatgtgtcgtgtgtgttgtgtatgtaccgccctgaggccaagtactgtaattctcagagaaaatatatcctacactggagcagtcctccaattgctagattaaggttgtaaaggaaaagcctttatacataaactcaatcttttaaatgagcctttgtagtatttgtagtacatttactctggtttggatattaatgaggatcagaaaagaatggcttagcttataatctagtgaaggtaatggtgttcttaaaacaactaaagatttccaaggcaatatgaattgcagccataaacttagtaacataatttgcctattacaagcttttagagtgcctttatttatacataaattttcttgttagtgtgatttaaatattttatgtgcctttaatagccctttttcttggatgttacatgtgtaacattcacaagaactaaaatatattttacatccatgatatgtaagataaacatgccaatatttgagtagttcataattctaatgctgttaatagccaatcccttaaatcatatgcctttctgcatttataaagcattgctgtagttagttgatagtatgccatgtggttctaattagaaaacacatttttaatatttgaccatgtgaatattccaagatgataattttcatgtctttccataccatattttaaaactttcctcactacttttcttacacagtatatgatttaatcccatatattcatgtgtacttgaaattttctagcagtggcttattctaaaagtcttcagattagcttctgattaatgttataaatatattgctaaatatgttaatgctacacattgcatttttacttaataatagcacagagaatgaagaatgggacatgtctttgtctgttttaatttggtggctacagtaaaacagacttgaaaagttagtcatgttatttctaaaaggaactaaaagttgatcaaaagaattaattacccaggagtatcaaaacttggctttagcttgaatatttattgaattactctagtaaggaggtatttattttgcttttaataaatataattatattttatgatatttaagagaacaggaaatgatgagagatttggattgacagcttgaatattgaaatatgcatctgacaaaatacttttatagcaaggagcaaatataattgtttgaatgtcaaacttaattcctgaaattgtgaccagtgcttggggtttctaaaccatgtttgtaacattatcctcgggctcacctggactatttattgctggtgttaactctcctgcaagcctcaaacactaaggatgcccttttgtatttgccttggcagcaaacttgctaaaaaacgcaaagatgccatggggaatacccggcaggagatgactcacatggtgaatgcaatggatcgaagttatgctgatcagagcactctgcatgcagaagatcctctttccatcaccttcatggaccaacataactttagtccaagatgtaagtttttcattaaaattttaataaatgatgttacaactcatttcactttgaattctacacgataccttttgagtaatgagagagagtaggaaagtgaggggagaagcagctagaaagaagagaaagagatggagaatattatggaatttacaagaaggattctcatcaagattgatactggatttagtttaacttcaaactctatgaattttattactgtatcacaagggatattccaaacatataccactcagtccatagcacgtgtcattgctttaagtggaaatacacgattgcctacaaaaagttagttcatgtcagaatttataattctttttccatttgcatcttcctttgtgtaagatgaaagtctcttttgcgataagaggaaacagtaattctttttgggaattattgacataggtaaaatcattgcattaaagtagtatattgtagactcctggaaaattgcaatactaaaaagttaactcagggaaacattagtctacatgctcttaagtatctggtgtgaagtccaaaagtatacttgaattgggggttttgcaaggcatagtgaaattcatccatccatctgtcttgaaaattcctaatgttggtctatgaaggcaaggcttttaaaatatttccactgaagtaccatttaaaagcagatgattttaataattaccccagaatcaatattactgtttattttcaaatttcatatgaatgttatattctgttctatagtgcatctgtttaagttaattaaatttaagtgaaattgcctaactttgtttcttcaaatcctcaagtaaaactgatgcttgaggcaggcaaatcaggtatatctcttgagtatactggccttgtataacttgggccttatggcatttggctcagatcgcagagatatgctcaccccggtttggaaaacatgggtataagcaaagaaacaatataagtattatctcctgtacaaactatgaacatatgtaatagtaagattgaaaacaaagtatttgtaggttgtatgcttgtatgtaaagagggaagtttttttctgaattgttcagcttggagaaatttttcagtaactattggatctaaaatgaagcccatcattttctatgtatatatgtataccaaattagtagttaaggatgctatacatgagtcattttggaatttagttataatcatgacagggcctttcagatctattttatttttatttcactatagataaatgatagagaaaaatgtaaaatactattactgttgaaagtaagttttgcggaaaataaagatgtatcatctctttaactacttaatttaatatttaatcaattaaggttttgaaagcattcatgcctcccaaacttgtctatctattgcctaccttagggccttatttgaaagtttgaattcagcagtgtaactataaatatccacttatgaacttagagaaaggattaaatctatttcccacagataactgaaaaaaattatttggaatgaatatgagataattatttctttaaataccttacacttgatagatctaaaatacatgggtttttttttctttaattttttaatgtcaagtttaatcttctggctttttaaattaaacagagttctgaaccataattatagatacacctctcttgatgtttagatataacccaagctgagagagaaaattttacatttgcagaatacagtaatctgagaaagtttaataattatatttcttaagaaagcataaatctattttaaagaaaaaagattttaaaaaacaattttagagcaatatattccttcatgagctttgttttcctgcagtgcccaatgatccacttgtaccgactgctgtgttaggtgaggccctaaatctttatcatcttttcattgcatggatcacacctccttgcatgggtttgcccacatagagattatttacagtgcaggaggcagcttggttttgaaaatagacagccatggtattatcaaagagagcaactgtgttcaacccaatatcagatctagtggatttcaaattagcaaggcatgctatttaatgtattcttcaattcttggttgttagatttggagcaaaagtacatggcccttaatgtctgactaatattaatgtgtcaaaattagtagaatgaagccaaatgcatacatctgagggtgcaatgttgcctgaataactagtttatatgtaaaagtctacctaatggaaagggatgtttctaaatcctcccaatttataaccacgaaagaacaaatttacaagtaaatattaggattatgtgcatttgctctagcttttgtctttattaagaatgttttaatgtaggtaaagttgctaaaatcttgatgtggggtttgacattctacatgaaccttacctgataagtaatgttatctttcaagaaatttagaacaagctacttgggttaccactgtataacatctaagacaatgctattactaatgacaattaacgcttttacagatgtaaaattatattaatttttaaacctacctatatatttaagaatggaatgggtttcatttttcatttcactttgtaccctgttccttgactaattatacaccaatgattagtaatcagcttgcctgtatgtttacaggttccatatcaattttaccagcgtttctagttaagctttaaccaaagaaatatggaaactatcaaataaatatatcttgtaaattcccaaatgtcatgtttgttatttatatttaacatttcttgtgaacaaaaaactttaacttatattttatgcttgtatttttgttatacatacaatcaatgttcaattgcatttttaaaatattttggaacaacacaactaactcagttatgtaaaatatacctcttatttactaaaataaatatttaaaattataattttataattactataaaggatatatattctaaaataatctgaaaagtcaatgttcttcatctctacttgcactctccctttgatgtccaccaataatggttaggaagtgaactggggatttgccccagggagtggtcttatcacacagggaggagccataaatcatgatcactggggatcattaaggatacatcagatgcctctgaaaatgtcatcttctgctaagcactgtggaatgctgtcagtataaagttaataaataaatttcaattaaaatattgagaactaattggaaaaaaattagttgcctaaatgttaaaagtttccttacaataattttctacacatatgtaaagtccaagtctcggtcctcctgtggatttacaatatgaactcataaaaataccttacatctttgttttcccatctataaaacagtataataattcctaccatacctttttcatggggttttattataaagagaaaattagatgatgtgtatgagttttataaactgtaataattatcatagtaattttccctgtgaaaaaggatattcatgtttaaggaaagctagatttaacacaatagagtcataaagtctagttatataaacattcattacacattttatttaattttgaaagtcaagctggttttaaaaatatattggcattctttaaaagctaaatatctcattaatcatattagatgtagaaatgatttgttgtatttttcatcattcttaggattgtggtctttagagttttgcatccaatcatttttgtatttataatgcagtttctgaaatcacttcaaatattgcttaatgctaatacttactgatttaaaagggcttagaaacttttcatactgattcgtatttttggtttttgtgttttactgcttcattgggtttaagttcctataacaggtaagtgtattgcaaagaactctagaaaacctttcaatcaaggatatatttcaagttattattcttaaatgtataataaggataatgattagtacgtgtaccctcactactagtcacattattaggtggtttaatgaggtggaaatgtattgagattaataatgcatatgtgattattttaaagaccttactgctcattgtactactgtattaaagcttaatgcaaaacaaaaggcactgtctattttatattgggacacaatcatctgtaagatttggaatatgggtgaattctgtgtttctcactgagcctttttcaattgtaaatattctgctactccagcaggtaaaagtgagctctggggctgctccactgagccctggctaccttcttccagcttgagtgattgcattttgcctctctgacgttatctgttctctttacttctcatccttaactgtatattctgtggcagtgcccaaatcaattgcttctgaatttaatttttctggggagatgtatttattctttatgtcggtctgttgattgtaatattttaatagaagtagatccattgactttggtcgcatagtgagaacaggaaactctcatgaatcatgtttgttagccaatgtttttgtgtagaggggtgggcaaaatctgagtaaaagacatgaattcacttgagtggttaggtcacaacagaatctatcagggattttttgattcagtgtatttttaggaatgaatgctacaaaaagagcattcagcttaataagagggagtaaagataaatgcaatcaagctaaattacagaggcacacaaatctgattgtagggttcttttttttttcccttctccaggaagaaaaaatgtttatcatggggacaacaattcattttttgctatatcctatttgtagagttggtgatagaacaggcaaatgtactagcacttgaaatatgtttatctgttaattaaatatcattctctacagtatgcattatcattaaaaaaaaaagttcccctaagagtgtattttctcttctgttaatgagtatgacggtataatgcttttcaaagtaacaccccttaaaacatttgtttttttttttaagtggtaagtttaaatgtgataaatatgagcatgcttctcgttgtaatgtttagtacttcggtcattaaagtactgtttattcttcataggcaaaaatgttcttgttcttttcttccttcttatgacagaaaaagaatttaaagtttcttttctttttaagctaataacacaattgggaagggacttacgcttaattgtgagtggtcagggattcagttgactttttaattcattcattggaatatttattgagttactgttatgcatcaggcactaggaatagaaagaaaaatattctgtctctgtactgtgtgttcagaatttagtgaggaaaatagccaagtagataaatcattaaaatatagagcaagtgaaatgacatgtaaaaatgaataagaggtcatgggaacataaagaaggagctttgtaactcaacctggaggggccagaaaagacttccaggggaggaacccacattttgctccagaagcgcgccctgatttctctcgcagcgtggccaagagactcaaaatacatttgcaataaaaacaataacagtaataagtcaaggcggcagaggttgaatataaatgcacgtgtagtctggctagcagacagagtggcatcagggggtgatcatgtggaatgcccatgtttcccagtgcagagtgtgttgtggtaaaaagccccagagaatagggccacgagaacaagaagagcagccctttggggatgggtcacctagatcgggtatctctgagggaggttgggatatggttgggaaggagtttggtcgacttaatagaccatgaaaacacctccacttgacagctgggtcctctggtcccactctatactgctatgactacagatgcaagaaaaacaactcagcaaaatttcccgcttaagcttttaaaaggtctatcagatgtctccctgcatctcacagtgtctgttgtcttgctgatatacacataatatactctcacctgaaaccttgagttttgtctttggggatactgtctaggcctatactgtatgatatttctttcccagaattcctcttgttatcagaaagatcttaaggtcttaaaatcttcattgcatagatacatatattaaacaagataactttgtctcttttttaatcttctgaaatctgaaaaatgccagatgagaaccacagtgctacagcagagtccagtcgccttctagacgtacctcgctacctctgtgaggggacggaatccccttaccagacaggacagctgcatccagccatcagggtagctgatttactgcagcacattaatctcatgaagacatcagacagctatgggttcaaagaggaatatgaggtgaataagttttgatactgtattgaatttgatttttaactatgatactcagtggaatttagcatttttttccctctctttaacacaacaaggaggggattgttctataggctctctaatctagtgtttatgagtgtacaaccaagtgtgtgtacctgggaatgggaagggaatggggaaaaaagcacttcccagagatatatgagtctaaatttattacaagaatctttaatgttggattccgtaatttattttactatggtattaaaaaaaaacactttgcgtatctccccatgcaaaaatcaagtagcaatacactttgggtcccattgttccattgcagattctatcatttgaatgaatcaagtagcaggtacttctctgcccctttttttgttgaccttatggttgagaaatcagatgaagctttgtgctctaaatatactacttgccactctcagtttaattttatggattattggttgagggtggctgagaaaaaaaatagagcactgcaaatctagtaaacaacactgagaagccaaaagaaggcagtgggaaattcttcttccaaccttatttccccttcctactcaaaccaaaataccaggacttatctcacaaaggcaatgatttaaaaccaaacattccaacaaacataatatagcaaaaggaaaatagttcctttgccacccttcacttactgagaaataccaatctggggcatggaaggaagccagtccactacccatgaacacatcacagtatgcacacatttaaagtgaaagaatccaagtaatattttgctttgaaaaggccatccaaaatacatccaatttcatgaagaatcttttaaactccatattttatctatggattacctgtataccttaaattaggagtgttaattatctctgaattttgaaagttgattttagatatatgccagaaacactgccgtggtaacaaaataagtacaaggaattagactattctgccagagctggttctttttgttcatttcatgtgtactcctgtgtaccttgcttcaaagaccactgggctctttgaagaccccgtttcctgtgttgagcaaagtttaagttcttttgcaaaatgaaatttacacccgttttaaattgctgcatatagtaattaaactagtcaacaaattcttctgttcccagattcttgaagaaggggactctattttaatttttatatggtcccttgttgtgaagactcactctttttcatgatcttcaaagaaactcagatgcgatgtattgcacacaatttaatgaataattatggagggaagcaggttttctttctactgttataaatgctaaatgatgcacacttgaaagatactcattaaaagcttttttgcagttttgatgcattatcattcaatacgttttgaaaagaatgatactttgctacttctacttctcattatagtgatcttaattttaaaatactttcaaggtccattttttttctctaaagttatttttttgtctttaatttgacctgaatccaatttaagatgaacaagtatgaatccaacaaagcggctttgaggtctgagaatgaaacttgtttactactgtaggactgctttcctctctgagaaagtggtttttactatttggggcttcagaacagataaacctgatttttaaaaaggaattaaattcagtctgcttattcgttttgttttcccagagcttttttgaaggacagtcagcatcttgggatgtagctaaaaaagatcaaaatagagcaaaaaaccgatatggaaacattatagcatgtaagttcccattcaattcttggtgaatgtaaatattatatgcttatatggttttaaactttaagaaaaatcccagagagtggtgtgtctgtttatgaagtaatctatttaatattaaaacagcatttacaatcaggcttgagggctcatgcctgtaatcccagcactttgggaggccaaggcaggtggatcacctgaggtcaggaggttgagaccagcctggccaacatggcaaaactctatttctactaaaaatacaaaaatcagctggcttggtggcacgcacctgtaatcctggctaatcaggatgctaaggaaagagaattgcttgaacccaggaggttgaggttgcagtgagcagagactgcattactgcactccagcctgggcgacaaagcgagactctgtctcaaaaaacaacaacaacaaacaaaaacaacattggctattagcagtgattctgaaattgtcatcatcctcattaattaaattgactcagccacttcaccctgtggagataacttgctgtttgatttcatgtttgtacataaatgcatggggtattactgaacagctgagactatcaggataatgaaaaagtaagatcttttcagttataaattgttttaacacttccatcaaacatattcaagattggggtgttattctttccacgtgcctttaattcttacttggagccactgtctaaactccagttgttcgatattatttatcgttagggacttcctcctgagtaagtcctcaagatatacacgggataataaagtcattatcagacaaaaccacaggatcagtaaagaaagtagcagatagtttaacttgtaactagctgctgatttacctagaccactctgctctgaatttaaattattttaaagtatcttatgaatagctcaaaatctaaccttgattctcagggagtaagaaactgagagcgggaattcaaaattcactttttaattctgtggctcatttgctgtaaagtgcagaagaaaaggatccaacccgtttaaagtcatgactaaaaagcaaaattagaagttaagtctagttcagttatgtagacaattctatgactcaaatgattacttaccagacaatttcatgtctcctaaacactaactatgaaggttcaagtcagtgaagcttaagtcacacaatattataagtgtaatagcaaggttcactaacattcttatatttcttcaaaggactgatttggtagtagtatactatggatagactatgggcaaccactgaattctttagtctctaccaatgacattgtctcagaacagggggaaaatttaacagcttatatttattattttaaaattttagatgatcactccagagtgattttgcaacccgtagaggatgatccttcctcagattatattaatgccaactatattgatgtaagtatttttatagttaagtatgtctactttattggcttatatatatgaacctttttgcttattacctataaagtgattgctagctttttaaaatataaaagtacaaactgtacacttttccttgttctgcgtcctagtacttactgacattgttgtgctttctttcacacctgactttggtttgggctgtagatttggctgtacagggatgtaagtaccactatatgtaaataacagcaccctattataaatacaaacattcttaattacagttattactaacgctctgttactactagttatttctgcatgcttcacctaattagcttcatacaatatatctctgttcgtttttttgtaattctttcacatgcgtaaagatctattttaccaccttcccttttcttgtgtagaaaaacaggaccatttttagctttgacagtttattatgtactcgagttttatttgttgatgatttctgtttctggcttttattcttacccttccctaaacatatgtgagaagctggatagtatgatgtgtattagtgttactgaaattttactttttacatttgacttctgacgttaaaatgagtagggagactattttgtgatgtgttgtattggcttttaaagtaataaaattactcaggcaaaataattactaaatttcaattgtaaaatacacatatcacacatatatatcgaatcacagaaatgaaaaaggttgctttgatcatatatttcactgttaaattttgattacatacatatctacatggaaattctttatttaaaggaagtaattatcaaacaaaatatagaatattcttaaagggcaatatattacattacctataaggaagacctggttcataatcaccctggagatcttgggaatgttacttctctctctgtacctcagtttccttatctttgcagtggggataataataacagtactaacctcatcactttgttgtgagaattcaatgaagtaatgcatgttgagcattttgcccaatgcctagcatatatttagcactctttaaacttcaactattttttttacaattaaaatctaggtgtgctataattaaattgattcacaatatgtataattataagacaaaaggtggaggtattaagaatggtagcatatgtatacttctatagacctaaaaggtatgaaacctaggacccaacattttataatttccataaataggaaataattttcattacatttattaggttcacattttagagttatgaattgtcattatgtatttagttgaactaatatattttataaagcatagtatatgagtatatgagttcaatttctgatcataatcttactcttattcattatataaatttatcaaacatcattatgtaaaactaagctaatggtctaatttttagaataaaaaaatcaacagttctatgacaaatttgtaattgttcttacctatttagtttaacctgggttttctgccaggacttgtacactggagccttgttataaaattatttcatggttcatatggtaggactgtattttaaataagacttgttatctagtctttctgttaagaccccagtgtattttggtctatttctatacaatttcataattttccctctcccattagttcattatatgtaaacgatatgagtatatacttctgcaattggtattttttttaagaagtggaaatgaaatacttataaagcttggaaaaatttttccataaaacattgtgctattttccataaaacattgtggtatattaaaaatttgaaatcttccaaatttgcaataacgtaatactcatgctattaaattttaggttggagatctcagttcacatgtatttatatgtgtattgagttgcccacaccagtatgtggacaaattgtaccacagacttttactaaggctcattggtaaatatgcaacaaattcagaacttaggatcatatcatcaacatttttacaacttatgctttgttgttattcaaaccaattgaaagcaactaaaaatctattcctcctcaacagaacttttagcacactgaaaaaaaaaatactaaatttttgctcaagataagatgcatttttaaaaattcttctttccctatatatatgtgtgtatctataattatgtgtgtgtaaattaacattgtgagcacgcacaaaatagtttttgcatatccctgaatgtgttgtagaacaggaatattctctaaaaatctcagcaggactttgattggatgcacacatgcattgtccagctctaacattggaatgttctgttatttttttatggttctaatatgtcctcgtccatttgtaatgcagtgtgttgtacttttggatgataaaatgagaattaatatttttaaacactattttaccaggaatgaatgactaaacatttacatgaaggcataaacattttagtgaaaccaaacaaaatctatgaggttattccatggcaaacaaaaatcaattatacaatatatattctaatcagagcctttaaaatatttaatttttgttttatgtttacctttcagataacataggtttgagaagtgaactatgtgttcactactcatttctggactttttattataacttaatcttaacaggtggttgtcttcatctttttatgccttcattcatttatttctgatattgatgtaaaatgataactaatttgttctcttattttagggctaccagagaccaagtcattacattgcaacccaaggtaaaactttgccttgttaaatgttatagaaaaaacaaacttgcttattcatctatgtggtggtttttattattttttaaattttatcttagtaacaaaaaaatcagcccttctgattaacactgctccttactcatttgtatagtacaaatttattgtgtgtgtaaagcttatataaatttaagcttgatttacttttaattaaaagtgaaagaaaagctggtagtggttattatgatttgatccttgttacacagataggtcagagcactagtcaatagtgccagtcagaggaattactcatttttgaggaaaggaaaaagaagtctcatataagaggcctgtcttcttgcagcaagtttgttagtagtacccaagaccaatattgttataatgagctgttatactgagcaattttttgacgagtcaagactgagacaaaacaaagagatggaatttagtcaagttaattcttcatggaatataataagacagtagagagatcttgttatagtggtacactggggagtaaaagtatccaaataacaacaacaaaaaaagcatctgtagttatctctctaaattgactactggccctcagaagagaaacctgtacatcttttttatataaaaggaaagtaaaacaaaagctaggtttactcttttaacaggggtcatttttctgtgttttcacatatctttggagtaattgagttcagttgtgtactctttaaagttagaaagatcgaccatagtggtgaacaatattcagttttatggtattcggtagagaacagcccagcacatgcttttgcagtttggagatattatgataagattaggatatgtccttacgtgtaaggatatgtttttattgatccctaaacatgcactatttataaatagtgggcacttatttaattggtaatatatgctgtctggttgatggtggtataagagttctattttttacacatatttgaagatgcattaaagtgacttagtgacaaatataaatacccaagaaactagtgatagtttcttctaaattgggaagtgtagagggcaaattgaaaaaaaaaaaaaaaaaacttgtatatgcctgtgtttttgcctattgtgggaatttagatatgaactgaatttaagtattttcagtgacattttgtgttagaccttttttggaattacttagtttactctgcttcttatcttagctaaacttcttactaactacaaaattcctttgataacataatattcaaattaatttctttgtaggtcccgttcatgaaacagtgtatgatttctggaggatgatttggcaagaacaatctgcttgcattgtgatggttacaaatttagttgaggttggccgggtaagaggaagaaaaagaatttttttgtcataaaaatgaacatagttgagaagcaacatgtaagacactcaaaatagaatatcatccaattgtttaaaaaaaattataggcacaacattttagttgagtacttctaagtagaccttgactggctgaaaaattatttgatttctcattgagtaataaaataagctttaattttgtactagaatctaactgcattatcaggcttgtatattttttgtgagactatataaactctgtttattgtataatagatttttttctcatttatagatttttaaactgagttttaattgtgacctaaggagttattgctggaattaaatcaccttggctaattagtattatatattcaggtctgtctatatattctttttgtcacttaggttaaatgctataaatattggcctgatgatactgaagtttatggtgacttcaaagtaacgtgtgtagaaatggaaccacttgctgaatatgtagttaggacattcaccctggaaagggtaagtactctaaaattctattttaaaaagtgatatcaaaactgctttttctcttaaaatctttgccaagttctgttttgatgatgctataaaatccattcattcatgtattcattccacaaatgtttatttgagagtttactatgtgccagacatgtttctaaaccttgggacacatgttaaaatcgcctcgtgtggatcttagagccgattgaattaagacagcaataaaaataaataaatcaactaatatatcatacatcatgacaagtgatatagagaaaaataatgttggggaaggaagtagggaatattatttaggcagggtaagaaatggtttacaattctgaaaggatgatcaaagaaaaactcattgttgagaaagtaatatgagtagagacctgaaataagtgagggagtgacgggttatgtccagggcaataatgtttctgacagaggggagagtcatttcagaagcctagaggcatgtgtaaagctgttagaatgccagacagtcaccaggccaagatgtgcagatatccataagtgaaggggaaagaaatacaaaatgaaggcagagaaatcacaaaattggataagtggtgccttgtaggccatgatgattttagttcatactaaaattgagttaggctgccattgtagggtttgtgagctcagggataacatggtctgaattttatttctaaaaggatcactccaagtgttacattgcaaagaataacgtaaggtggctggtgtagtagactaaagtgaaatatagtaacagtgaaatacattttgtggtaaagcttggtagatttgaccacacaaaattgtgaaattacctgtggcacaaaaaaatatcaaaggtacatacagacagaagaaccttgcgattgtttattaatgtccttaatttataatgttaataccagtagaagaaaaaaaaaaaaactagaatctctgaagaaacacaattgttaacaagcctattaaaaatgtttaacctagtgtacttatataccattttgtccttccaaatcagcaagaactttaaaaaagaataatcctcattgattgttagagtatgttgaaacatatttttatacattactgatcatagttaaatcgctacaaaccttctttaaatcaataaaacagtatatctccagagctttaaaatgtttatgtcctttgagaagttaactttcatgaatctctcctaaggaatttatttaaaatacaatgacttcatttatagtattaaaaacttatagataaccataaatgcccaacaatagagaaataattgcatagtattttataaaaatacttgtgagttatcctaccaacatgaaaaaattaggcaaaatattaagttgaaaatagcattatacagaacaacataatcatgattattgtaactgtaaaatatgtatgaaaatttcttagacaaatcaagtagaataaaataagcaattgatatgggagatttcagaaagaaccattaagcttgatttaatgaataactagctcatattattaaaaaagaaatgtggaatatgcagtctcttaagttcatacaagtcttgtaaaaatcaatgatgaacttagtaataaggaaaacctgaatacataacaaaaagttgagatattgccaaaatccaatagaaagcaatgatgacaaactgctgaccagtgaccccagaaattagcctattagaagtcaccaaatcctcttctgaataatccttgaatgatttcctcaaaactaaaattatattatatagatcaatagttttacatcaaaatttacctcattattctgtaagaaaaatttatactcataagtgatttctgttttgaaatgtgctctgaaatcatgtgaaaaattataacattggaaaatcagaaaaagtagaatagaacaaaggaaaaattaaatataaaaaagaaacaaatgagaaaaaagaaaaagcttgtttattgaaaagatcaataaagtaattaaaccactattaattctaaatgaggtacaatgaaaatatacaatattagaaaacacagagggacatagccattatacttgctattagaaaagctatggaaaatattatgtataaacttaaaaatataacttttagtccaggacacggattttctgacaaatgctgattctcaaaaattaggtcacaaagatttagaagcatgaatagatggtagaagaaaataggatgattgttattatcattaaaattgcactatggttttaaagttaaagttcctttatactttaaggaatagctaatatctatgttttaaaagttagcataatgtacttggaaggctgaggcaagagaatcatccgagttgggaaagcagaggttgcagtgagccaagatggcgccactgcactccagcctgggcgacagagggagacactgtctcaaaaaaaaaaaaaaaaaaaaaggttagcataatgatgataacagaatcagataaagatagcattctctggagctctcattccctctttcattatgtctttcttctctctcttcctctcttccccctcttcctctcttccccatgcacacacatattgcagaccaatttcattcaagaacatgaaaaaattcaaaataagatattgaaaatttggatctagtagtgaattaagaaaatatcactacatgacctattattttttccctaagaatgcaagaatatttcaactgtagtgggaaatcttaacaggatatttcattatgtgcagtacattaaagtaccaaaactgtatgactttaatagattaatgcatttaattttattttcaaaatatttatagtaatactctaattagggaaattaagaggcatcctaaacatgataaaggtgattcaacaatacctagtagcagccatgttaaggaatgaagaactaacgactattcatttatcataaaaaactagtataaagattatattactgcttctacaatcatgaatgttacgtggataatcagtgtcactaatattaaacatttttggaagttttagcaaatgaaataaggcagcaagaggaataaactgtgtaactactagaaaagacaaattattttaagatgaaaggatttataccaagaaaagtatggataatatttttaaatgggatgtataaacatttatttaaatgaccaaatctgcataaatattcatgagttatagcttgtctttatattagtgataaacagaagtaagaaaatattactaaataatctttaaaaatacaaagtgccaaaatatctcagaatatatttaataagaacgatatagttcctgatttaataaaaacacaaaagtgtacttacggatacgcataatatgtgaatgagtggagacatgcaccatgttccagaatatgggagtacttgatattaatatcactgtatggatttaatacaatcctatttggaaaatcattggattttttttttcttgttatttagaacaagaaaatggggggggttgtttttttaaccacatatttgaaaatcattcagaaaaattaaaaaaaaaatcagggaataggtgctgacatatgaaaatgtactaaaaagagcaaaccctatacatgtaatagaaagataaagggagcaaggcctattaagcaactccaataaaagaattaatatagaaggagtaaagtattacctaaaatcaggccatgaaacaatttttgaccttcctcactagagttgaaaagtagcaaaaggtgattttccattggggtgattccatggtgatgcttatcattgtgattgttacagttatttattgatgatccctgctttgtgtagggtattgtgctaggaattggaattaagaaaacctttaagaaatgatcactaacttccaaggttttggtggtattggtttgtataagattgaatctaaagataaactgtttttctcagttttgtttatttcatgtaatgtgtctaccttttctgattgaacaagtgagattgatagttcacagatagttcacagtagaatttgaattatatagattatagtgggattttttttccttttgctacaaatgtgagttcttaaaaataaattcggcaatatttcatctataccttccaagctgtgctacctcagtctacagacttcttctaaaaaaaggaaggaaaaagctttgaaatgtgcatttacagggttctcttaaattaacccaataggagagcagcacaacagcagatgcttcacttctttcattttgtatttttgttactataaataatactgcgctgaattatttcacagagctaagaaaaatagtttgcccaaagaacagtttagctgcctgtatattttcacaagccaatctagagcagcactgtcctggaaaatccctacatgctatgcttcaaaaccattttcaacatggataagcaaggcattaaaatctctttgtgaggtgagaagctggaaagttgcttttatacaccacttgagaactcaatgcattgggtcaatggggcagcattttagctttcccatttccttcttttcccctaataatttaatgtgttgtcactcccagcaagaaacaagctgtcaaagtaaataaaatttacccagacttttagaactgagcaagacttataattttctttctttggcagttgtctgacaataaaggtaagctcctagtccatgttaggccttcattttattatatttttttttttaagaaaaggcatagtctttcgtaaaggttttattgttatcattgtcagttgggtctgtacccataattgtgtttaatggctttattttggccattaaaatggcttttgaaaacatttctttccatctttgcacagagggggtacaatgaaatccgtgaagttaaacagttccatttcacgggctggcctgaccatggagtgccctaccatgctacagggctgctttcctttatccggcgagtcaagttatcaaaccctcccagtgctggccccatcgttgtacattgcaggtaagtggtggtccaaatggtattgactgtatgcaatcagctttttttagagtatcaagacaaggcttttgagcacaaaaactaatgtgtgcttacgaagttccagcttgcttgtattatagataaagtaaaacagcaataaaataaaagttggctgtaagtagtctataaaacaggaacttaagaaatacatacattcatcctaatgcgtgtagtgttatccacaatttaaagtatagaaactctgccttttaatggcaacatctgtgttttttgtttttatcacttttgcaaatcccatattgtatagaatgctaggttgaaatagacatttcttgccaatctagaaaattcccaatagaattccagctttaaaactaaatttcagacatacagagttactaaatggcctaaattgcaaggatttgtgctgcaaaacagctatttaaaaattttttttaaagaattcacattagaggaccttgaaaactgcatcagtgagattcagcaaatatatgccaaaaaacacgagcattatatccagactttcttctgattagaaacttctcttaaaacaagcatttagagatactaaaagcaaattacatggcctcattttgaggtgtgaccagaaaaataagtactgaatctgaaaagcgtttcctaaatgatgctgcacaccattctcatacgctcttccctccaagctacataataggttgtacctaagcattttttgctttctgaaaatccaacctattcaggatttaaataaccatgtataaaagaggggaaaaaaagcagagaatgaagtaaaggtaaaacgtccca

SEQ ID NO: 47 - DNA, 5775 bp, Homo sapiens
acgagcaaactcggcatggatacgactgcggcggcggccgtgcctgcttttgtggcgctcttgctcctctctccttggcctctcctgggatcggcccaaggccagttctccgcaggtggctgtacttttgatgatggtccaggggcctgtgattaccaccaggatctgtatgatgactttgaatgggtgcatgttagtgctcaagagcctcattatctaccacccgagatgccccaaggttcctatatgatagtggactcttcagatcacgaccctggagaaaaagccagacttcagctgcctacaatgaaggagaacgacactcactgcattgatttcagttacctattatatagccagaaaggactgaatcctggcactttgaacatattagttagggtgaataaaggacctcttgccaatccaatttggaatgtgactggattcactggtagagattggcttcgggctgagctagcagtgagcaccttttggcccaatgaatatcaggtaatatttgaagctgaagtctcaggggggagaagtggttatattgccattgatgacatccaagtactgagttatccttgtgataaatctcctcatttcctccgtctaggggatgtagaggtgaatgcagggcaaaacgctacatttcagtgcattgccacagggagagatgctgtgcataacaagttatggctccagagacgaaatggagaagatataccagtagcccagactaagaacatcaatcatagaaggtttgccgcttccttcagattgcaagaagtgacaaaaactgaccaggatttgtatcgctgtgtaactcagtcagaacgaggttccggtgtgtccaattttccccaacttattgtgagagaaccgccaagacccattgctcctcctcagcttcttggtgttgggcctacatatttgctgatccaactaaatgccaactcgatcattggcgatggtcctatcatcctgaaagaagtagagtaccgaatgacatcaggatcctggacagaaacccatgcagtcaatgctccaacttacaaattatggcatttagatccagataccgaatatgagatccgagttctacttacaagacctggtgaaggtggaacggggctcccaggacctccactaatcaccagaacaaaatgtgcagaacctatgagaaccccaaagacattaaagattgctgaaatacaggcaagacggattgctgtggactgggaatccttgggttacaacattacgcgttgccactcttttaatgtcactatctgctaccattacttccgtggtcacaacgagagcaaggcagactgtttggacatggaccccaaagcccctcagcatgttgtgaaccatctgccaccttatacaaatgtcagcctcaagatgatcctaaccaatccagagggaaggaaggagagtgaagagacaattattcaaactgatgaagatgtgcctggtcccgtaccagtaaaatctcttcaaggaacatcctttgaaaataagatcttcttgaactggaaagaacctttggatccaaatggaatcatcactcaatatgagatcagctatagcagtataagatcatttgatcctgcagttccagtggctggacctccccagactgtatcaaatttatggaacagtacacaccatgtctttatgcatctccaccctggaaccacgtaccagtttttcataagagccagcacggtcaaaggctttggtccagccacagccatcaatgtcaccaccaatatctcagctccaactttacctgactatgaaggagttgatgcctctctcaatgaaactgccaccacaataactgtattgttgagaccagcacaagccaaaggtgctcctatcagtgcttatcagattgttgtggaagaactgcacccacaccgaaccaagagagaagccggagccatggaatgctaccaggttcctgtcacataccaaaatgccatgagtgggggtgcaccgtattactttgcctgcagaactccccccggaaacctacctgagcctgccccgttcactgtgggtgacaatcggacctaccaaggcttttggaaccctcctttggctccgcgcaaaggatacaacatctatttccaggcgatgacgagtgtggagaaggaaactaaaacccagtgcgtacgcattgctacaaaagcagcagcaacagaagaaccagaagtgatcccagatcccgccaagcagacagacagagtggtgaaaatagcaggaattagtgctggaattttggtgttcatcctccttctcctagttgtcatattaattgtaaaaaagagcaaacttgctaaaaaacgcaaagatgccatggggaatacccggcaggagatgactcacatggtgaatgcaatggatcgaagttatgctgatcagagcactctgcatgcagaagatcctctttccatcaccttcatggaccaacataactttagtccaagatatgagaaccacagtgctacagcagagtccagtcgccttctagacgtacctcgctacctctgtgaggggacggaatccccttaccagacaggacagctgcatccagccatcagggtagctgatttactgcagcacattaatctcatgaagacatcagacagctatgggttcaaagaggaatatgagagcttttttgaaggacagtcagcatcttgggatgtagctaaaaaagatcaaaatagagcaaaaaaccgatatggaaacattatagcatatgatcactccagagtgattttgcaacccgtagaggatgatccttcctcagattatattaatgccaactatattgatggctaccagagaccaagtcattacattgcaacccaaggtcccgttcatgaaacagtgtatgatttctggaggatgatttggcaagaacaatctgcttgcattgtgatggttacaaatttagttgaggttggccgggttaaatgctataaatattggcctgatgatactgaagtttatggtgacttcaaagtaacgtgtgtagaaatggaaccacttgctgaatatgtagttaggacattcaccctggaaaggagggggtacaatgaaatccgtgaagttaaacagttccatttcacgggctggcctgaccatggagtgccctaccatgctacagggctgctttcctttatccggcgagtcaagttatcaaaccctcccagtgctggccccatcgttgtacattgcagtgctggtgctggacgaactggctgctacattgtgattgacatcatgctagacatggctgaaagagagggtgttgttgatatttacaattgtgtcaaagccttaagatctcggcgtattaatatggtccagacagaggaacagtacatttttattcatgatgccattttagaagcctgcttatgtggagaaactgccatacctgtctgtgaatttaaagctgcatattttgatatgattagaatagactcccagactaactcttcacatctcaaggatgaatttcagactctgaattcagtcacccctcgactacaagctgaagactgcagtatagcgtgcctgccaaggaaccatgacaagaaccgtttcatggacatgctgccacctgacagatgtctgccttttttaattacaattgatggggagagcagtaactacatcaatgctgctcttatggacagctacaggcaaccagctgctttcatcgtcacacaataccctctgccaaacactgtaaaagacttctggagattagtgtatgattatggctgtacctccattgtgatgttaaacgaagtcgacttgtcccagggctgccctcagtactggccagaggaagggatgctacgatatggccccatccaagtggaatgtatgtcttgttcaatggactgtgatgtgatcaaccggatttttaggatatgcaatctaacaagaccacaggaaggttatctgatggtgcaacagtttcagtacctaggatgggcttctcatcgagaagtgcctggatccaaaaggtcattcttgaaactgatacttcaggtggaaaagtggcaggaggaatgcaaggagggggaaggccggacgattatccactgcctaaatggtggcgggcgaagtggcatgttctgtgctataggcatcgttgttgaaatggtgaaacggcaaaatgttgtcgatgttttccatgcagtaaagacactgaggaacagcaagccaaacatggtggaagccccggagcaataccgtttctgctatgatgtagctttggagtacctggaatcatcttagttgggtgagactctttaaagtgcatccatgaagaaacctgtccatctattgagccagcagctgttgtacctgttacacttgtgcagaaagattttaatgtggggggtgggagacttttacatttgagaggtaaaagtattttttttatgaagttgtgtatcttaataaaaaggactgaattagtttttattactatattaaagcatcaacatttcatgccacataaattatatttaataagaaccagattgaaatgagaacgtattggtgtttgtacagtgaacatgccaccttttttctcatggtttcagtagagcagctaccacatgttgcatgagttcatactttctacgtggcatttttctccctttctaaaatgaaagctgatgaatcttaaaaggaagaagaaaagaaaagctgtgcaaattcatagtaaagttcgttttttatatgtttccagtgtagcagatctctatataaatatataaatatatataactggcttattttcttttaatgtgcaatgatggctggatcatttaaagttctttttagaaaataacataagccaaagactcaagtgtaaatatgtctatatggagaaagcacattatatttattggttacttacattccttttttgatggctaaaatactaccaccacacaatcatctttttttcctgaagaaagctttttctttagctaaaatcaattgtaaacgatttttgtagattattttttgtatgttttagtgtaagtagaagataaactttttattcataaaccaggaagcaatgttctttatagtgattctcttgtgtacatgcttgtgaattaaatttgtgtaaaatcccttggcaattgggtcttttaatataggaccaaattaaaacattttgctgaatatgtatagtttttcacaatttcattaggtaaataatggtttggtgatacattgagaaatgtacacattaaaaggccttgctgacaacttgcacaatgttgaacatagcctttaagcatcatttaaattttaaaggaatggagtttttcagcctgtggcccagcactggtcaagaaaacaagatggcaacatatatgctttcagggtcaaatttgagcaaactgtaaactgtcagggtgataaaatgtttctcttgatgtttacatgcacaagctttgcgttctgactataaaaagtgtgaacaaatcaatgccagattcctgttttgcgcattgtcatgggattcttaagtgaacctttctaaatgtggtcttgttcacatgctccacgtagctgtaacttcacatcatcagcttgcagtttgtaattgactaaagcattccagtgtcctctttctagattgccagctcatgacatggtgcttataaagatttaattaaagtaagaatgaaataaagtttttataattat

SEQ ID NO: 48 - DNA, 4323 bp, Homo sapiens
atggatacgactgcggcggcggccgtgcctgcttttgtggcgctcttgctcctctctccttggcctctcctgggatcggcccaaggccagttctccgcaggtggctgtacttttgatgatggtccaggggcctgtgattaccaccaggatctgtatgatgactttgaatgggtgcatgttagtgctcaagagcctcattatctaccacccgagatgccccaaggttcctatatgatagtggactcttcagatcacgaccctggagaaaaagccagacttcagctgcctacaatgaaggagaacgacactcactgcattgatttcagttacctattatatagccagaaaggactgaatcctggcactttgaacatattagttagggtgaataaaggacctcttgccaatccaatttggaatgtgactggattcactggtagagattggcttcgggctgagctagcagtgagcaccttttggcccaatgaatatcaggtaatatttgaagctgaagtctcaggggggagaagtggttatattgccattgatgacatccaagtactgagttatccttgtgataaatctcctcatttcctccgtctaggggatgtagaggtgaatgcagggcaaaacgctacatttcagtgcattgccacagggagagatgctgtgcataacaagttatggctccagagacgaaatggagaagatataccagtagcccagactaagaacatcaatcatagaaggtttgccgcttccttcagattgcaagaagtgacaaaaactgaccaggatttgtatcgctgtgtaactcagtcagaacgaggttccggtgtgtccaattttccccaacttattgtgagagaaccgccaagacccattgctcctcctcagcttcttggtgttgggcctacatatttgctgatccaactaaatgccaactcgatcattggcgatggtcctatcatcctgaaagaagtagagtaccgaatgacatcaggatcctggacagaaacccatgcagtcaatgctccaacttacaaattatggcatttagatccagataccgaatatgagatccgagttctacttacaagacctggtgaaggtggaacggggctcccaggacctccactaatcaccagaacaaaatgtgcagaacctatgagaaccccaaagacattaaagattgctgaaatacaggcaagacggattgctgtggactgggaatccttgggttacaacattacgcgttgccactcttttaatgtcactatctgctaccattacttccgtggtcacaacgagagcaaggcagactgtttggacatggaccccaaagcccctcagcatgttgtgaaccatctgccaccttatacaaatgtcagcctcaagatgatcctaaccaatccagagggaaggaaggagagtgaagagacaattattcaaactgatgaagatgtgcctggtcccgtaccagtaaaatctcttcaaggaacatcctttgaaaataagatcttcttgaactggaaagaacctttggatccaaatggaatcatcactcaatatgagatcagctatagcagtataagatcatttgatcctgcagttccagtggctggacctccccagactgtatcaaatttatggaacagtacacaccatgtctttatgcatctccaccctggaaccacgtaccagtttttcataagagccagcacggtcaaaggctttggtccagccacagccatcaatgtcaccaccaatatctcagctccaactttacctgactatgaaggagttgatgcctctctcaatgaaactgccaccacaataactgtattgttgagaccagcacaagccaaaggtgctcctatcagtgcttatcagattgttgtggaagaactgcacccacaccgaaccaagagagaagccggagccatggaatgctaccaggttcctgtcacataccaaaatgccatgagtgggggtgcaccgtattactttgcctgcagaactccccccggaaacctacctgagcctgccccgttcactgtgggtgacaatcggacctaccaaggcttttggaaccctcctttggctccgcgcaaaggatacaacatctatttccaggcgatgacgagtgtggagaaggaaactaaaacccagtgcgtacgcattgctacaaaagcagcagcaacagaagaaccagaagtgatcccagatcccgccaagcagacagacagagtggtgaaaatagcaggaattagtgctggaattttggtgttcatcctccttctcctagttgtcatattaattgtaaaaaagagcaaacttgctaaaaaacgcaaagatgccatggggaatacccggcaggagatgactcacatggtgaatgcaatggatcgaagttatgctgatcagagcactctgcatgcagaagatcctctttccatcaccttcatggaccaacataactttagtccaagatatgagaaccacagtgctacagcagagtccagtcgccttctagacgtacctcgctacctctgtgaggggacggaatccccttaccagacaggacagctgcatccagccatcagggtagctgatttactgcagcacattaatctcatgaagacatcagacagctatgggttcaaagaggaatatgagagcttttttgaaggacagtcagcatcttgggatgtagctaaaaaagatcaaaatagagcaaaaaaccgatatggaaacattatagcatatgatcactccagagtgattttgcaacccgtagaggatgatccttcctcagattatattaatgccaactatattgatggctaccagagaccaagtcattacattgcaacccaaggtcccgttcatgaaacagtgtatgatttctggaggatgatttggcaagaacaatctgcttgcattgtgatggttacaaatttagttgaggttggccgggttaaatgctataaatattggcctgatgatactgaagtttatggtgacttcaaagtaacgtgtgtagaaatggaaccacttgctgaatatgtagttaggacattcaccctggaaaggagggggtacaatgaaatccgtgaagttaaacagttccatttcacgggctggcctgaccatggagtgccctaccatgctacagggctgctttcctttatccggcgagtcaagttatcaaaccctcccagtgctggccccatcgttgtacattgcagtgctggtgctggacgaactggctgctacattgtgattgacatcatgctagacatggctgaaagagagggtgttgttgatatttacaattgtgtcaaagccttaagatctcggcgtattaatatggtccagacagaggaacagtacatttttattcatgatgccattttagaagcctgcttatgtggagaaactgccatacctgtctgtgaatttaaagctgcatattttgatatgattagaatagactcccagactaactcttcacatctcaaggatgaatttcagactctgaattcagtcacccctcgactacaagctgaagactgcagtatagcgtgcctgccaaggaaccatgacaagaaccgtttcatggacatgctgccacctgacagatgtctgccttttttaattacaattgatggggagagcagtaactacatcaatgctgctcttatggacagctacaggcaaccagctgctttcatcgtcacacaataccctctgccaaacactgtaaaagacttctggagattagtgtatgattatggctgtacctccattgtgatgttaaacgaagtcgacttgtcccagggctgccctcagtactggccagaggaagggatgctacgatatggccccatccaagtggaatgtatgtcttgttcaatggactgtgatgtgatcaaccggatttttaggatatgcaatctaacaagaccacaggaaggttatctgatggtgcaacagtttcagtacctaggatgggcttctcatcgagaagtgcctggatccaaaaggtcattcttgaaactgatacttcaggtggaaaagtggcaggaggaatgcaaggagggggaaggccggacgattatccactgcctaaatggtggcgggcgaagtggcatgttctgtgctataggcatcgttgttgaaatggtgaaacggcaaaatgttgtcgatgttttccatgcagtaaagacactgaggaacagcaagccaaacatggtggaagccccggagcaataccgtttctgctatgatgtagctttggagtacctggaatcatcttag

SEQ ID NO: 49 - DNA, 38101 bp, Mus musculus
  misc_feature (4575)..(4634): "n" at positions 4575 through 4634 can be any base.
ctgttaccctgggacagtatggcacagggagtgggtgatggacgctgggcagggcatgttctgtgaaacttgattacttgaatgggcccaccttttgcccaaggctctcccaacggaggccggaccccacaaccctgttattagtggtactgtttctggtgggctgaaatgtggtcagtcctgatagaattagctacctctttggatcaggggactttggtttgatgtggcatagaagaatgaacagcttgggggagttcgtgaactcctatctttgaaggtatttgagcagtggctagtggtttgtgctgtagcagatcctggccttggactggaactgtagcagacatgacaccgagtgtcctgtgctctgtgtgactttaaagtcatccaccccgggctgtgtgagtctgaccttgtctttttctccttcagatactgcccctgcagagacaccccgagggaaaccccagatcagcactagctcatcccagacaccgctcctccagtgggtcctcactctcagcttcctgttggcaacagtggcagtgggaatttatgccatgtaaatgcaatactggcccccaggggctgtgaactctgtccaatgtggccttctctctgtaagggagaatcttgcctggctctcttctcttgggcctctaagaaagcttttggggtccctagcccactccctgtgtttcctttctctctggaatggagggagatacctgacacagttccctcaccaaaagcacatccagccagtggcctgaactttgaaaccagcagccccaaatcctgcagcagagccccaaaactggcctgtaaaagcagctgttctgagcccagtgcccatggttgtaagcatccatgttgactgaccacgactgctgtcccccagtgccatggccactttgatatccgtttccagacatttctgtctcgtatttctgtcttgttttttattatttccccagttctaccagagtaatggtattttgttgttttgttttgtcttgtttttcctaacaaagtggggctatcttttgaggggtgggtgggaaagaattatttaatagttgtaaccttggtctctaacttctgtgtgaaataataaatggcattatctaacagtcactagaagtgcattcatgtctatgctgtctatgagcagggccctgctcatcttgtctcttcagtgtctggcaggaagagggcaggtgaaggtagcattggtagctgccatggttggctgtgcctgagatttggaagtgagctttaagcagttgggcaaagcagttgggcagattttccagactgtgtttgtgtgtacacagatgtgtgtgtgtgtgtgtgtgtgtgtgtgtgtgcatgtgaaggccagagatcaacctcaggtgtgtttatgaactgtaggatctcactatgcaactctgttggaggaactccctatgtagaccagctggccttgagctacaggtatcacaggcctgcctctgccttcatgccaagattacatatgaaagctaccacacctggccaatccaccttgttttttggggggagataggatggtacctgtacataagacagggtctctcttacgtagtcctggctggccttaagtctagctttgaactcattgagttcttcctacctctgccttccaagagctgggtttaaagatatgtactaccacacctggtgagtccactttgtttttcgagtgctaggattacagacacacaccaccatgtctgttttacatgggctccaactcaggtctttactgattgacctatctcttcagccccaacacttccatatttaattaggatgaaatgggcagagctgggataaagctgatacgctctgagtaacgatacttggagactggaggcaaatgcctggcttcgtgttttctcttctagcttcacttactgtgagtacacttattggtatgcaagaccacagggctcagtgtggggagacagctccctccttccatttttgtaaggtttttacttctggaggttgagctcaggctcgggcagtaagcactttacctgctgaaccatctgctactccactttggagttggtcacttaaccccacagtgactcagattcaccgcctgtgacaatacaatgatgctgctgacctcacctgtgtgtcttgagaagcaagttaaattccaaggccttccatcactcctagctcgcttatgcacagaaagccagtgtcttctgatcattgtacctcccgctctgggaatgggaaaacatcactggaggcagaacagggatgaggtacctactatgtcctaccagtaccagagggctgagagttaggagatctttgtcccccatactgactctattaccaggtcttgggcacaatgcttcaaatctcattttgctcactggaaaaatgagcgatacttctgtctttaactgctgaagagggaatatagtgatgtcaaaatactagtctgcacagaaactccagaactccatggaggcacatagctacagagatcagaggtggtatctcagagtcacgatacaagaaaggcattctgggagtcttatatacatgcagccaggtccagaagtcattcttttcttttctttttttttttttttaatgtattgtgataaagtaagaaaagttgggggagggttgctaaagagctggctcagtgcttaaaagcactgcctgctcttccagaagaccctggtttgattcccagcacccacatggtggcttataacagtttatatgtctagttccaggggatctaatggctttttctgtcctctttagcaccaggcacacatgcagtacactgacttatgtgcaggcaaaacatctatacatataaaattaaatgaacacaaaggctagggatatagctaagtggtagaatgcttgcttagcatataggatgccctgggttcagacaccagtacctaaagggtgagcaaacaaagggaagaaaagggaaaaaagagaaaaacctgggcaatggtggcctttaatcccagcacttgggaggcagaggcaggcagatttctggccatttcaaggccagcctggcctacagagcgagttccaggacagtcagggctacacagagaaaccctgttttgagaaaaaaagaaagaaaagaaagaaagaaaaagaaaaagaaagaaaaacaattttgaattctataaaagaatagactttctgtcaattgtcaagagatgagcaaaactagttaaaactggacagacttagaaagaggactaactatatcaataggaaacagcgtccagcgtgaacggactcgcggccccgtctttctttccagcgctgggaatcagatccagggctttgttctcattaggcgaggctctgccactgagctacaccatctactggtgcattggtggatgagcattttacttcccagcacaagtggtgctgtagattaaatctaggacccttacccaagccaattctgtgctcttcttctaagccacagttgcggccggccctgggccttttagagaatcttagagattagccaacaggtcctgtcctcagggttggctggagcaaactgactgagattttgtcacctttagttttctctggctagggataaggccttgagcctttccaaatattcgtggttattcaagtgtttactgatagaggcaaagcggggataggcaggaagagagcccagccaccctcacctgtctccatctggctcatgtttctagcttactggtcaagagtttcaacacaggggctggagagattatggctcacttcctgagcctagttcctagtattcacatggtgacttacaagtatccattttaggggctctcacaccttctgatgcacaaacaatcatgcataggtgcacatttgtggggtggtacaccaaatctatacaggctaccagcaaagttgggtgtcttcctcagtcactctccactttgttttttaattaatttatttttggtagtgagacgtgaactcagggcctcacacatgctgggaaggcactctactgtggggctgagggatgtaggggaaggggggtggggagagagcccatggctggccagagttcctgtgctctgggcaggcagacataggaggactgctggaccctttccactcggccctgggtgggcatctggctgtgtgaaaccactgaccccactcggtgggggtgggggggtggacaaggggcagtctgcaataccaggggccccgggggcaacattctcagccccggagatacaggagagagggcagagggagagaacttcccacgcaggctggctggagcacaggaaggccttcagataggagattaggcgcggctcattaggaaaagcctatcccatcatccaagcacagcaggccttgatgaacagagacagtttatggttttagagctttattgtagaaaggcagagggaaagagagagaagatggaaagacagagagagagagagaccggccatggccaagaggagggaagggggaaagagggaaagaggaaannnnnnnnnnnnnnnnnnnnnnnnnnnnnnnnnnnnnnnnnnnnnnnnnnnnnnnnnnnnagagagagagagagagagagagagagagagagaaagagagagaagagaaagtaagagaggttagacagtaagaaaggttagagattgaggaggggccaagcagcccctcttatggtgggcttgttatcttgttgttgctaggtaactggggaggagtctagcctgaaggtcagaagcttgggacattgtgtatgtgactaaaagccacgcttctcctgtgggggctggaggggcggtaacttctacaggagtcaggggtccaggagacatgagggaacacctacgtcccatgtaggtgaattatcaccaccaggttctactggagttcagacctcagctcgactggagaccagactgtctgtgtatagcccaatgccccacactctaccactgagctagattcccagccctgtgctaatttttggaacaaggtctcttatgaatttaaaacttatcaactgattagactggctgaccagcaagccttggagatttgccgtctccacttttctagactgggattacaggcaaatgctgtatccatcttttctaagtgggtacagaggaaccaaaaccaggtcttcatgttcgcacagcaaacactttactgaatgagtcacctccctgactccttaacttctccatgtgatctatgtacggcaaaatgattttgatttaaaaaaatggacctgcatggtgcctttactcccagcactccagaggtagagggcagggggatctctgagttcatggctgacctggtctacagagtgagttccaggataaccagggttacacagagaagagtttgtaaatagatccatgtatatatatattttaaactttctattgattctttgtgaatttcatattgtgtaccccaatcccacgcatctccccatcccttcctatccaacctgtgcccttgaagaaaaagtaaaaaagaaaaacccaaaaacatctcaccatggaaactgcagtatgtcactgagtgtcccacagtatagccttttgtccacatttctttacttgcaaatgctcattgtaatgagtctggtttgaggcctctggcttctgctgtaccatcaatactggatcttcactaggacttctcttggatatactgtttgttgctctgtgtcatggagatcctgcagctttgattctgcaggacagacccattcaggagctccagcagttcatagatggactggatgttggtataggctaactcaaaagccctggatttgggtttgggctggtagctgagttgctcagcccaccagttctcctgcacccctggcccaggcaaggagtgggaccagttatgctgtgcccaaggcatttgggccaacattctcacaaccacaccacggggactagctctccagcactgctctggctagctcactcaagtgccacaggatataggcatacattttttgcaacctacttttttttttccttcaagatagggtttctcagtatagctctggctgtcctagaacttactttataggccaggttggccttgaactcagaaatccacctgcctctgtctcccaagtgttgggattaaaggcatgcgccactactatccagcgcaacctacttttaataagggttcaacctctcttctagcccaccactcagcaaaggtagaaagagaaaagttattaggatatgggagaggtggacctgttcagcaatagttctttggggtgagctttgatcttcttgggcagcagttcagtcctgaagcaaacaccaaatatgacccagcagctgtagacccgtcctctaggcaggcagacaccaggcacacattaggaatgaaccggcaactagtcaagtcctttcagcaagcagacatcaagtaggaagcagcaactatagctcaatcctgaagaaattgccaggctcaccaactagcctgaggcaaggccacagccgtgacaagctgctgcaggaacctcacgagcaggttcttggataactttctttcaatggcagtgttaccacaagttgagctcaacttgtgtaaggtgaatgaatacatgtgtgtctttagtgaagaatagcaaggtggagcaaatcaaaccaaggctcagtgctcgtctcccactgtctgtggagtcctatttatactccttcatcaactgtccttttacatgactgctatatccaaacatcctttcacctgtgtctgcgtcaggaaaacagtctttcacgtgtttgctttggcaagacattctttcacctttgtgtcccagcaaaacatcgtttgatataaccaactatccaaagacctagaagtttccacttcaacagctggcaaggagttgggccggctctcatgcccttggagccaactctacccgtgcttctcaggcaagtggcagggcaaggtctgcccctgacaataacatggtcccaagaggcagtccagatcagggatacctacatggcctttggtgttaacatggaccatggacactaacacagacccctatttgccgtatggtcatggacccaggcatggcccttagcagcaggatagactgggacttcaccctggcctcagaaggcagtgcaggctcctcacatctggcggttcctcagcgcttttgcacgtccggttccgtctctcttcacagtgcttaactcatcctgcttctctttctctcccatctttctaccacacacttgcacattgtagtggtgcccatgctatgccatatggcaggtgggcctctgggtttctatttaaaaaaaaaaaatctttccagccaggcttgatgtcaaatgcctttaatcctagaggcagagacagatggttctctaccgattcagggctatcctgatctgcatagaaagttccagaccagccaaagccactgtgaagaccctactttaaaaacaacaacaacaacaacaacaacaacaacaacaaaactttctgaatctgtactttctatcccttttctctttgtgtgtgtggcagccaggtatctgtactctctgagttacttcacctacctccttgaaccaaatttttgtcttcctcgtaattcaccttataatctcatttataaaatcccttcaccagtctaataaatccccttttgcaatgttaagaaaaccttttgttaaggaaacaacacattcctctcccttcccaccaggttagtttagggtcattcaactccaaagtccccaagttgcctgtttaatggatctgaaagacttatgccttcattcctctctccttaagtctatctatccatttcttttttcttttaagagttgttatttttaagtccttcctttctttctttctccccaaacagggtttctttgtattcctgctttcctggaattgctcaatctcagcctctcctctgtagagctctgtaaagcctctgcctcctgagtgctgggatgaaaggcgtgtgccacatctggcagttgatttatatgtaaagatatatgtatgtgttctgcctatttattgcatgcatacctggtgcctgtagaagtcaaaagagggcatcaggctccctggatggttgtgagccaccgtagagaactgattgtctacaagagcagtcccagcagctcggcatttaattgccaagccatgtcgccaggactctgtctttttttttttttttttggtttttccagacagggtttctctgtgtagccctggatgtcctggaactcactttgtagaccaggctggcctcgaactcagaaattcgcctgcctctgcctcccaagtgctgggattaaaggcgtgcaccaccatgcccaggcataggactctgtcttttgaccagtgaatttgctgactctgcttcactctgacttttgctaaaattctgttcagtgcctaagtccagcattccatctgtacctgaggggaagccccagccaacaatgcggaattacatccctgctattggtgacaactgttaagaacagcctcgattttggtcaagaagcaaataaagcaatctaaaataaaatgtgttaaacctgtcttggcacacagggattaccatgaaatgctgagaaaaccaagtcttagattcacctggtatttttttttaattgcaaaaatgctcaaactttattctctgtaaatatatgtttgaatggttgctgcagcaataggtttccacttgttcgtgtggatgggaggaactcaaaggaaaatctacactaaggttgctatgctaaatctgcctccccccccccccaagatttccatttggaatttggccatgaattttgcatggtttaagcattgccaaggaattaaaaaagttctacagtcatcataattattcgtctgaatctgaatgaaagaaaacatccctggcttcctgggctttggtactatctgagtaggggaaggtgagccacctggtcccaaagctgcggagacagcactctggcacctcctgccgggctggagcaagagtacacctcaggcatactgctttctcacagcagctctgaaaggggtggttttctcatatacttattttaaaggcagggtttcttcagcctccctagtgctagcagatatgggggagggctgataagtctactttttatttatgtgtctgtatccaattgctcagtcattgctccagtccgtttccttttacttaaaaaaaaagtgtacttatgtacagatacatatatctttctctctctacatctaacatgtacgtggcccatagaggccaggagaggacattgggttctctggagcaggagtcacaggcagttctgagcccctgactagggtactgagaacagagactgggtcttctaaaagtacagcaaacgctattgaccaccgatccatctctcaagtcccacctttttacttgggaaaggggctccctaagtcacccaggctggccttgaacttgcgatcctcctgcttagactttacgaggagcggggctgacagacctgcgccactgggctaggttttctccgaagacctaaggtttaaacgctcacaaagctcccgagcctctccgccatctttgctcggttagctgctagcgccaagaactttcgcgccaaaacgtccagcctcacaaaatggagaccggaaagagttgactcgtgacgtcaccaagacgccacagccaatcatcttgggaaccaggccttggaggcgggactcaaccggcgcagagcagtccaatagctatccgcggcgctgaacgaaccaataggagcgcagagaccgcggtggacaaacgcggaggctggtttttcccgcgaaagtcggcttcctctaggagggctgaggttcgtgtggcgcgccgctgtgaggtgagggaattgcgggaccccgtctggggaagctcccgccgccccggggtgctcagctctctgtctcccttgacccaggtacagtcatgtcgggcttcgacgacccgggcattttctacagcgacagcttcggtggcgaccccggtgcggaagagggccaggcccgcaagtcgcaactgcagaggcgattcaaggagttcctgagacagtaccgagtgggcaccgatcgcacgggcttcaccttcaagtacaggtgcgacagtgtccgtgaaccattcttacgggggacgccttttcttgacagtccctcttcaggcctaaatttaggatagagtggtctacaattaggtgtcttttgagagaggtgggggcattggtgcctgtgaggaccggggtgcacaggcactgctgctgacggtccctcaatgcacccttcctgtccctctgcccctttgttgaccactaaagagatgaactcaagcggcattacaacctgggtgaatactggatcgaggtggagatggaggacctggccagttttgacgaggaactggctgaccacttgcataaacagccggccgagcacttacagctggtgagtagcacccatttcagagcctcctaaacccgggccctgccccatcatcaccagcagcttatgcctttcctcttcttcagcttgaggaagctgccaaggaggtggcagatgaggtgacccggccccggccagctggagatgagctgctccaagacatccaggtcatgctcaagtcagatgccagcccgtcgagcattcggattctgaaggtaggagtttattgaatggctagtcagggtggcatggccgctgtgtggtgcagaaggcgtctgagacaggtagcttggagcaccagatgtgtgaccctgaccaagacatttgacttaacttagtctttatcctgtgtaaaattacctcaatggggttgatgtcttaaagggaaggcagagttgagtcttgcagaacaacagtgagttcctatccatcagggagactaaaaaaatagtaaatgccatccataactgggaggcagaagtagaagcctggtgtacatgagaccctgtctcgaaaagaaaagaacgtggggacaatgtggctattgctgagagggtagagagttgaggaagaatactttagaggaagtgttgttggagctgaaattgattgatgtgtagccagtcgggtcaaaaccttgaagagtgttccaccagactcagtctaatgaaggattgcaacagggaaaccaatggaaatcatctcgtaggtgtcctctggtacaagtcattccttgatttaagcctgaatcataattaaggcttaagccctttagttttgtttcgttgttttgtttttttccgagacagggtttctctgtatagccctggctgtcctggaactcactctgtagaccaggccggcattgaattcagaaatccgcctgcctctgcctcccgagtgctgggattaattgtcctacattcttatcactggcatgcttgtggccctttcatagtttaagagtcttgtgcatgtgtgtgttctctaatctagcccaagatgccccgagttggagaaatggtagggagattgtctcacctgtagactggtgaggctggcacagaaagcaatggaatgtgtgagaatgtttcactgtgtatagtgaagataacagagactaaaaagaagaggacttgtcatctagcttaatgattagtagtaacaggccagccattttgactttactgactcctaacagtatatgtccctgaaaggtgaggattttattttgaagcagggtttcattacatagcagctctggctgtccggaacttactatatagactggtctggctttgaactcagatccacctgtctctgtctctaaagtgatggtatcaaaggtgtgcaccaccacgtctggcacaaggaatcatttttacagcatgactattaatgaatggtctaatgaatacattctaaagagacactttagctatcagaccactaaacaattgtgccccctcccccccgaatttgggatttcctcaggaatctcattcatacctgggaaagaaaagcctgaaccactagtggaaactcttatctctagaaatgggttttacagtagagaaacagtgatgggttaatggtgggtgggaccacacagcttgatcaagccgacttgatagacatacccctgactctgtttaaactttgatctaactttaggatgcctgaggatgggctcaggggatgtggataaagagtctacccaatctctttgctcttcttcccagggtgaccctcttgaacacgtctcccccttctgctttttactgtgaatattttaattggctacttgaggatgagtggctaatctggcttcttggtatataggtgtgaccctttgtttggtaacatgatcatagtaacatcacaattaacagttagtgttagtatctagtgagatggagtcgttaagatggcgaacctgaggctgacagaatgtccatagcagttggtgacaaaattgagctagcaccagggcctctgtcttgtgtcaattctctggaacagcacaggaagctactgtcagggctggagtttgggtcttctgggttttgtcgtaaaatatgtttcatgtttcccttgtctcccagtcccttgccatgctctgcaaggcccttgaaaagtgagtgcttgtgtatgaggctcctgaacctggtgcccaggttacctcacattaggtgggtgctctggaaagtctgagctaaactatgagccatggatttgtcaccctccagatcttgcccgtgtcattcctcagcccttcacataactcctcgttctccttaatcatcaagtcttcttgtggctttgttacagtcagacatgatgtcacacctggtgaagatccctggcatcatcatttcagcctctgcagtccgtgccaaggctactcgtatctccattcagtgccgcagctgccacaataccctcaccaatatcgccatgcgcccaggcctagagggctatgcccttcccaggaagtgcaatatgtgagtgtgtagccaaagggactctggggaatgacctgaagtatcaaaaaagctggcaaccctggcaagtgctgcctgtactgcttgttagagaccttaaggcaaagactgggaagcactctatccttgagttaggcaggatcaatatacccagcccagtgtcccttcaggcagttgaaattttgccccacctggataataatccacatggcctgtgtgtggaatccaaggttggggaggaaacagtccaggggattgagtctatatggaaactgtttctctgtctctctaagcccctggctatcctggagctcactcgtatagaccaggctggctttgaactcaaaaatttgtctgcctctgcctctcgagtgttgggtggcatgtgccatcaccagctggcttacagaatcttctaaagcaaactggattgctgggctagaccagtacagtgtgcccactgtactgcctaagaacatgactatactacttgatatttagcatattgttaaactatagtggtagaatgtgtggacttccagttagtaggactttaaaaatttactgtatagttcttaacagaaaacatttgccaacttggacctaacaaactctacttgcatcttggctgcttttggctttctcttctagtttcttatcagcttccacattgcctgaggcatactggcattgtcctagactgttgcctaccctcacctgctgccacagagtagctcattcctatccccttgtccaccttcactgctcttcagtctattccctatacagaagctcttccatagcctgccttggtctagtgcacttgcattctcttctccctaagtggtcttcactcagactgccacagtgtccctgcatgtccttgtcatctaagatgccttccttatcctatgtttgcatttggtacatacatgtctgcacactctcatctgcctatttttactgcatgcctttatattatgcagatggtcttcaatcctgatgggaatttagcttcacagaccagggactttaggtttactgctatgtgtccttacctatatttgctgaagagacttactgtataggcctcagagtctgtaccctcagaatggtctagaagtggtaaaataaaatctcactagaaaagatactaggctaagaatacagtttagtaagggattggatgatatagctccttcacctatgaggacaagaggcctcatgagggaacgatgtgtgcctgccacctcagtgtgacgtggagaagccaagatccctgaagatctgactttgaatctagcaccctgccctaggtctttcccagctgtgttccagctctgccttataatgctgttgcctctcagggctgacttgttgaatgggtgtgcgtgcctcacctttgggttctcagggtagttctagtgaccacttcttcccctgcccagggatcaggctgggcgcccaaagtgcccactggatccatacttcatcatgcctgacaagtgcaagtgtgtggacttccagactctgaaactgcaggagctgcctgatgcagtccctcatggtgagatgcccaggcacatgcagctttattgtgacaggtaagtgtaagtatgtaggggctgtgggttggtgtccatgccactctggtacagcatagagatcgtctcgtgcccagtgtgtaagctagagctcttgctttgtctggtgcttctcattgacattggcattttttgtctcccatagtctgcaaagcatgaccactcctattttacatgagtactgtaaactgggggagggggtcaggtgactttgtgagtagaactaaggcctgtgtatcttcagagactagccctctcagcacagagctggataactagcagcagtgctagctcctatctagctgacataccaaccttcctgttaagacctcctggtttggttgaatagttacaaaatgacctagaagaaggcttacaggtccctgagttctttttgtttgtttgtttgtttttcgagacagggtttctctgtagccctagctgtcctggaactcactttgtagaccaggctggcctcgaactcagaaatccgcctgcttctgcctcccgagtggagtgctgggattaaaggcgtgcgccaccacgcccggcagtccctgagttcttaccctgggctcatatacctgatgatgagtacagatgtaaaactttctggggagtaaatccacagttgtcagctttatcattggcaagaatgtgccactcgggatcttgggaaagctatattctaagtccttttttttttcaatcagtaaaatggcctgaactatttcaaagtgcctgaaaaggcatatcaagagtttaacacaattccttagcacaactgagcgtattgtattagagtattctctgagtatccaaagagcttgagaattacattgtggaatgagtaggaagttaataggacagtgtaggtggcagaaacggttctcggtgaaactgatttgatagtatatagaacacctttgagtttgttaccttgcttgattcccaacagctgagacaagtcaaagtcatctctccaagctcagagaggcactgtgatttctctgaagtcacacagctactttatggtccttgaagtaacactgattccagggaaacatggaggctttggtcggttaacatcttattgttaaaagggtgactaaaaacctagaggcaaattgacttggctgagctcagggagtgtggcagaggcagaaatggagagtggcactggcactagcaagtaatccttaagggtttgaggagaaagttttcccaaaggagcttggtcacagctcaaatgacctaggacttctgaaggctgggcaagggcaccgcgcctcacctctaccagtacagcttctgacctcttgaattcagtgagagtcaggccagtattataacactgtactaactatccagactgatgtgtaggtagcaagagtagagaaaggttctcttactctagaccatgcaaggactgagctgacttcatagtgatacttagggtagaaatactaagctgaccacactgtgatttgcttttctttatcttccctccctgtactttactcaggtacctgtgtgacaaggttgttcctgggaacagggtcaccatcatgggcatttattccatcaagaagtttggcttgaaccccagcaagggccgggacagggtaggtgtgggcatccggagctcgtacatccgagtgctgggcatccaggtggacacagatggctctggtgagttgctttgaatttctacacttctcttaacaagctgctcatgtgataacctggcattcttgaattgctcaaaccattaggataggatgtgctttacttgtgtgtgtgtgtgtgtgtgtgtgtgtgtgtgtgtgtgtgtgtgtgcacgcgcgcgcgtgcatgcgtttgtgtgtgcacgcgcgcgcgtgccatgcgtttgtgtgtgcatgcatgtcgtatgtgtttgtgtgtgtatggtgggcatactaggcagatagtctaccacttagctatattccctatcctagagtgttcatttttacagtaagcaaaaatttgttgccctaaaaatgtctatttattggtttagttgtagctcctgccctgaggttgttgattgagttgcatgactcagtgctatagatgggatgtggtgtgtatcctgtgctgcatcttagtaggtggagagaaaaaagtgcatgagggttgagcagacagaatctagttggaagagatcccctaaaggataggtgtctgacactgagctgctttaattgaggtctggaaaaggaactagagcattgtgggaaggcttcatctatcaggagtgtcagcaatagctttgaaggatggaggtgcgaaggaggatcttttcaagtatagaggagagttggtgggaactcaaggctggtgggggtgcaaatgacaggatctctagtaggagttgggttgagtggtaggggccaagtaaatagcctcaactctcagatggagtagagagctcatgcttacatctaggggcagtgggagtcaccttggggattggtccctacatatggtctagagtgatggagttttgagtactgtgtccatattctatgttggtagaaactcccttggttaaaactggaaaagccacatattcatctagccatattccagactttaactctccttgacttgccatatcacttaatgttaccatcttctgaaactggttcttccttagccatcccttcccttgcttagcaaaccctccagatcttcctcagttcccttttttttaatcccctaacctcagcaagcatgctgtttggctgctctactttcatccccagggctgaccacgtcttacctccctgctctgagtcccactctttctcctggatttggattttcaagcccctctgccacttggtcccaccctaccttctccattcctcagcaactcaagtgaaccatgctgttttgatcaagcaattgtgttggttctctactctgtctgcattatgagagactttccagtggtccccaagggcactgtgatctggcctgattgtatggaaccttcttttcctctctggatctttgagatttgaaagactgatatagtcctgtactcttaactttcctgagtaagactgtgtgcgtcctcctggtgctgagagctgttggtgtgtgtatgttgacagaggtcagggtgttcctgatctaggtctaggcccagcagtaggctggaggagatgccccttgctcatgtatgcacctgttccctcctaggccgaagctttgctgggtctgtcagcccacaggaagaggaggaatttcgtcgcctggctgccctccccaacatatatgagctcatctccaagagcatttccccctccatctttgggggcatggatatgaagaaggccattgcctgcctgctttttgggggttcccggaagaggtaaggggtctgggaggaaggtgctgatgacaaggctgctgcaggaggatatctgtgtgatgaggaccaggtgtgttcttccatgtctcccaggtccctcagcctgctggccctggggagcacagtgggaaactctttggtctaatgtgagagatgccaccttgaaccaaagtttctgaatgagacctgtgaaatacctgacacttagaaattgtcatatgtccttttcctcttcctctttccttccttcctttctggtttttttttctttctttttttttttcttttagatttatttattatatcttaagtacactgtagctgacttcagatacaccagatttcattacaggtggttgttagtcaccatgtgtttgctgggatttgaactcaggacctttggaagagcaactgctgagccatctctccagcccctcctcttcctttttctttttccttacctttccttctctctctgtctctctctctcctttttttttttttaagatttatttatttattatatgtaagtacactttagctgtccttagacacaccagaagagggcatcagatctcattacagatggttgtgagccaccatgtggttgctgggatttgaactcatgatctctggaagagcagtcagtgttcttaaccgctgagccatctctccagccctttctttcttttttaagattttatgtacatgaacatactgtcgctttcttcatacacactggaagagggcatcagataatattacgactggttgtgagccaccatgtgactgatagaaattgaactcaggacctctggaagagtagtcttaactgagccatctctagcctgcttttctttctttcttttttcttttggtttttctttttaaacaggtcttattatgtaatcaagctgtctttcaaattcatgatcctcctgcttcggtctcccagattctaagattagagatgttggtcaccattcctggcttcctgtgttcttttgaaactctaaaataattgagctcaagactgtagcagcagtgacagtctattctagtggctactgtgtaatatgctttttgtactacattcagaacattcttgtaaatgcttcatctgtcctgaacccagcccattctctcagcagtctatatggatgttactgttgtattcatttcatagatgaagaagctgaggcacagagaatgtaaggacttacttcaggtaacaggttgggctggattctgccctatgtctactcttcagtgtgcacagccctcagtgccatttatgttacttcccttcctgagaaataccttaccaatgttaggctaggaatgagagaacggggtgtgagcttgtttctgggccagactctgtcatttccacctgttctgagactcttacgggagggtgaccagcccacataaagccaagagtgctgatacataactataatgctagaatctggaagactaaggtgggaagatcatggattagttcagaggatagccctcaagtagattcttactttgtcttctacctacctatcgtctctaggctcccagatggactcactcgccgaggtgatatcaacttgctgatgttgggagaccctggtacagccaagtctcagcttctgaagtttgtggagaagtgctctcccattggggtaagtggctgcagacaactttctagtggcttaggtgttccgcagggaggaaggctacagagtagagttgcctagttcctagacatgcatggggtctgattcaaccacatcctcttcctcattcatcttggctctggtcaggatggcagagggggtttgaaaaggaaggtgtgtacatagaggtgggtggtaagagcattagactgagtcaggcttgctttgcttctcagcctggcagtggacttggaagaggtagcctagattccctgagcatcagcttatactcatttgctaagtaatgacgctgcttatgatagtagctggaatcaagaaggaccagatgcttgctgaagtacctactaagtttttactcatttaactatttgtcttcttgtgaagtgctcctgctcatgttatgtattggataaggagtggagcggtaaagtgtcttgctcaagatcccactgctggggaactttagaacaaggttcaaggcagtgtgtctaatgacccaggtgccctgagtctgggagggatcagggagaggagggtggatgtgacaactgactagtggtctgtgaaatgggggaagtggtgcttttggatggagaggaggttgctaaagctaaccacattggcactgtctcacagaaatatcaaggcctgaaaatgtaagttgtgccatgttaagtcttatagaaagtaagaataggtggaattcatttgtggtttttttgtttttgtttttcgagacagggtttctctgtatagtcctggctgtcctggaactcacttcatagaccaggctggcctagaaatcagaaatctgcctgcctctgcctcccgagtgctgggattaaaggcctgtgccaccaccgcccggctggaattcatttgtataatctgtttagcctgtagtctaatataagcttttttttccctttcagtgtagttaaaccccaaatcttgtgcatgttaggcaaatattttaccactgaggtgcatcccaggcttataacatgcaagtattgagtatttggcattcatgttagcacaatgtgacctgagtatgtctcacatgcacctcaggtaggatttactgtatttcaaggggtaaatacctgtatgctacagatgatggactcaggatagagacctcctaaaagccaggaatccccaaccctgaggccagcttcaaatatattcttttctggggatcaatacttaatgtcaccgggatatgctgtagctcaggtgaaccttccaaagaggaaggaaaggctgaggcccagttaggccttgagttctgtactgttcaaccagttttgcagcgtgatgtgggtaagtcatagccctctgagctcttgccctttggggctggcactaagtactgacacctcctgtctcccccaggtgtacacatctgggaaaggtagcagtgctgctggcttgactgcctcagtgatacgggacccctcatctcgaaacttcatcatggaaggtggagccatggttctggccgatggtggggttgtctgtattgatgagtttgacaaggtgagtctaagtcttctagtcacaggactggggtgtgtggcctcaggtgtggtagcagatacctcctgagagacttatatatagttcttgtgcccatcactctgggggaacttgggataggttgctttgcttctctggggtactctggaaaaaagtgaaagccaagcccgtgtgattatctgctattgactggcctgaagtctactacagaatggttacggttcctagatttttctgccactctacccagcttgggatgggattctgatagacaaactctcaatgcagatgcgggaagatgaccgtgttgcaatccatgaggctatggagcagcagaccatctccattgctaaagtgagtgacagctacccttcagcaatcctaagtcctcctaaggctgcactaatgtgtgctgccaagtcctctttgcccaacgctgtgctagcagcaacgggcctggaactgggggtgggggagcaagagtgcacacatgtaagcatgtacacatatatatgcgtgtacataatgtatgagttcatatgttcatatgtgatggagaggcctgtcccaggatttttggttatttgctccatttactcccctttctacttcaggctgggatcactaccaccttgaactctcgctgctctgttctggctgcagccaactcagtgtttggccgatgggatgagacaaaaggggaggacaatattgacttcatgcctaccatcttgtcccgatttgatatgatcttcatcgtcaaagatgagcacaatgaggagagggacatggtacgtctcgggctaggctggtgacaacagataggttcatggtcatgaaattgaataagagatttagccacagaaatgctagtggttagatagtctggaaggaagcatatgaaatgacttgttagtggcttatggagtgttggagaggaacctagggtcctaagacctaggtatgccctgtgtgtgtgtgtgtttttttttttttttttaagcaagaagctaaaaaactgagctctgctctccacccttgttagtaaatttctgaaagaaaatagcttatggaatttgataaggctatgagtatagtatgggtatacctatgggtatagttcccatgaggctctaggttgttggaccagctgtctgtttctgcttcccttttggaggctttaattcttagacagttgctccctgtgatggtaaagacaaagcctatcttggccaggctgaggagtgcaggctttctgaactctggctggctggctcagactccttttcaagatggctgatttaatctggtgcctccctgcttctctgaattgctctgcttggtctcaaactaactttggcaatatgttttaattttccggctcattctcattttctggcttgttctgtcttcatccctgtctagtttgttctttttctgaaacctatctctacaattgtcccagtaaaactgcctccttctcttctttgtactgccccttaagtagcttctttttcttttcttgtgagacttgggcatatctttttctgtcaaatttttctctgattcatcagtttgtctgccactcaattagatatcactttcaaacatgggtgtttccttctacaaattaattttaccttcattgtttgggattaaagggctgagccatgccataacacgaaataaaatctcagggttcatagtgtgatcaaatatcctgcaacattagctattgatttaattaactgtcctgaaaggaagaagatgaagccttttctagtagttataatagaagtggcagaatagcttgggtattgtccgctgtccatgcttaagtagatacttgccctagttaggacagataggccaaaagtactggaacacaagcatttgccgtattatttcacctcattggcttggatatgtccagtttccatgcttaagtagatagttgccccagtgagagtggacaggccaaagggactggagcagaagcacttgccatattattttatcttgtctgttaaacctgtgagctgacccagtgttccctgtgctccttagatgctagccaaacatgtgatgactctgcatgtgagtgcactgacacagacacaggctgtggagggtgagatcgacctggccaagatgaagaagttcattgcctactgccgagcgtgagtgctgggagataacatgggctttttggatagagggagagcccagtcctgttctgctccttacctaggatttcctggtaaccctgttctgaactttgttctattcttacctgtcactgtgaccctctccatgagtttaacttttctcatcctcttaagtgagggaggtagagtggaggagctgaagactgctgggaagcctgctccctggtgggcctcctgctcctgtggggccctcagtttctggtggaacagtgtacacctggtagctagacagcatactgcagccagcattgagtagttttctgggctggagagatggctcagcggttaagagcactgactgctcttccagaggtccccagttcaattcccagcaaccacatggtggctcacagccatctgtaataagatttgatgccctcttgtgctgtgtctgaggatagctacaatgtactcatatatacactaaataaataaataaaagtagttttctgtacatatgttcagattcacttcccactatctcagagaggtgccatgtctgacacctgctgatagccaggtcaagtttttcttaaatctctttcaaatgacttatcagctatattatgcacaggaagctgtgtttgggaacattcatctttgagagccgatagaggcctgggaacagggtgggggcaacctcaagattcctttctggctttactctagctcactctgcaatctgcaggaggtgtggacctcggctatcagcagaggcagcagagaagctgaagaaccgctacatcatcatgcggagtggggctcgtcagcatgagagggacagtgaccggcgttccagcatccccatcactgtgcggtgagcaagtgggctcacctcagagagcagggccagttggccactgccattttcataatgcaggcccagggtgggttgggcaagggagtcatctgggaccatgtgctgtgtcttcctaattattttgttgtgtgtgtttgaggctggagatgcctgggtaggtctcactactttattttgcctggcttccctctttgagaggcagtttgagggaaggggaggactctgaccgacaatgtagctacagggaaatttacagattttcactgggtcatcatttatagacaatatagtaagagctggggcctacctgagctgaattatatctctagcattgattggttacaagtagatctggttgtgtatagtgaaacccaaagaaagtagcttaagttggaagtttattttcattattaaactttgggaagtaggttcatggtggttttttggagctgtatgggctccgttaaattcatctttgccaacctttcagccccatatggttttagaaggtatagccatcgtgtccacattttgagcaacaagaaagacagtgggaggaagatatgctttttaatggatattttcatatgatgcatggatttagaacttacaggccacatctagaccaaaaagtcaggaaatatcccttagcaggcagcatgtgctggaataaaaattgggttccagtactaagaataaagggtaatagattatcgggatagccagcaaactcccctgcagtcctaacaaccttggccctggccttcctggaggatcagaggagggaatgtgggctgagccctttgagtactttattgctccaacaggcagctggaggctattgtgcgcattgctgaggccctcagtaagatgaaactgcagccctttgccactgaggctgatgtagaggaggcattgagactgttccaggtgtccacactggatgctgctttgtctggcaatctgtcgggtgagtaagcgctggactgtggtcttggacgctaggatagagatttagttagcgggtggctggcagggtgcttcctggatatgcttttgataatagcctttccgctgtgtctctcctggatgttttagctattgtaggaggaaggagcttctctctagacctcttgagtcagttcattaaaagtaattgtaggcctgtcgctggtaagtagtggctgggagtcctccctgttaagctcagaactactctagagtttcccaatttgtggcctcgggtttcttttggttttttgttgttgttgttgttgttgttgttttggtttttttttgacagccaggtctggcacactagattgtcagtccttcctgtcatagagatgagactgacagatcttctgtcatggtcaccagtcttggtgaaatacatgcctcttggcccctgagccttaatgtttactgccttctttcagcctctgagattggtgatatgccaaccagagttacatctgccttaatctgacagtaaatctggtttcccatttgccaatcactgtctaaatgccagagctgtaagttcccaaggttcctgtcctacccattccacaagctttctaatctttcttggtgggataggtgaggaggttgttaaaggtagtgactgaaaggaattaagaggagcagtgacagctgggccaggtatgttggaggagtggttctctttcttacctgataagattgtacacctcttgcttactcagggcttctcagatttgtactctagagggctctgccttctctcccttcttgctctctttaactcaaaacttatacttccattgggcatggttgtggagagttaggaaaatctcttgagttggagatttgaagccagccaaggctatacaatgacactgttcctcaaaaataatgaagtaataaataaacccaaccaaataaaaactctgctcccttcagagtcttttctagggctgttcctgttgccttggtatgtgtagcccatagggtctcgaggcaccggactctcatggtgtctctgctatctagctctgtgcttgtcgcagggcctctgtcacctttccctctgcctagagcactcttccccatattacttgattctcacttccctggtgaggccttcactgtcataatggtgttctgtctttaattttctctggttcaggccactctagttagaggctgtcatctctctggcccttccagtatggatgaactggggtttctagcacccagtttccctattgcactcttgacaggggtggagggcttcactacccaggaggaccaggagatgctgagccgcattgagaagcaactcaagcgccgttttgccattggctctcaggtgtctgaacacagcattgtccaggacttcaccaaacaggtgagtgagcctttctaaccctgggtctacaagccaggcccaggatacagaggatgtcctgctggttctcttagtctggttcccactcagccatcacatacagtgttctgtgctcagcagaggggtgctgggatggggatgtttgagccactgttccttttgtaggaactgctacagtctacagttggggttggctatttatagggaaaggaggaagacagatctgtagaaaccaatacccaattttcccatctcttaggttttcccttgtttagatccttacatggtagggaggaccagaaacagatgagttagccttgcagcccattgggaagagggctactgataacatgcacaggaggtactgtttggggtaccagtaggagcctgtgccctttaaaatcatgaggatagccctggtttctgtttctcgttcccttccctgtgtatcctctccgtttgctcctggaagtaaattatacagtaacagatactggccctctataagtgaagagactagtcttgcctgaggctggggctggagaaagcttgacttctagggtcacagggacttaagtcctagctcacttaattgctatatgacccaaacaagtgacagcctgtgcctatttcttcctctgtaaaatgagattattcctaatactaggtgcataaagtcgatatatgtacttgcctagtacacaagaggcatcatcacatacacacttttctgaagtcaagggagaatggaggtggatattttttgtctgtttaaaattgtctatgatccggtgatgcatcaggtcccttgggtcataatgatatacctgtgcatctgtcttgtgctccctcctacagaaatatccagagcacgctatccgaaaggtgctgcagctcatgctacgcaggggtgagatccaacaccgtatgcagcgcaaggtgctctatcgcctcaagtgagcccattgcccatcaaccctcaagcctgaaatgctgccaccaccctatctcccagtcagtgctccaaacctccttttgccctgcctctccacctcagactgctgtctgcagcacatctgcagcccctggaaatgtactttggtctgttggcctcatactgtgtttgagtgtctgaggactctctgctctgggtgtctatcccctgtcatgccttctcaacaagatgagtctggagcaggaacaggccctggaatgtagatgggtctgtatattggctcccgggccactcactgccaagcttctttgtatgtacagaggtaataaagcaattgagtccctggctgctaaggtcagtggacccagtatgatagtagtgctgtgtgaatacaaggttgactctttcagctttcttcagcagcacctaatgtgagaactggatcattcattgagttgtctgcctcagtttcctaatctgcaaacaaatttgatgaagctgagctcagtgagtgagtggctgtcagtgaaaacccaagtagactccaatgtagaatgtctccagggctttatttatagcaagtgggcctcagtggtgtctggggaaggaaccagacgtcagggtttatcagttaaggagctatgagtacctgagcaagcttcagcacagtaggaggtattagtgacaacattgttaaaagaagacacccaacaccttgtattaccaaaatgccgaaaattatgattttagaaatctataatttataaaattaaggaaaagtcagtgaaatatttaagtatttgttatgtaaagtacatttataaatgggaagctagtgctgaaaacactgcagtcaccaacagtaaagttactgtaggaggaaggcttgagagaacaggaagtacatacacaggcctttctcgtagatggcgtcctgtgctgaaatggctgttgcttgaggtgtttgcttttttttttttttaagttttttgagacagggtttctctgtgtagccctggctgcctggaactcactttgtagaccaggctggcctcgaactcagaaatccgcctgcctctgccttctgagtactgggattaaaagtgtgggccaccacgcctggctgaagtgtttgcttcttactccctcctggaaatgtgcttgctcctgacgaatggccatagccatttctttttgattggtctgcaaacttggaacagagtgtgcttgtctggaagggcaggcttggtaagaacatttcatcctacttgaggccttgaggatgcatggacatgcgggcctgcaggagtgcttagttgagtggaagatgccgatatgatacctctttcttggtaggccctggctggcaggcacagtgttaagggagacaagcttggcttgcagggaagtgggcagtgctcggtatgccacagcacgaggaaaaatgcccaggaaaatatccaggaattaaggattggttggtttctgaatctgaactggatcctaacctttaattctacgagacactggcctgagctgctggggctaagttactgtagccctgcaagtatggccaagatggtcttaggacacactttcccctcttttcctcaccttcccatgagtgtctcagataagtaggatttgaagcagtgctctgaggactcagccctgctgcttgctctgctttcattgcttccccagacagcaacttgattttcacttttttttttgccttggcatgcttgggcgtcctggtgattcctggtctggtcccttgcccaaggtatagatagacatttcacatcccctggttggtctttcagcttaaatattatttgtccttagacatatattcgtgtcacacagtgacaggattggtacgggcccaaatgggctgcaatggcctgttatgttagcacctgagctctgctgcatctaccatcacatattgtctgacccagactgcacgtgggagaggattctactgaaatgcatgaggtgtggaggatttctggcaaaattctaagcaactgttaatgacaagctgttgggaatcatacacactgtcaccttagccaccatagaagtcatacgtacagtgaagattacaggccagacatggaagttagcatccctgtaactcccatatttaggagatggaagcaggaggatcaggagttcaaggttgtcctcagtttcaaagtgttcaaggctacaacctgggctataagagattggtcctgtttcaaaaacaatctacataaaaatgtgttagtgaaaatactattttagaggaacatttacaagtaccagaataaggccaattctctttttttgcgggtgtgtgtgtgtgtgtgtgtgtgtgtgtgtgtgtgtgtgtgtgtgtttcgagacagggttttcgtatagccccggctgtcctggaactcactctgtagaccaggctggcctcgaactcagaaatctccctgcctctgcctcccgagtgctgggattaaaggcatgcgccaccaccgcccagcccaattctcttatttttaaactattttttatttttatcttatgcatcttggtgttttgcctgcatgtatgtctgtatgaaggtgttagatctttgatttgcaggtgtttgtgaactctatgggtgctgagaattgaacctgggtccccaggaagagaagccagtgcttttagatgcggagccatctaccccatcccaaagaaacaacaaaaacaaggaatttcagaaatgcaaaagatgagttttctcagactgttgaggtggaagtggcagaagatgcacacttcacagggtaactttgtggttttagatgtaagtttttcacttctattaagtatgttatggttttagatgtaaatctttcatattgtgcgtgggtgtgtatgtgttggtcttaaatagcatgccacatgggtggagcttaggaggcaactgcatagagtctgttctctccttgcatgtttacatgggctcttgggaaaactcaggtcatccgatgtgtgtgacaagcacctttacctgctgaggcatacagatccgtgtgcttaaacatgaacactggtaggttggtatttatgagccaagggttgcagctcagtggttgactgctttcctggcatgtgtgaggccaggttttcaatcctggcaccacaggaacatggtatggttcaaagggtattaatggtagttttcagttaaatcagtgagggttttttcttctacttgaaagatgaggcggtaaggtaaagttctggtgtaagtacatgggcccaaacccaactggcctgggttcagattgtaactcagctacttactgtacctatcccagccttaatttcctattaagaaataggggtgctgggtttggtggtgcacgccttaaacaccagctctagggaggcaggcaggtggatctcttaggtttaagtctagcctgatctatagagcaagctccaggatgagagctcacagaaaccctgtcttgaataaaaagaaaagggggggggggagaaaaagatgtgagcaccgatttaaggatgaggcaggctcttctagggactgagctgccttgacagcaaattttggaattattaggaaactaagttccaagcaataaatagataggcagtttagggtcctttccattgtttcccctttctcaaagttcaggctgaggttaagagaatggccatgaggatgggttggtactagcaccttacccacagtccagcaaagggtgctgtggatggggtggaatagattaaggtagacaattgcatccatggtttgccagatcagttgcgctctctctctctctctctctctctctctctctctctctctctctgtgtgtgtctctctctctctctctgtgtgtgtgtatgtgttaaagtgaaaggataccaatcaggctagattagggcccactttaacaaacccacaggtctctacgtttaataggattaaagacaagtgctaccatacctgttccataactacctaacaactttgtactcaggtctgaggcgctggtgtctagggcttttttaacatgataggtggtgggggaacaggcttctttctaggacaggaggagtggggtggggctggggtgtaagcccctgttgcccacagagtggaaagttcctagccttaatctttcatcagacacattgaagagaaaaaggcattatatggggagcaaagtggctcaggagtcaagaacttctggccaccttgaaccaagtttctacttgtgtagggacaggatttggggaagggtttgggaaagaatttcatggagggtccagggctgctttctgatgccctcctctgccaaaatgttttcagcaccttatgaatgagtggtgaattctgcactcactgtgtgccaagtagtacactagacacccacatattctacagtgcccactaccccccaaaattttttttaaaaatttatttttatttatatgagtatgctgtagctgtcttcagacacaccagaagagggcatcagatctcattacagatggttgtgaggcaccatgtggttgctgggaattgaactcggcctctggaagaagtcagtgcacttatccgctgagccatctctccagccccctaccccacaattctgagtaacatacaactgagtgacaggctgctctgactctgtgtatcagggcagtgatatacagtgtctcagccttctgaaggtgtgcagaggtccatgtagacctgccttggcactcagccatgttctggggacatgaatgggtggaggcctgggaagagcagcagcttactggaagcttcacctctgctttcctggaatgccagagcctgtgtgaagctgtttgtcactgaaaaggggtagtgtgttaacacagacctgggtgcagcaagggtcgggaacaggcgggtcctgttgaaagggcccagtatgccatgtatggagtatgccatgcatggactattagttctcgtggggagacttgtttttcctgatcctggacgtcttctgagacatccagagatttccaatatcctgggttagaagctccaaagtagcctcttacctatccttaacactatccttaacatctagccttgcctttagttttcttttttagtttttttttttttttcagcagcctctagcatagatctggctgtcactctttgtagacctaaatctagagacctgtctgcctcttactttctgagtgctgggattaaacgtgtaccctgtgccctttcaaacgacattttgttgaaagtggttcacctgactgtcaggggttttaggaggatggtgtccatgagagggcgacagagtaccaggtatagcccaatttggctccaatgctcttgggcagcctccccagggggcctcagcaacccagtggacccaggaactcaccacctgtatgtgatcacaagctttgccatacactggagtttactgacatactgctatttttctccactgtggacctaagaaaaaaggtattccccttatagaacaggaaactgaggcacagtgaggttaaagtttacagcacagaatgaagctggcattcaaacaaagggcacctgatctacaagtctgctggctacttgacatcttagcaatgtttgttaaaatttaacaacatagatgaacttggtttatatgcatacacaaatacacatgtgaagtaatgcatgaatggaaaaaaaaaaaaaaaaaaggcatgccttgcgtctttccaggtataccccggtccctggtttccctcttgagatgacttaatttcttgtatctcttgatatagactggtggaatcttagaactgggcacagtttctaaagcctgggcacctggccccaaatggatatagagcctagcccttgggttccagcattcaccacggacaagacctgtgtgatcattgcctctcttagccctttgattctctactcagggcatggtagggttacatcctctctagcagctgaagactgagctacgtctggttttcttttattcctcctttctccagggagtcctcatcttaggcacagctgatcccggaaaatccactttcttgcctcagaagaggagaattaagtattcagagagctatgggttactgtaggcggtctttcttccccatgaggttgccctggaagggagggtttttaattgatgagaaggttgtactgtctgggtgtgttttctgtctgggcagctcctctctgaggccatcataaaggaagcaggttgccctctgtcaggccccagctgtagtttgccctgttctttctctgtctgaatggaacattggttgttgggaaggctttgctaagtatcttgtctctgagctcagcacaggacaagccctgaatctcacctttccccaaaatccatagtcccttcatctgggcctgctgaagattacatgtttagtgatccagtgactagctctggccaatagctagttcacagcctgtaataattaacataccatttctttagcttctcatcagtcattccaggttagttcctaggaagggcaacatgaatggaatctgtcttcacccctacaaataagccttagttttatgtcactaaggcagtgggttctttgttactcatttaatcttatttatcctgactgataaaatattttggacttcctccctagcctgttagaacagttaaaaggcatgtttttaatgcaacagttccctgctctggtattctgcccaagaatgttttttgttttgttttgagacagggtttctctgtgtagccctggctgtcctggaactcactctgtagaccaggctggcctcgaactcagaaatccacctgcctctgcctccccagtgctgggattaaaggcgtgcgccaccatcgcccagccaaggatgggctttatttcacctggtacagcccctttccagggagagaatatggtatcgtccattcatgcttgcctgcattccccactgctcatcagtctatatcatagggctaattctacttacactgtgagagtttaggattaaatgtgtcaatgctgggcccagggcattttctctgaggtgtgtctcagtattactgaagcttttagttcattcatctgtatttgcctggctgccatgtgtgtcctggacacagaagatagagaacaaagcaggagagaaagatccagagagaatgtcagcattgccttgtgagtctaaggtaataaaactccatgaatgctctggctgtgggttcctggtggccctatactttgagatgcatccaaggggctggcagggagtgggggtggcaggctgcattatataagcctgcagcctgaaagccagggttctgttttgacagttctgttcacagcccccacatggacatgctccttagttgcagagctgagtggggaagggagcatcatgggagtctggaagcatcttatcccaagctcctatgctaaacctggcagttctctagcctggacccaggccatctgctcagtcccttgctcaagcccagcctgtctgacctcttttggctgactctgggagggcctagagagtagagaaaggactggcagggcttcctgaggagagagagagagagagcaaagtaagcataggaagtcaaacttgggagggaggggaggggacgggagggaaggactgctggggccgtgcctctagtgatggtcaacattcttgtttatgaaaaagggccctctgaagatgccattctgtggataactgggggcatgctcttggcattgtaagataaccctggccctgtagcagagcagacttggccctgtgtcagattgctgtcctgttacaaatagatgagtagcttgaaacagcagatattcattgcccttggttcctgggagttagctcagcacagcctagctgggacttttatctcttctgttatcaggctgcagtctctaggaaagttggattgaatgagaactttctcatctccctcacatggctcctggtacctagagagggtgtgccatttaatcagacatgtaatccccaggactagaaaatgaatggaaagcctttgggttcttgagtgattccacattgccttttggtgcccccattttagtggggggagagccctgcatcatttattctgcctctctctgtcttacctttccatggggcagatctatagaaatagagtaatgacagggaatggaataatggccaaccgaggcttcctgtgagctttcccaccaacactggcaggcctaaggagctgagggtatttttgtctggcccaccccatctgttttgcctgtccctttctctgaagtattgtgcctgcagctgtagcctgagatgccttttcttggctctggtctagatagctgcaaactggccataaaagtccctcctcccagtcactctactttgttgtgagtaagccactctttagatttaactaaaatctggcagtggaggggcacggtgaaagggatgaggaagagataagagagctggcaccaaggccctgttccctctctgcatttcaaacttgctggagtgtgcctcctctgtgcacacagtgagatctgaggctggctcagcagctgggtgagggagatgagaaatactcctcattcaatccagctttcctaggagactgcagtttaataaaagagagattccagctaggctgtgctgagccaatccccaggaaccaaggacagtgagtatttcaagctactgagacatttactatgcagccacagagacctcatacactcaatactgcctcctaagagccaactgtcctcccattcttctgcttcccactgccctgaggcctgagcaggactcacaaactcaagttcaaggcagcttaaggctgaggagctgaccttaaatgtcattttgccatttctgggttcattttttggaacaatctactaaaaagcaatgctctccctgatgcccagctccttatagtgtacaaagccttttcctcctattgttctagcttggtgttcctgaccactctgagaggcaccgaggacaggtcaagtagcagatgaacagtctgaggccccaagataagaaatgatgtgacagggaacctgtggtggggtccctatgatagctgcagggcagctatttgtgtgcagacaacatagccacacccctcacttaaggtgtctgcctggaaaactttactacttttccaagattcctgtgtagctagcatcctggatagcgtctaactcatacaatcaagatgctcatacacaggctaacctctaaatctgctgagattagcagggagagaagttcagggaacagagtattatgtggtcagtggtggggaacaggaataaccctggaggtgacttcccagtgccacaattttcctgtggcagttggagccactcagctctggcagtccaggtctgttgtgagctccgggccattgataccaaaagcataggcatttagcattttgctcagctagctagaatggatttagttgatgcattaatgctgattgaagtactctctccataaggtatagaacaaaatcactggaaatttcaagaagcaacctgaataaccccatcctttcatcccaggggagaaaaagaggtgttttgttcagcatcatctgtcaatatctgattgactctgattggatcattcatttctcttgtattagtcacaacttctagagagatgagccataacaatggactggttaagcctacatcgcttaaaattattgtgtccagacagggcaggacttgtctccagaagtgtaatgagaaatcctggggcacatgtaaggcattaacggacagtctctttgacatcatcatcccacaggaaggaatgactaatagacaccacagggttcattgctgtaactgagtctgaagacaagggactgtttcaggagctggtgtccctgtctatttgagagcatccctggtctccatggctgcactcaggcaggatgaagagctgctatctccacaccaaccatgctttgggtggagaggggaaacagacttagaaggaatgaggaacttgagatgtatggagaaagacaggagcttggtctaggcctccaaatgattgttgggacctgaatcccagcagtaccgggttgtgtaaaccagccagggcgtctgtctcagaacctcagtgtttagacctgcaggctgtggatgatgagggtgaactcagaagaccccagtggtcttcaggacagtggatgtaatgttcctatacttgtggttgacctaggcaggctcctggagacagaaggttgat

SEQ ID NO: 50 - DNA, 2649 bp, Mus musculus
gagggaattgcgggaccccgtctggggaagctcccgccgccccggggtgctcagctctctgtctcccttgacccaggtacagtcatgtcgggcttcgacgacccgggcattttctacagcgacagcttcggtggcgaccccggtgcggaagagggccaggcccgcaagtcgcaactgcagaggcgattcaaggagttcctgagacagtaccgagtgggcaccgatcgcacgggcttcaccttcaagtacagagatgaactcaagcggcattacaacctgggtgaatactggatcgaggtggagatggaggacctggccagttttgacgaggaactggctgaccacttgcataaacagccggccgagcacttacagctgcttgaggaagctgccaaggaggtggcagatgaggtgacccggccccggccagctggagatgagctgctccaagacatccaggtcatgctcaagtcagatgccagcccgtcgagcattcggattctgaagtcagacatgatgtcacacctggtgaagatccctggcatcatcatttcagcctctgcagtccgtgccaaggctactcgtatctccattcagtgccgcagctgccacaacaccctcaccaatatcgccatgcccaggcctagagggctatgccttcccaggaagtgcaatatggatcaggctgggcgcccaaagtgcccactggatccatacttcatcatgcctgacaagtgcaagtgtgtggacttccagactctgaaactgcaggagctgcctgatgcagtccctcatggtgagatgcccaggcacatgcagctttattgtgacaggtacctgtgtgacaaggttgttcctgggaacagggtcaccatcatgggcatttattccatcaagaagtttggcttgaaccccagcaagggccgggacagggtaggtgtgggcatccggagctcgtacatccgagtgctgggcatccaggtggacacagatggctctggccgaagctttgctgggtctgtcagcccacaggaagaggaggaatttcgtcgcctggctgccctccccaacatatatgagctcatctccaagagcatttccccctccatctttgggggcatggatatgaagaaggccattgcctgcctgctttttgggggttcccggaagaggctcccagatggactcactcgccgaggtgatatcaacttgctgatgttgggagaccctggtacagccaagtctcagcttctgaagtttgtggagaagtgctctcccattggggtgtacacatctgggaaaggtagcagtgctgcaggcttgactgcctcagtgatacgggacccctcatctcgaaacttcatcatggaaggtggagccatggttctggccgatggtggggttgtctgtattgatgagtttgacaagatgcgggaagatgaccgtgttgcaatccatgaggctatggagcagcagaccatctccattgctaaagctgggatcactaccaccttgaactctcgctgctctgttctggctgcagccaactcagtgtttggccgatgggatgagacaaaaggggaggacaatattgacttcatgcctaccatcttgtcccgatttgatatgatcttcatcgtcaaagatgagcacaatgaggagagggacatgatgctagccaaacatgtgatgactctgcatgtgagtgcactgacacagacacaggctgtggagggtgagatcgacctggccaagatgaagaagttcattgcctactgccgagcgaggtgtggacctcggctatcagcagaggcagcagagaagctgaagaaccgctacatcatcatgcggagtggggctcgtcagcatgagagggacagtgaccggcgttccagcatccccatcactgtgcggcagctggaggctattgtgcgcattgctgaggccctcagtaagatgaaactgcagccctttgccactgaggctgatgtagaggaggcattgagactgttccaggtgtccacactggatgctgctttgtctggcaatctgtcgggggtggagggcttcactacccaggaggaccaggagatgctgagccgcattgagaagcaactcaagcgccgttttgccattggctctcaggtgtctgaacacagcattgtccaggacttcaccaaacagaaatatccagagcacgctatccgaaaggtgctgcagctcatgctacgcaggggtgagatccaacaccgtatgcagcgcaaggtgctctatcgcctcaagtgagcccattgcccatcaaccctcaagcctgaaatgctgccaccaccctatctcccagtcagtgctccaaacctccttttgccctgcctctccacctcagactgctgtctgcagcacatctgcagcccctggaaatgtactttggtctgttggctcatactgtgtttgagtgtctgaggactctctgctctgggtgtctatcccctgtcatgccttctcaacaagatgagtctggagcaggaacaggccctggaatgtagatgggtctgtatattggctcccgggccactcactgccaagcttctttgtatgtacagaggtaataaagcaattgagtccctggctgctaaggtcagtggacccagt

SEQ ID NO: 51 - DNA, 2202 bp, Mus musculus
atgtcgggcttcgacgacccgggcattttctacagcgacagcttcggtggcgaccccggtgcggaagagggccaggcccgcaagtcgcaactgcagaggcgattcaaggagttcctgagacagtaccgagtgggcaccgatcgcacgggcttcaccttcaagtacagagatgaactcaagcggcattacaacctgggtgaatactggatcgaggtggagatggaggacctggccagttttgacgaggaactggctgaccacttgcataaacagccggccgagcacttacagctgcttgaggaagctgccaaggaggtggcagatgaggtgacccggccccggccagctggagatgagctgctccaagacatccaggtcatgctcaagtcagatgccagcccgtcgagcattcggattctgaagtcagacatgatgtcacacctggtgaagatccctggcatcatcatttcagcctctgcagtccgtgccaaggctactcgtatctccattcagtgccgcagctgccacaacaccctcaccaatatcgccatgcccaggcctagagggctatgccttcccaggaagtgcaatatggatcaggctgggcgcccaaagtgcccactggatccatacttcatcatgcctgacaagtgcaagtgtgtggacttccagactctgaaactgcaggagctgcctgatgcagtccctcatggtgagatgcccaggcacatgcagctttattgtgacaggtacctgtgtgacaaggttgttcctgggaacagggtcaccatcatgggcatttattccatcaagaagtttggcttgaaccccagcaagggccgggacagggtaggtgtgggcatccggagctcgtacatccgagtgctgggcatccaggtggacacagatggctctggccgaagctttgctgggtctgtcagcccacaggaagaggaggaatttcgtcgcctggctgccctccccaacatatatgagctcatctccaagagcatttccccctccatctttgggggcatggatatgaagaaggccattgcctgcctgctttttgggggttcccggaagaggctcccagatggactcactcgccgaggtgatatcaacttgctgatgttgggagaccctggtacagccaagtctcagcttctgaagtttgtggagaagtgctctcccattggggtgtacacatctgggaaaggtagcagtgctgcaggcttgactgcctcagtgatacgggacccctcatctcgaaacttcatcatggaaggtggagccatggttctggccgatggtggggttgtctgtattgatgagtttgacaagatgcgggaagatgaccgtgttgcaatccatgaggctatggagcagcagaccatctccattgctaaagctgggatcactaccaccttgaactctcgctgctctgttctggctgcagccaactcagtgtttggccgatgggatgagacaaaaggggaggacaatattgacttcatgcctaccatcttgtcccgatttgatatgatcttcatcgtcaaagatgagcacaatgaggagagggacatgatgctagccaaacatgtgatgactctgcatgtgagtgcactgacacagacacaggctgtggagggtgagatcgacctggccaagatgaagaagttcattgcctactgccgagcgaggtgtggacctcggctatcagcagaggcagcagagaagctgaagaaccgctacatcatcatgcggagtggggctcgtcagcatgagagggacagtgaccggcgttccagcatccccatcactgtgcggcagctggaggctattgtgcgcattgctgaggccctcagtaagatgaaactgcagccctttgccactgaggctgatgtagaggaggcattgagactgttccaggtgtccacactggatgctgctttgtctggcaatctgtcgggggtggagggcttcactacccaggaggaccaggagatgctgagccgcattgagaagcaactcaagcgccgttttgccattggctctcaggtgtctgaacacagcattgtccaggacttcaccaaacagaaatatccagagcacgctatccgaaaggtgctgcagctcatgctacgcaggggtgagatccaacaccgtatgcagcgcaaggtgctctatcgcctcaagtga

SEQ ID NO: 52 - DNA, 44366 bp, Homo sapiens
gccagtcttgaacacctgacttcaagcaatcctcttgcctctgcctccccacatgctgcagttacaggcgcgagccaccatgccagcctgaatgtttgttgttgttgttgtttgagatggagtctcacccaggctggagtgcagtggcgcgatctcagctcactgcaacctctgcctcccgggttcaagcaattatcctgcctcagccccccgagtagctgggattacaggcgcccaccaccatgcctggctaattttttttttgtatgtttagtagagatggggtttcaccatgttggccaggctggtctcgaactcctgacctcaggtgatccgcccaccttggcctcccaaagtgctgagattacaggcgtgagtcactgtgcccggccacctgcgtgtttttgtatgagaagtggagtgcaggcaaaaggacctggggtcaaccttcagcgtgtggctctgggcaagccatgagacttctccctacctcagtttccccacccgtaaaatccagtgaggttcagctacttctagcttattggctcagaagtgcacaagaacccctcagaaatcatgggaaactcctgcctccttaatttagactcctttttaggcctttggtcccctgatgtgggccagggagttggggacctgtatccagctatgaacccaccacaggaagatgtcccttctgagtcttgttgtgtgtgagcccctccctcatgtgcctaagaacgatcaaggctggctgtactgaaacatcttggaaacttccaaaaagaccaaagtgctccacaaaatgtaccctcactaagcctaaaacactgagggagggagtgtggctttgggatgggtagcaataaagaggtaaggcttagctacctcctggcaggttatattaggcctcccctcctgtgccaccctaacctacctggcttgtggctttctcacttgtgccagaccacacggacccctctgctaggggtttgtaaccccggagggcttggctatttggtggggtagggagacgtcaccctaatgaagcagttctcaaagtgtggtaccctggctgtgggaggtggtaatcctagtatcccctcaacggggtctgtgaggacaaagcatttttataacactactactatttttttggttttttttttttcgtttgagacagtcttgctgtcacccaggctggagtgcagtggcatgatctcggctcactgcaagctccgcctcccaggttcacgccattctcctgcctcagcctcccgagtagctgggactacaggtgcccgccaccatgcctggctaattttttgtatttttagtagagacggggtttcactgtgttagccaggatggtctcgatctcctgaccttgtgatccgcccgcctcggcctcccaaagtgctgtaattacaggtgtgagccaccgcgcccggcctttttttttttttttttttttttttttgagacagggtctcgctctttcacccagtctggagtgtagtggcacaatcacagctcactgcagcttcaacctcccaggttcaagggattctcccacctcagcctcctgagtaactgggactataggcacgtgccaccacacccagattttttttttttttggctttttttaaaaaagccaaaaataaatgagaaaattagagtttcactttctcatgaatgtgtgttggcattttccaaaggttatgtgacatgtgatgctctctcatggatttgatggctcatggaatgtgtgcctgtatgttcttgtatgttaagaatttctcagttttggccgggcacgatggctcatgcctgtaatcccagcactttgggaggctgaggcacggggatcacttgaggtaaggagtttgagaccaacctggccaatgtggtgagaccccatctctactaaaatataaaaattagctgggtgtgatggtgcacacctgtaatcccagctactcgggaggctgaggcaggagaatctcctaagtccgggaggcagaggttgcagtgagccgagattgcaccactgtactccatcctgggcgacagcgagactccatctcaaaaaaaaaaaaaaaagaaagaaaagaaaagaaaaagaatttctcagttttaatatctaattttgtaaatagtgatagctatactcacacaaacaaaagctcttttggatccttggttgcatttgagtataaaggagttttggaaccaaaacatttgagaactgcacccctaatgcatcagaaggagcaggagcctttaatatgaacaacacacatgtaaatgtcacagtgtacctgcttgcttgcttgcttgcttgtacttcctgtgaccgcagccctgggccaccagacctaaggccctgttttctctggggaagcccttctcatagcccagggcggggctaggattgaaacccagctggtctggctccagagacctgccctggactctgtcctgcttctaaagacctagggagcacccactctgtgcctgaggaggcaggtggcacatctacccaggttgcatggttggctctggcctatcatgttttaaatcttttttttttttttttttgaaatggagtctcactctgttgcccaggctggagtacagtggcgcaatcttggctcactgcaacctctgcctcctgggttcaagcaattctctgcctcagcctcccgagtagctgggattactggcactcgcaaccatacccggctaattttttgtatttttagtagagacggggtttcaccatattggccaggctggtcttgaactcctgacctcgtgatccacctgccttggcctcccaaagtgctgggattacaggcgtgagccactgcgcccggccctatcacattttaataaccagggatgggactgaacttgaattttgacctcagagctcctgctttctagctcctgccccatcatcaccatgcttagcaaacgtgtgagtttgagaggaagatttacagctcagacctaattgctggcaaagtttaaggagaggacagggagcaggcagaagtctgaaaaccacgcctgggcccaagaatgttttcacaatgtggcctggctgcacagggaagaacagacagcttggagaagtagtgagctgcccgtctttgaaggtattcaagcagtggctagagggacacctgtctgtggtcttgcagaatcctggcgttgggcagtgactgtaccacagaccctgaggccgctctgctttgctttcctatgacatcagacaccctgatgcacgcccacctgttaatgaccttgccccattttctctttcagattctgcccccgtggagactcccagagggaagcccccactcaacacccgctcccaggctccgcttctccgatgggtccttacactcagctttctggtggcgacagttgctgtagggctttatgccatgtgaatgcaggcatgctggctcccagggccatgaactttgtccggtggaaggccttctttctagagagggaattctcttggctggcttccttaccgtgggcactgaaggctttcagggcctccagccctctcactgtgtccctctctctggaaaggaggaaggagcctatggcatcttccccaacgaaaagcacatccaggcaatggcctaaacttcagagggggcgaagggatcagccctgcccttcagcatcctcagttcctgcagcagagcctggaagacaccctaatgtggcagctgtctcaaacctccaaaagccctgagtttcaagtatccttgttgacacggccatgaccactttccccgtgggccatggcaatttttacacaaacctgaaaagatgttgtgtcttgtgtttttgtcttatttttgttggagccactctgttcctggctcagcctcaaatgcagtatttttgttgtgttctgttgtttttatagcagggttggggtggtttttgagccatgcgtgggtggggagggaggtgtttaacggcactgtggccttggtctaacttttgtgtgaaataataaacaacattgtctgatagtagcttgaagtagttttcatgggctttgttattcttggggaactgaccttttcctccctggtttcttgcgtgctcggtaggagaagtggtgatagggggttggcaggagctggtctgtttgagaatacagaaggtgagcttttcttttctttttttttttttttgagatggagtctcactctgtcacccaggctggagtgcagtggcgtgatcttggttcactgcaagctccacctcccaggttcaatcaattctcctgcctcagcctcctgagtagctgggattacagaagttcatcaccatgcccagctaatttttgtatttttagtagagatggggtttccccatgttggccaggctggtctcgaactcccgacctcagctggtccacctgcctcagcttcccaaggtgctgggattacaggcgtgagccaccgtgcctggcccaggaggtgagctttaagtagctggtgggcgaatatttgtgttgaaccctgcttgatgcaattctcgactttatggaagatggggttgccctgtttggtggaaatgagcagattctggggcaaaatttgtattttctgtccagtgactattagggactggagtgaaattcttaggttcaaattcctgctacaccactttgaggttagtcacttaacctctctgaggctccattttatcactggtgacatgaatatagtgatacctaactcacctatgtgtcctgagaagcaaacaagatgcaagtgaaatgccaacgccatacacagttagcacctattatgcaaagaaggagaccagtgttttgtgattcttgtactgtcgagtcacctcatctatgtcatccctgtgttgagggggtgtttccactatctgagggtcaggatggatttcactgaggtctgtccagctctaaaacccaagccctttctatggccctaagtcaagaaaatactaaatatgtagcctcccaatctgggaaagtgaaaaaccttttgctgaaagtgtcctgggcagagcatgggacaagattttttttttttttttttttttttttttgagacagggtctggctttgtcctccacactggagtgcagtggtgtgatcttggctcactgcaacctccacctcttgggcttaagccatcctctggcctcagcctcctgagtagctgcggctacaagtgcacaccaccatgcccagttaatttttgtattttttttttagagatggggtttcgctatgttgcccaggctggtctcaaactcttgaactaaagtgatcctcccaccttggcttcacaaagtgctgggattacaggcgtgagtcactgtgcctggccaaggtgtatttttttttttttttttttttttgagatggagtctcattctgttgcccaggctggagtgcagtggtgcgatttcagctcgctgcatcctctgctgcccaggttcaagcaattctcctgcctcagcctcccaagtagctgggattataagcacatgacaccgcactcggctaatttttttagttttagtagagacagggttttaccatgttggccaggctggtcttgaactcctgacctcgtgatccacctgcctcggcctcccaaagtgctgggattacaggtgtgagccactgtgcccagccaaggtgtttctttataggaccagtacctaaggactggaagtcaggagacctttgtcactagtctgactatgccacttcaaggctcattttgttcactggtaaaatgagaacaatacacatacctctcacagctggtgggaggatccagtggtgtccaaacaccagtctgtgcatggtggcatcagaattacttggagatacttaaccacagaatccagggctccacctgggatggggctctagaatttttttttttttttttttttttttgagacggagtcttgctctgtcacccaggctggagtgcagtggcgcgatcttgactcactggaagctccgcctcccgggttcacgctattctcctgcctcagcctcctgagtagctgggactataggcacccaccaccatgcccggctaattttttgtatttttagtggagacggaggtcacaggtttcaccgtgttagccaggatggtctcgatctcctgacctcgtgatccgcccgccttggactcccaaagtgctgggattacaggcgcgagccaccgcacccagcctagaatcagtatttttgaaaagtaccttaggagagtccaacgcgcacccaggtccaggagcacgtatggtcacgtatgcaaagcataggcattcaaatagcagctggagctgggcacggtggctcacgactataatcccaacacttttgggaggctgagacaggcggatttcttgaggccaggagtttgagaccagcccggccaacacagtgaaaacctgcctctactaaaaccacaaaattagctggaagtggtggcgcatgcctgtaatcccagctactccgggggctgaggcaggagaatcacttgaatccgggaggctgaggttgcagtgagccgagatcgcaccaatgcactccagccttagcaacagagcaagactctgtctcaaaaaaacaaaacaaaaacccaatagcagctgggactctcctgccctgggcccagtttcctcatttgtgaaaggggaatagatattcattgtactgacaaagaaaggaaggaagaggggaggggagagagagaaactatcttgaattttactaataggagaatggctgaacaattttttcctatcaattgtcgaacaaagccagacactagttaaagtggtaaggacgaccgggcacggtggctcatgcctgtaatcccagcactttgggaggccgaggagggcagatcatgaggtcaggagtttgagactggcctgaccaacatggtgaaactctgtctctactaaaaatacaaaaattaaccgggcatggtggcgcgtgcctgtaatcccagctaccaggaggctgaggcaggagaactgcttgaacttgggaaacggaggttgcagtgagctgaaattatgccactgcactccagcctgggtgataaagcgagaatccgtctcaaaaaaaaaaagtggtaaggacagattttaatcagtaatgattattgcaacagggaagagagttcagtatgaactgaactcagctttaatttgtatagaggtattttaaagggaggttgaccagcctgggcaatatggtaaaaccccatctctacaaatgaataaataaattcgccgggcatggtggtgaggttgaggtgggaggattgcacgagcctgggaggtcaaggctgcagtgagctgtgattgcaccaccgcactctagcattggcaacagagaccctgtctcaaaaaaataaataaaaaaaataaaggaagattgagggaggaaggggtgggcaagtgattagtagagtcagggaagtgaaatattacaaaaggttaagtcagtgtaaatgcagtgaggctagctgtgtctgccagttggcaatgatcaaagttagaatttttgcctcccacagagcctgggagacagaggtcacatcctcggttgttgcctggaataaacggtaaacatttaccagcagccttgagttttctcaggcaggcaccttagcgggggctggctagagtcattttagagatgttagcagctgttagaaactgttagtgtttgtttaagtctttttttcttttctttttttttttttttgagattaagtttcactcttgtcgcccagactggagtgtagtggcacgatctcggctcactgcaacctccgcctcccaggttcaagcgattctcctgcctcaggcttccaagtagctgggattacaagcgcctgccaccacgcccggctaagttttgtatttttagtagacacagggtttcaccatgttggccaggctggtcttgaactcccgcctcagcctcccaaaatgctgggattacaggtgtgagccacggcgcctggactgtcttttttttctttttagagatgagtctcgctctgtcgctcaggctgaagtgcagtggtgcaatcaaaactcactgcagtctcaaactcctgggctcaggccatcctcccaccttggcctcttgagtagctaggacaacaggtgtgctccaccatgcccagctaattaaaaaaaaatttcaagccgggcgcagtggctcatgcctgtaatcccagcatcttggaaggctcaggcgggtggatcacctgaggtcaggagttcaaggctggccaacatggtgaaaccctgtctctactaaaaatacaaaaaattagccaggcgtggtggcacacacctgtaattccagctacttgggaagctgaggcaggagaattgcttgaacccaggaggtggaagttgcagtgagccgagatcgtgacactgcactccagcctgggcaacagagtgagactctgtctcaaaacaaaaaaaattataaaaaaatttctagagaagcgggatcttgctatgttgcccaggctggcctcaactcctggactcaagggatcctctcatcttggtctcctgaagtgctaggattacaggcatgagccacagtgcctatagatcaaggttgaggcttagaagtgaagggagcccagaggaacctggctagagtttggtcaaggagagtctttgtcaccatactacagaaaattaagcagctgttaaacagaatgaggccggtctgggcatggtggctcacgcctgtaattccagcactttgggaggccgaagcgagtggatcacttgaggccagaagttcgagaccagtgtgggcaacatggtgaaaccctgtctccactaaaaatacaaaaattagctgagcatggtggcgcctgcctgtagtcccagctagttgggaggctgaggcaggagaatcgcttgaaccggggaggcagaagttgcagtgagccgagattgagccactgcactccatcctgggggacagagtgagactccctctcaacaaataaataaacaaataaaagcagtgtgttagggtgcgagaacccgggtcggggacgcgggtgagccgcgcggtaatcgccctgtcctgccaccagctggaggacaggggctcctcagagcctcaggcccagagaacgggccccacgaccgggaagcgaatactccacagggcacagtctcccaatgcaaaatgggcacctggacccaatcatttctgaacttctagttttttctccctatggctatgaaaagggtcattttttttcataggactttaaaagaaggcttaagaaaagcacgcaggcctggccgggtagctcacgccagtaatcccagtgctttgggacgtcaaggcaggcgggtcgcttgagagtagagtttcgagacctgggcaagatggtgagactccgtctttatgaaatattttaagaaaatcacgtacacctgtggtccccgctacaagggaggctgaggcggaaggattgcttgagcccaagaggttgaggctacagtaagccgtgatccagccactgcactccatccccggcaacacaacgagaccatgcgtcaggaaaaaaaaaaaaaaaccaagaaaataaaaaagaaaccacctaaaggcgtcctccgcgcgcccgcccctccgccatctttgcgtccgccccgtcctgcgccgccacttccttcccagccagaagtttcgcgccaaattgttccgcacacaaaatggagcccggaaggaggcgaggtcatgcactttgcagccaatcatcttcggcagacagtccgggcggcggggctggagggctcagaacggtccaatcgctggccgcgaggctccggcgaaccaatgggagcgcagcggctgcggcgtccgaacaccgcctcttgtttttcccgcgaaactcggcggctgagcgtggaggttcttgtctcccctggtttgtgaagtgcggaaaaccagaggtgaggctagtgggagtgggactgggactgggagccagcaggcatctggatttccgggtgtagttggagtgggacaggagtttctcgggaactggggttggagtccgggagcgcggccgggggtccccctgctccggactcagggcagggacccaggcgtcggaggggaggaggtgccaggcgctgcccccagcctgttctggccgtttgttcccaccccaggcgcagtcatgtcgggattcgacgatcctggcattttctacagcgacagcttcgggggcgacgcccaggccgacgaggggcaggcccgcaaatcgcagctgcagaggcgcttcaaggagttcctgcggcagtaccgagtgggcaccgaccgcacgggcttcaccttcaaatacaggtgcggctcctgcggggccgggggctcgagttccagtgtggccgctcacacgcctctaccagcctgctagagtcctggacagtcagggcacagatgggcccagacgggggaaagagccggtcctgggtcacagggctcatcccggcagcctcacgccttggtataaggctttgtgtattttgttttactttattttattttattttattattaacgtatttgtttattattttgagacggagtctcgctctgtcgccaggctggagtgcagtggcacgatctcggctcactgcaacctccgcttcccgggttcaagcgattcttgtgcctcagcctcccgagtaggtgggactacccccgccatcaccacgcccggataattttttgtaattttagtagagatggggtttcgccatgttcgccaggctgctctcgaactcctgacctcaagtgatccacccgcctcagtctcccaaagtgctgggattacaggcgtgagccaccgtgcccggcctgctttgtgtattttatctgtacctggagttaacttctgggtgagtcacctgttgagtgggccaccagcaaccagctagcgccacttggaccgtttagttctttatccagatcttgttcctgttcatctgcttcctatcatccttccatgtcatgtctgagaccttacaaactcaagttccctgtaggtgtaaaaggtgaagatggcagttaggattcacttcacttcgctcattcatttatttataccagtcttgcaccttcattgattgagcacctgctgcctgccagatactgttctgggtgctgggctgcagcactgaagctggacctggctcctgcttctaggtgattgtacgacctgtgacatcatgagaattctcataggcccggcctctatccctgaaatgttaaaatgcagagaacatgaggttgcaggttcagcactggcccattattagctgagtgacttccaggtgtcagtgtctctgggcctcaccaggccagaaatgggtaaagccattcctgctttcacttactcatgcagcagctgatattgcccacctgtgtgccaggcactgcgctacaaagatgaaaagacgtgcttcttgtcctagagaagctcctaagtcagaggagtgagtcgtgaagaccaacagataacttccacggtggtcatttcctccacagaggaaggtgaaaggacttagggaagttttccggggggctgaagtttgaggggacctttgagctaaggtcagagttgcaggtgtagaaagctttctgtctaggtaggagcaattgcttgtgtagaggtgtggggtgtcctcacagcaagtggctttcagtagcagtctggccattttactggctcctggacataagggagacggggctcaggcctgtgatactgcgaggctggggaacagcctgtgcgttggtcagtggtccccaaatatgttcttgccacagcagtcacatgggatgctctgctaagcatctgggctggacgcagtggctcatgcttgtaattccgacgctttgggaggctgatgccaatggatcatttgaccccaggagttcaagacctggctgggcaacatagtgaaacccaggctctatttaaaaaaaaacagtctgactagaggttgataaggcagatgtgttttctgctgccttggtgcctccagtttttttgttgttttgttttttgtttttttttttttgagatggagtctcgctctgtcacccaggtttgagtacagtggcgtgatcttggctcactgcaactgctgcctgccgggttcaagtgattctcctgcctcagtcccccaagtagctaggattacaggcatccgccaccacacccggctaggtttttttttttgtatttttagtagagatggggtttctccatgttggtgaggctggtacctttttggtttttttttttgagacagagtctcagtctgtcgcccaggctggagtgccctggcgagatctctggtcactgcagcctccacctctggggttcaggcattctcatgcctcagtagctgggactacaggcgtatgctaccatgcccggctaatcttcgtatttttagtagagactgggtgttgccatgtggcccaggctggtgttgaactcctggcctcaagtaatccaccctcctcagcttcctaaagtgttgggattacaggcatgagccacctcactgggccccaagtttgagctgtgtgcattgttcttttccaagagaagttaaaggctctgcggagtccttcagtgacagaactggtttgttgttttgtgcacgctggcctgggtgttgaaacatcctttgactgtcttgtggaccccttccatggagctttctttagggcatgcctgtgccagcagtgagtagcctctgcagggttaaataatggaatgatctggaattagatgtgtgtttgggaagaggaatggtgaggtcatggtggctgtggtgtgggcagattcaggggtgcaggcacacctcagccagtgttggtttcctcttctttgcacccttcctgccccaccctgctatgtgcccactccagggatgaactcaagcggcattacaacctgggggagtactggattgaggtggagatggaggatctggccagctttgatgaggacctggccgactacttgtacaagcagccagccgagcacctgcagctggtgagtgggaccccatccctgagcttcccagggctgctctgccccagttactaatagcctgtgcccttccctttctccagctggaggaagctgccaaggaggtagctgatgaggtgacccggccccggccttctggggaggaggtgctccaggacatccaggtcatgctcaagtcggacgccagcccttccagcattcgtagcctgaaggtgggtcggagggcagtggctgctgcatggtgcagagggctttggatgcagccagacctgagtgctagctgtgtggccttgagtgaggcacttgacctttctgaacctgtctcctcctggagacaaaaggatcgtttgttgttttttgctttttgttatgaaaaattacacacccaaaagcagagagtagtataatgaatcccataaagcttcacccagatttaataattaacattttgtgttgtttcctattttgtcctttttcttttttgctaaagaattttaaagtaaattcatgcacagtggctcatgcctctaatcttagcactttgggaggccgagggaggaagattgcttgataccgggagtttgagaccctggctctccaaaaaacaaaacaaaaaaaaaaacaaaaaaaacaaagctaggtatgctggcatatgcctatagtccaggctacttggaaggctgaagtgggaggatcaaggggcctaggaatttgaggttacagtgagctctgattgtgcctctcagcactttagcctgggtgacagagcaagaccctgtctctaaaaataaaaaataaattacagacatgacactttatcccgaaaaaaaaaagttttcttacatagtctcattagcacctcaactgaaacatcaaagatctcttagtatcattgaatatacagtctagattcagattgaccaaattacctcacatgactcttacagctcgtgtgtctcagccaggaccaggcattgtactggattgttgtttaaatctcttttaatccaggacagcttcctttactctgggtgtaagttctttcacagatacattattgatttgctaaagaagcaggagccattatcctgtagaatgtgctgccttttagatttatctgaaggcctccttggggtggttacaacataccccttcccccccgtgatttttggaagctggaagttagatgcaaaggcctgactgtgtttcgatttcacataccgggcaagaacgcttatgggtggtattggatccctcattgcatccctccatccactatgctgagactgaccaggtgctaggttgaggtggtgatggtcactttattgtaatgatgcaggcatggagtcttgaattccgcctccccagcctcgcttctgcttcccacagcctcttcctgctttctttgagagccccagcaaaacttctgctcatgtctggttctctcgttcagccggaggagggcattgagaaacggagacaaggtggagagagattgtcccagtcctgtacactagtggctcaggagctttgtgaagggcaagggctggccataggaaggagtggatcggctgagaatttatgttttactttttattatggataattcaaacattagaatataaagagaatcgtataacgaatcctcttgtactcatcacccagcttaataattagcaactagaggccaatttttttttttttttttttttgagatggagtttttgctcttgttgcccaggctggagtgcagtggcacgatctcagctcactgcaacttccgcctcatgggttcaagtgattctcctgcctcagccccccaagtggttggaattacaggcacacaccaccacgcccggctaatttttagtagagatggggtttcaccatgttggccaggctggtctcgaactcctgacctcaggtgatccatagatgccaaatcttgtttcatctgtggccctggagttcttttgaaacaagtcccatacatcatataatttgatctggaactatttctccatgtatctctaaaagatgaatctctttttttttgagacggagtttgactctgtcgcccaggatggagtgcagtggcatgatctcagctcactgtaacccctgcttccccggttcaagcaattctccggcctcagcctcccgagtagctgggattacaggcatatgccatcacacctggctaatttttgtatttttagtagagacggggattcaccatgttggccaggctggtctcgaactcccgatctcaagtgatccgtccgcctcggccttccaaagtgtcggtattacaggcgtgatccactgcacccagcctttgaagagtcatttttaaaggcatagctacaataacatcacacttaaaaattaacattacggccgggcgcggtggctcatgcctgtaatcccagcattttgggaggccgaggccagtgaattgcctgaggtcaagagttcgagaccagcctggccaacatagtgaaaccccgtctctactaaaaatacaaaaagttagctggacatggtggcagttacctgtaatcccagctacttgggaggctgaggcaggagaatcgcttgaacccgggaggcggaggttgcagtaagccgagatcctgccattgcactccagccttggcgacacagcaagactctgtctcaaaaaaaaaaaaagaaaaaagaaaaaatattactgccttattgtccggtgtgggaatagtcattaagatggggaaactgaggctcaaagagaagtgacccagacagaagaccacacagcaggttttgacagaacttgaactagaatgtgggcccctgcctcccaggtttgttctgtgttgtactctacaggtccaaggatgtcgccatcagagctggggtcaggtctctctcctggcacctgccactttgtagtgaaatgtgcttagtgtatctcttgccctgccacctccccccccaattgtgctgcgaggtctttaaaagcaggagctgtgcctgaggctcctctgaaccccagggtccagatagcctggcactgggtggatgctctggaagcattttttgagcggaacagaagagctgtggccctccctgcagctctgtgcccacctcctccaggctcctgcccaggatatttactggcatatctcagatgcgtcctggctccccttaaccaacaagcttcccgatggctctattacagtcggacatgatgtcacacctggtgaagatccctggcatcatcatcgcggcctctgcggtccgtgccaaggccacccgcatctctatccagtgccgcagctgccgcaacaccctcaccaacattgccatgcgccctggcctcgagggctatgccctgcccaggaagtgcaacacgtgagtctgtggcccagagggactgtgggaggtgacctgagtgaagatcagaaaggatgagaacaagtagcaagcactgcctgcagctgcttctagagatccactgggatgggctgggcaggggtgtgcccttaggattggcacagatctgatgccctgtggctctgagacaccatgaacagggtccctctacattggtgacttctgtctcaccaggatacccagacagcgttgtagggaacccagggttgggagggaaaagcagtccagggtaatgagtctacttggaatcttctgaagcaaactatggtttgctcactaggccagatctagcctgctgaccctatggcccaggaacacgttcgttcatttaagtattgcccacagctggtttcgcactacaaaggcagggtatgtggcctcttggctggcagaacctggaatgcacatcctccggccctttctagaaaatgtttgctgcccccagtctgaaggaaccccaccctcttcactggctgctctttcttggctccttcgctggtgcctcctcagcttcccatccacctgtggcacagctgcctcattccatgctgttgacatctctcacttggagaggcacgctacctcctccctgatcccccgcgtccaccctccaccccctcagtctgttttccacccagcagccaggtgtcccttgacactcaggtggtccagtcatttacttcttagtcaagtcctgcacagcccaccacgatctgctcctggcttccccaggcctcgctgcccctcctctctccaggcccggcctcactgcctccttcctgtttctggaatacactgactacccccagtctcactgcctttgaccttgctgtttcctctactgggagtgctgttcctcaagctaccatagtctgtgtcctcacttcttcaggcttctcttcacatgtccccttaccaggggcatcttgcccaacccttcatcttcagtttggtgtgcatgtacctcgtctctcccacacctgcctacttttttacttttcttcacagcatgtagctgtcactctttaatatgattgtttgcttgtatgtcttttcagcctcccttgataggaacttaggctccacaagagcagggacctttttgttcagtgctgtgccccctgcacctggaatagtgtcagacacatagtaggttttgctatgatgtttacttctttatgttgctataatatctattgaataatgacataattacctagggatacgtagaggcttagaccctcagaatggtctagaactgcctagaatcccactggaaaagatcttgggatttgagtggggctttagtaagagaattgatgaactagctcttcacccatgaggacaccatgatcctgcaagaagaccgagtgtgacctgtctgcctcctctcagcaagttaatggaaggacccagcctcaagcagttcccttgactcttaatccagtgctaggtccgtcagtgttgccttcctttcttacctccaggcagcgttgcctgcctggcttatctccagcttattctggagacccccataaattgccgctggcaacgtctccttgctggctcctgggatgaatgagccctgcctttggattctccaggtagctttggtgactcttttcccttaccttgtacagagatcaggctgggcgccccaaatgcccattggacccgtacttcatcatgcccgacaaatgcaaatgcgtggacttccagaccctgaagctgcaggagctgcctgatgcagtcccccacggggagatgcccagacacatgcagctctactgcgacaggtgaggcagacgggctgggaggtgggcatctacgacggtggatgtcccagctgtggccctaacccgagtgttgggagtgggtcatctggagcagggtgagtagggtggagaaggtggccagttgcagagcacctgctctgtgcctaatgcttccataagttcctctcatctcgtctttccataatctgcaggggcatgtcagccccattttgcagatgaggaaatgtaacttggagagattaaatgacttcctgtgtggaggagagccgggctttcagcctatgtgcattgctttccaaagtctgtgttcttcttaggataagaggcccaggatgcacagctagataaccaatagctggcaaagcctcttcccagcctgacaccccacctcctaccccaggctttcttttttttttgagacggagtctggctctgtagcccaggctggagtgcagtggcgcgatctcggctcactgcaagctccacctcctgggttaatgccattctccggcctcagcctcccgagtagctgggactacaggcgccctccaccatgcccagctaattttttgtattttttagtagagatgaggtttcaccttgttagccaggatggtctcgatctcctgacctcatgatccgcccgccttggcctcccagagtgcggggattacaggcgtgagctactgcgcccagcgtaccccaggctttctgttaagatcctgctgaacagccacggtggctcatgcctgtaatcccagcacttggagcggctgagacaggaggattgcttgaggccaggagttcaagaccagcctgggcaacatactgagaccctgtatctaaaaaaaaaaaatttattagctgggtgttggggcagacacctataatcccagctacttgggaggctgaggtgggagaatcacttgaccccagaaggttgaggttgcagtgagctgtgattacaccactccactctagcctgggtgacagagcgagaccctgtctcaaaaaggaaaacaaaaaagattctactgagggggagagggtactgagcttgggcccctcatagtaacctgggtggaaggttttgagatctttgattagggttctaacctgggcttgcatatcctgaaattgcatgcagatgttctgaggagagcggatctgtagcttctgttaacttcattagtggcaacagagtatgtaggggtcaggctcttgctccctgggcaagttatgtgactttgtcaagcttcagtttcctcatcagtaaaatggggataaggacagtccttaatctctcagagggctgcttgaaaatgcatgtggtgtttagcacaattccttcatgcagattacgtaatcaggatgtatgattttccaagcagttcatgaatcctgaaaacttacgaagtgggtatgggaagaggggagttggaggctcatggagtgacggtgatggtcttttctggagctgtgatgcctgatggtataaagcacttctatgtctgctgcctcacctgactccacaacatgagaggcaggccacttcgtcatccccctaggctcagaggtgcaatgacttcgttgaggtcacacagcgactaagtgtccctccacaccaccctgtctctgactgggggacttggagacttccctgtttcaacatctcattttgaaaacaggaaatgaaaacccagaggcaaaatgagctcacagagccatgaagaggcaaaaagggcgagtggcccctcaaggaggctggggggcgtgaagaggaagtcttgccctgagaggctaaagggcaccacacagcgagctgacagcagacacgtggagatggggcttttggagggctctgtgggctggcactaagcctcctaaaccagcgtacaaatgagttagcgagttcagcgagagtcaggccaccacctgcctttctgtttggctgtcactgtgggcaacaccatcctccaagcagctgagcatgggctgagtgacgtggggagagaggccgttctctgggctccgtggggctggagccagctcagcatgtggtgcctgtggcaaaaatgctgcagtggaccctgcgtgtcctgggcatgggtggaatcagagacttgctgtccaagtcagaatctcagcttttctcctttctcctctaccctcctctcaggtacctgtgtgacaaggtcgtccctgggaacagggttaccatcatgggcatctactccatcaagaagtttggcctgactaccagcaggggccgtgacagggtgggcgtgggcatccgaagctcctacatccgtgtcctgggcatccaggtggacacagatggctctggtgagttggctttggggtcctggcttagccctgctaaaaggctgtgcttgcatacttctggtaacaggcagctcgttacttcatgaggtagcccaggatgtccttgtgttgctcatatcattagaacgttcatttttatattaagtgatccctggaacttccacacattggtcctagctgtggctcctgggctgagggtgtttgcctaagtgcaggattaaggcagaaggactgaggtcaaatcactggggaattactgaaagccaagtcttcacttctgtgacaggaaatacaagagaagtgaaacgcagggttccaggcaggcagccgcctagtgtctagttggagaaataagaaaactgtgagaccgctggggacatgtgggtaaagtggtggctgttgtgggtcacgcagttccaaggaggtgctaaaggaggtctgagaaggaggaggtcggggctgggccttggggaaggttttctgggaggaggttaatctgagctgggctttgaagagtggtggatgtggaagaacttccaggcgggaggggatggcaggagcaggtgaagaccccggcctgggcaaggtactgagtggctggagggccgagtgggagtctaggggatgaggggccaggtggtgtaagaggccttgagtgccgagatggggagctcctgcttacacctgagggcagcaggggccactgagggttttcaggtttgtttcagccctctggctgcagtgaattgattcagaggggtggcttccccagggctcagtccatggcccaccccacatttacacaaactacctagattattacaactttaaaaccactgacaggtaagtagctctcacatttccatttctagcctgggcttctccccacgttccagactttaataaccaactgctgatttgacatgttcacttacatatctgaaaggcatctcgaactttacatggctgaagctaagctcccctttccccaccctcagactggctcctctcagtcttcccatcttcaccctttcagttgctcagacaaaaacccccaagtcacccttggtgctcttttctctcatcccccacatctaatcactcaggaactctggccagctccacctttaaaacgtgtccaggatctgaccacttctcatcctccccacctgctctgagcccttgtcagccctccctggatcaccgttgatcctccccagtgttcgtctccaccttgccctaccttctctgttctgcagcagccagtgagcgatgctgtcatgaccaagacactatatcactcctcggctgaaaggggagaccttccagtggtttccaaggtcctatgccatctggccctctgtttgctcagaacccttctccccacttcccctcaccctttggaccctggaacacaccaggcccattcctgagggcttgagagctgggatctctgtttactcagataggttgtgctgtcctggccctaagggccctaagggctctgccttctgggaggtccctgagctggtgccaggatgggcagtgggctggaagagctcccttgtactcactcatgcgcctgctttgcctaccaaggccgcagctttgctggggccgtgagcccccaggaggaggaggagttccgtcgcctggctgccctcccaaatgtctatgaggtcatctccaagagcatcgccccctccatctttgggggcacagacatgaagaaggccattgcctgcctgctctttgggggctcccgaaagaggtaggggcttgagttcccttgggtttggggaggcggctgatgatggggctcacagtaggataattactggataatcaggactgggcactcttttttgtatttcctgggcccctcagtctgccaggcacctttgccagcccccaagcttgccatcagctggctagtggctgatctgcgcacctgtctcagcgatgccctgaccctggcaagggggagactgggggcctggcaagtgcagtgggagagcactgagcttagggtcgtgtaggtaccaggacttaaatctcagcactgagcttggggtcagtagcagggatattattagcagctgccatttactgtgttcttcctatgcacagccattctttgttttttttttttgagacagtctcactctgttgcccaggctggagtgcagtggtgtgatctcggctcactgcaagctccgcctcttgggttcacaccattctcctgcctcagcctcccgagtagctgggactacaggcgcctgccaccatgcccagctaattttttttgtatttttagtagagacagggtttcaccgtgttagccaggatggtctcgatctcctgacctcgtgatccgcccgcctcggcctcccaaagtgctgggattacaggcgtgagccaccgcacccggccgcacaggcattcttctaagtgctttatgtgtctgaagcccagtcattcctcacagtaacctgttaacgcagctgttgtgcccattttatagatgagggaattgaggcatagagagttaaagggacttgctccccagcacatgcaggggagccaggagcctgctgtcatggtgcttgttctgccgcaccgtgcacagcccacaggcagctctctgtccttttctttcaagctgggaggaacgttgctcagatgctgggtgtacccgagcacagccataagagccatttcctttaaccctcctcttctgggaggcaagctctgtcctcattgctaggcaagacctaccatggtttgggaactacagagctgggtaggaacatgggtctcaggccacagccactaccttcttaccaactctgaggcccatgatagttgggggagtcaactgccagcccaccaatctggtgactggatgtcacatgcgatgccctcatggattctcaccttgtccatctacccttcgtcccccaggctccctgatggacttactcgccgaggagacatcaacctgctgatgctaggggaccctgggacagccaagtcccagcttctgaagtttgtggagaagtgttctcccattggggtgagtggcctgggatacctttgccaccttggcttgcagggaggaaggctgcagggcagggcctctgggtccccaggacacctgtggtgggctggctcacccggaatctcttcctcctttctcttggctgcggtcaggatggccgaggagatgggaggaagaagggagccaacaggtgtatgtaggtttggggcagggggcgagtacactgtactgagagtcaggatggggtttgggtctcaccctggccagaaattggctgtgggctttgagtaagtcacccaatctccctgagcgtcagtttatccatttgctaaataatgatattgttatcattaatagctaaaatctggctgggcatggtggttcatccctgtaataccagcgctttgggaggccgaggtgggcggattgcttgagctcaggagtttgagaccagcctggacaacatggtgaaaccctgtctttaccaaaaatacaaaataactagccaggcgtgatatgcacctgtggtcccagctgcttgggaggctgaggtgggaggatcacttaagcccagaacggggaggttgcagtgagccaagattgtgccactgcactccagcctgggtgacagagtgagaccatgtttcaaataataataataaataataataataataataatagctaaaatgaagggccagacactgcttgaagtactttgcatatatttacttagtcttcacctcaactgtgtggcaggtactattacccctgtgttaggggtgagaaaactcaggtacagaatgggtaagtgtcttggcccaggtctcactgctggtaagcattagagcaggatgtgattgaacccaagtgtctgatgagctgggtcctctgctgcgttgttgaatgggtctgcggggatcagagccagagaaggtctgacatgatccgagtggcggggttgtatagggcgagatggtggtctttggatagataggaagtgtgccaaatttgccacactggcactgtccagtagaaatagtgaactgcacatgcgacccatgtatgtcttctcagattgtctaacagccacattaaaaagtagctgggtgcggttgtgtgcatacctgtagtcccagctacttgggaggctgaggtgggaggatcacttgagcccaggagtttgagaccagcttgggcaacatagcaagaccccgtttcaatttaaaaggaagaaggggaaagaaaaaaggaaaaacaggtgaagttacttctgtttaactcgctatatctaaaatctcatttcaacatgttgtttgatatgtagattattgagatactttacattcttaggagctctgagtctttgaaatcgtgcgtattttgcacgattaaggacatctcagttaggactttcccaatttcaggggctctatggcagtatgtggcgtgtaggtctatatagagacgacaagggactcacgatgggggcaggctttccctgggagtcaggagtcctcatcctagccctgaggctaactcctcttctctgggcctcagtttgctcatctgtgagttgggcctcacaagactgtgtcacagggctgtggtgaggcttaggtgagccatggatgtgatgccctcagcggggagaacatctgggcacaccgaggcccagggcagcatccccttccagagggagacgcactgagttggagccttgagtcctattctgtaccctgcagccagctttgatgtgtgaccttgggcaaatcacaacctcagtgggtctttttgtcttatgggggtcaaagcatggagttgttattgggccctgacaccaccccactgccccaggtatacacgtctgggaaaggcagcagcgcagctggactgacagcctcggtgatgagggacccttcgtcccggaatttcatcatggagggcggagccatggtcctggccgatggtggggtcgtctgtattgacgagtttgacaaggtgagtctgatgaggtgggtagtagccaaaaggtgggtggcaccagggtatgtgacttcctgtgctcagccagcagaaatcacctctgacttgggagacatgttttcaatccctgggccggtcactctagtaactgtgggaagctgcttaacctcttcaagcctcagttcccatatctgaagagtggggagaagaaaggcaagcccacacagttgttcccatgattagaggtgacctggttgctgccattggccttgcgtggagctggtattcaggagtgagggctgctgttagttttcctgtttctactgctccctgctccctcacttcagtaggtctgatgatatttctctcttccccacttagatgcgagaagatgaccgtgtggcaatccacgaagccatggagcagcagaccatctctatcgccaaggtgagtggccctccatggagagcccagcctgcagcagcccagcgtggcccaaccgtcctcaggctgccctgattgggaccaagttctctttgcccaggcctagaatctgtgtgtgtgtgtgtgtgtgtgtgtgtgtgtgtgtgtgtgtgtgtgtgtgtgtgtgttgtaaacgtgtatataagaaggcatctttgccatctcctcccccttttcgtcgtctgtcgcctgttaggctgggatcaccaccaccctgaactcccgctgctccgtcctggctgctgccaactcagtgttcggccgctgggatgagacgaagggggaggacaacattgacttcatgcccaccatcttgtcgcgcttcgacatgatcttcatcgtcaaggatgagcacaatgaggagagggatgtggtacgtccaggggcagggctggtggccatgggacctgcctccaggcaggcttgtgattgtgtgggaaggagaatggagaacaagggccttggctggcaaagtcctgactgtcaggctgtgaaattggggagcacgtgagagggcggttgttgtggactgcagaggattgaagcagggtctggagtcctgtggcctgctctgcctctgccgtgagtgataagctgtgtgatttgggctaaatcagtttctccctgggcctcagtcccttatatatgaaacagaggagttgacattgggttatgagtaatagaacctcagttctggttagtaaatttttcaaagaaaaaaacatagtggtttatagaattggtaagtccggcggcttaaggcccaggtagatctggattctcaaacaactgtctctgcctttctgttctgcttcccttggtggaatctttgtacttgggcagctgttcctcttgtggtggcaaagacaaaataagattttgtcctgttagcttgtagcttaacagcccccaggaaagaggaggccccgtcttttccagtacttctatcaaaagtcccaggatagactcctattggcttgggtagatcctatgtccatgcccaagttggggtggacaagatacatgccccaagtcggggtggacaagctgaacccacccctttatggaccagggcagaggagcaaggagcattaagttctctctaaaggagaatccagatgctcccatcagaacgagggcctggtgctgagcaaacaggctgagcacgcctgagatctcagcaccctttccggctccttgatgccagggccccatcagctctttctggctgttccacctcagtgctgggactcaggcttgggacggcctgtgggatgacccattatcccctctgctctccagatgctggccaagcatgtcatcactctgcacgtgagcgcactgacacagacacaggctgtggagggcgagattgacctggccaagctgaagaagtttattgcctactgccgagtgtgagtcctggacgcaggcccacgggggtgaggttgcccagcttccctgggtgggagagaacccagtcccctggtcctgctcctcctcatgaagaacagcccagatgttgctgttctgaggttctcagctctactgaatctgctctgctcccttctaaccttgcgtagctcactggctcttggcttcagttttcccacctccacaccaaggaggtgggatttagatggtcttgaagacctcctcgagtctgacatgcagggaggcagtgaagtgtagacatggtagacatgggctctgggtcatacctgccttcactctatgactttgggcaagttggttggcctctctgagccttgatttccccaggcctatcgatgtttgctaggatttttgtaaggattgcacaagatgatgagtaagtgcttggcatagccctgccctgggtaaatactcagtgagtcgcagctgcaatttgattgttctcacagattttcaataataataattatatacatagtactggctggttgcagtggctcacgctgtaatcccagcactttgggaggcggaggcaggtggatcacttgaggtcaggagtgcgagaccagcctggccaacgtggcgaaaccccatgtctactaaaaatacaaaaattagccgggtgtggtggtgcacacctatagtcccagctactcaggaggctgaggcaggagaattgcttgaacccaggaggcagagattgcagtgagctgagatcgtgccattgcacttcagcctgggcaacagagtgagactctgtctcaaaaaaaaaaaatatatatatatgtgtacacacacacacacacacacacactcactcttacacactactttctttgtgccaggcattctgaattactattcagtattttctatatgaataaattataaccctcccccaaaacctaccaggtaaggtgtgctattattcccttccctttatggatggggaagctgaggcaaaggaagttaagtaacttgcccaaggtcacatgccagaggtagtggagccaggatgtgaacccagctgcttgcctccagaggctgtgctcttaaccacagtgcttcgattcttgtcgtacagcgctttggtgatcttttgaaggagctaaaacccaggggttgagggctctttgaatgcactaccagtggggggctggtgggtccctgattcagcacctctgccagggtgagtgggtagtccctgggtcttcatccaagtctgagctctgtgtggcccagtcttgagaggcttgggcccacagctgtgagtcagggagccctggattctaatcttccctctgcactaagtccccaggtagccttggggagttccctccctccctctgggtctcagtctccacatccttaggatggttgagctaaggctttccctacatcagtgactgtcagttggcctgggggctagaggggaggggatgggatagggtagatgctgatcagacttccccacacctaccgtcccaggagagtctgaggtgctcccagcccctggactgcagtcaccgccaagcctcctgtgggtgtcatcagcttgtcgtgtcttcagatgtgttgggtggaggagtttgagactgctgcaaagcccaccacccagtgggcctccatgccgctgtgattgtgccattgttcattacatgtatgggggaccttgtggcaagacaccacacagcgtctaacagtggggaagaggcggttttcaccctgcagacgtgcctggcttttcttcacctgttttttaagagaggcacccatatttctccccagtgttgatgtttgtggcagctgcccacagccagatttcacttaaatcttttccgattgttgtcccccagcccatatgagtgggcagctgtggtgtggtgggaaagtgcatgtctgtaagctggcagggggctgggggaaagggtaggtgccctaagagtccctcctggcctcacaccagcctctccccactgtcctgcaggaagtgtggcccccggctgtcagcagaggctgcagagaaactgaagaaccgctacatcatcatgcggagcggggcccgtcagcacgagagggacagtgaccgccgctccagcatccccatcactgtgcggtgagcaggcgggcagggctgggccatggcagatggggcttgctttacacagcagggtgtgcttggcaaccaggggcagtggtccaggcttttcacttggcacaggcccatagtagctctgggcaggaagagtccctttggagcataaactatggcctccttgatctcaatgatgatccatgtttcttgatttaaggccgggcaaacctagacccctcttgtctgaatttggcctggcttctcccattgtaggaagcccgaagggagggaaggacccaggcctgggagtcaagagtcttgggtcccagcctctagcccactgtgtgactgtagggaaattacattccttctctggccctcagtgcttttagctcctaactctgttcattcttgtgactttgtagacaatacagtgggtaagagttgggatttacctggtttgaatcctgtctccagcactgactggttggaaatggatttggctataagtaatggtaaatccagataaagtagcttaaagaaataggaagttcatttctcttttctgtagcactgtctggaggaagatggtatggggactggtgtgaggactcctcaagctcccccttactcttagtccgagatggccgctagaacttcagccatcacctccaggcagcaggacaggaaggaaagagagcttcccttttaaaggacacttcatgaagtcccacacaatgcttggacttacaacttactgccatagattggtcacacaaatacaacctggtacaaaagatgtctgggatgtgttttagtggatcgctgtgtgccagactaaaaactggggttccaagctaggtgcagtggcctacattgtgatcctagcactttgggaggctgaggcaggaggattacttgaggccaggagtttgagaccagcctgggcaacatagcaagactcccatttctacaaaaaataaaaaattagccaggcattgtggtgcatgcctgtagacccagctcctcaggtggctgaggtggaaggatcactggagcccaggagttcgaggctgcagtgagctatgatcatgccactacattccagcctggtccacagagcgagactttgtctcaaaaaaaaaaaaaaaaaaaaaaaattgcagttctatgactaagatcaaaagggagatggattatggggacacctagcagtctccaccacagtcttaccactttgggcaagcacctccctggtaacgggctggctggggaggaagggaatagcggaccgaggctaccctgagcacgctgttgcccccacaggcagctggaggccattgtgcgcatcgcggaagccctcagcaagatgaagctgcagcccttcgccacagaggcagatgtggaggaggccctgcggctcttccaagtgtccacgttggatgctgccttgtccggtaccctgtcaggtgagcagatgcaggggccatggtctcaattgatctgggttccctggctcggagctctgtgggcagggctctggcctgctgggggcctgcagtgtgtgtcttgcttctctgagtttgctgagcttctctgagtttctttttgccataagacccctctcctcctttctccccaccgctgtttcctccaagatgggaagaagcagcttctctccagacccttgaacacaatcctcttgacccaggtcattgatgataacccttctcactggctaggaacaacagttgatgctctgcttcctagagcttgtcagcattttcagtgcttccagagttatttcttgcattttgccttacagctgccccctggaagccaggtgagcagtcagtcctgcccatgttagaaatgagacagctgacactcgaaggggcctttccctggtgcccaagatcacagtcgcttggctggaatgcaagtctcctggcccctaggccagcgttttccacaccataagccatactgtctggtttcggtcagcctttcaacagactgtcccaggcaccgatcatgagccaggctacctacgctggggaaaatctgttccttcacccagcagatacttcattagtgttactgtttgccaggcactgttctaggtgctgggagtataagagcaatcaatcacagggtcccggccctcctgggttctcattctcgttctagttggggagagatagacagtagagaaacaaatgcaggtagtgtaggtagtgaaaaaggcagtgagggagatgatggcagggccaggtgtgttggaaaaggaggacgtgctctttcccatggagtgagtgggcatggcctctgcaaggaggtgatgccaagcagggagctgcatgaaggggacagtgtggctccttgggggaagagctgctcaggtggaggcagcgctaagtgtcagtttccccaggagggagcaggtttggtgcatttgaatggggaggcacttgggtgaggaatggggtgggtggggcctgttcctcctgtcccccttggtgaagactcagcctctaccctggagacacttgctgtcacatgagacattgcaggtggaggcctctgggatgctgcaggcacagagggcaggggtgatatggagtggtgataatttgagttgggtcttatgggctatgtaggagtttgcctcacagactcccctctcaatgacttcttgaccatgagcccaccatctccttagctgaaacaccaaggcctctgtggcagtaattggaagtcacgagcctcctggttgccgagggctcctcagggcacctcgtagatgtgtccagggcaggctggcttccctcctgggtcactgatgggccccttccaactctctctctaatctatctgctccagcaacaaaaggagtcctgctgtggcctccaagggcccgcaggacttggtccctagtgacactctggccatgtctctgctgcgctgggccccgggctgctttttgaatgagacaggtgtgttcctgcctctgtgactttgtgcttggcctggagtgtccccacatgtgccatatcctgtctcctcaatcaggcctgcaccaccctggcacactcggtgcccttttctgacttactcttcggggcctggctcaggctgttcttccttgggctagaggctgtctctgtccaagaactcccattgtcccagctccccggctgcctcacttctccatgcccacaggggtggagggcttcaccagccaggaggaccaggagatgctgagccgcatcgagaagcagctcaagcgccgctttgccattggctcccaggtgtctgagcacagcatcatcaaggacttcaccaagcaggtgagcctgccttggagtgggggtgtgagccggcacggggtgcaggtcttctgctggttcccacccactcagcactggcatcttactcagcagacaggccctgaacgggggtaggatggacaactgtccctttctcagaccttttctagccatcattccttccctagggacatcttcatcaggagcagggatgggggtattttttctgtcccacgaaggggaggggagagcagaggtggttggattctggtgaaaccccatacaagttccccgcagcccttcccgtctgtgcctttccccgttggcgggcgtttcatggagtgggaaggggcagagccatgagagtgagctttctggctcactgaggagggtactgttggccccatagagagaagatgggatttcccagatgctctggaaaacctgtcacctttaaaatctcaggattaatcctagtttctggtctccgctccttgtacatcatctcattttgattcagggcagtttaatgggtggtatcgtgtctattctataggtgcgcagactgaggcttagagaaaggtttagagcttcggttctagagtcagatgggacttaagtcccagctctacctcttaattgctgtgaccttgagcaagtggcttagcctccgtgtgcctcagtgtctggtacacagtgggcactcaggaagtgtgggccctttaggtcaaaggagcctgagtacaaagttccccgtgagcctggggatgtctgggctctgtcggagtcccctcgggcagcacgtgccgttagccagccatgtgctcccacagaaatacccggagcacgccatccacaaggtgctgcagctcatgctgcggcgcggcgagatccagcatcgcatgcagcgcaaggttctctaccgcctcaagtgagtcgcgccgcctcactggactcatggactcgcccacgcctcgcccctcctgccgctgcctgccattgacaatgttgctgggacctctgcctccccactgcagccctcgaacttcccaggcaccctcctttctgccccagaggaaggagctgtagtgtcctgctgcctctgggcgcccgcctctagcgcggttctgggaagtgtgcttttggcatccgttaataataaagccacggtgtgttcaggtatctgtgggtttgtgcactcggtgacctgtcacctccatcgtgccctcatggcagggtaagtgtgagggaacagggtctggaggcagactggccagggtttctgacttggatctgccactcagacttctgggtaagtcacgtgacttgagtgctccggtttcttcatctgtttagcggggctcataaagccactcccttgatgctgggaatccagtgagaccagggagtggggaagcgcttctcaaagtgtgtgattttgatccgcctcacctgttccccagtaacttattggggggctgcgagccgtggtgcggcggtcagactgcctggattcatggaccctctccatgccttagtttccttatctgtaagcaggctgatactagaacctgcttcacagggttgtgcttagggtcagtgagcagctgttagtgaggggaatgtagtggccaccaggcaggaactaggactccagccagttctttcctggtgggccacgtgtaactgtgtggccttgggcgagacatttcacttttctgtgcctgagtttatcagtaaactggagatggggggattcctcaccctgagttgtgaggattgaatgacagaaggcactagtgacagtgatgctggaggaaggagtgttgccaagtgcctcggtcactttgcctaatttcagaaagtcactctgagttggtatgttttgtgtttttaaaaaagctaggattcataaaattaaatagaaatcagtgaaataaaatatttgatatttaaaatacatttagaaatacaaagtgtcaagcaaaacgtgaatttggaaatctatggaacattagataaggtatttaaaagtaattgccatgtaaaaatgacacgaacttgaagtaagattatttgatttttctaaaaatacaagaaagcttggtgcatccgcctggtcattgttgaatcacaaatgtatttttgtgcagaagattcctgcagctcaaagccctttctgattccatactgttcggggaaatggagagatgagaggagctaaatcagctttcctctgactcactcccgttcaaagctcatttcttttctgataattttgagagtgtctggaacagcttttgttttcttggtggggtggcaaccttactgggcgcgctgtgggttttgcatccaaggctgcatctccggttcctgctagcctttcatcttgctcaggtggggactcgcgtgcatctcaggcccaaggtcctcccgtcctgcttgttcatggagtgtggaactctcatgaggttcaccctgcagtggcaactttgctggtggccttttctccacccctgtggtgggtggtgctgctgtggtcacctctgttttacaggtggagaaactgaggctcagagagtcaagtgtcacagtgagggagtgcagggcaggcttcaaacctggtggctccgaactccacccatgtcaccttttctgccagattctctcttggcagtccctgacctcggcctgagtgggatgctgggcagagacagtcctggcctgggggaggcaggtgccagtcaggtgggggagactgaccctggggtaggttcccaggggtaggtggcctgactggcaggcacaggactgagaggccaaagggggtccgactggcttttccgtggtagttggggtagggctcataggaggagcagctgtgctcagagcatgccagtctccttccagatcggggcagcagcatgaagagaggcccctgagccagggaaacacctgcttgttggggaaagcaaaggctgaggagagagcctgaagggaggccaggagaggggagcattcaggctgagtaatagttggggctcggcttagtggaatctccagtcaggcctcagtgacacctagagaggcagggaggtggggcaagggggggagctggattcccgagctggtgctgccactcagggtggctgagctcttcactcacctgtgacctggctcccttaggcttgtcttctcagatctgtccctaccctcaccagctacaggccgcgacccagcggacatttctctctgctgagcaaatcacttcacccctcagcctcctttcatctgtagaaagggcacagcagtacagtagccctttcacccaggggtggctgtgaggattaactgagggggtagacatcagagcagctgggcctggccccggggaggtgctcccaggaagggctgggtgcctgtggttttccctgcctcacagcctctgccgtctcggatttcaccttttcatgcttttgtgtgagcagaggccgagcctctgctgctgtgttccctgccccactctactcctggctgcatgggtctctcaacttcgctcaccactatgagagccgctccaccccttctccagttccaggtctgggaaggagagagcagacaagcttgctcatgatggagtccttttacctggtttctctctctgttcacagataccacctctgttgatctgggaactaagaccatgttgcttgtccttagtcacatatgacttaatttgcacccattgtgggccactggtgtcagacaggaagcctaagcgcaggtatcactgaggaggatacacatgctaactacacgatcttcaccagacctgtgagcttccagccaccagatccaaagtcacagagcacagggacttacaaacccagtgctggaaaacatagcaaaggctatatccaatttaggtttctctttattggaaataaagatggcccatacttcaaatatgttatttagagaatgcttataaagagcagcctaaagtcccattctcttgcctgtaagcaacaaaattacaaaaatgttgaatttctaaaatgcgaaagttaagcattccagagaccagctcatggaagaaggttttatgtttttgggtgttgtaactattatccatatgtatttaaacatgaatacgtctgtttggtatttaacacattttttttttttttggctttcaaggcctttatttttttatttttatttttttcccttttttaatttattatacttgtttttggggtacatgtgcagaacgtaaagttttgttacatgggtatacacatgccatggtggtttgctgcacccatcaacccgtcatctacattaggtatttcttctaatgttatccctccctagccccccaccccccacaaatgtttaattaggagtgtcaagtctggatgaaccaaggtagatatttattttaagacattatggtgaggccaaagagtacattaaaatggttttaatttgtttttatagatcaaaaacaagcattttttattaaaaatatgaggcagtaaagcacagtggttaagaacatggacttggggccaggtgtggtagctcattcctgtaatcccagcactttaggaggctgaggcaggagaatcacttgaggccaggagttcaagactagcctgggcaacatagtgagacccccatcgctctctctctctctttttttttttttttttgagaccaagtctcactctgttgtccaggctggagtgcattggcgcgatctcggctcactgcaacctccgcctcccaggatcaagcgattctcctgcctcagcctcctgagtagctgggattacaggtgcccaccaccacacccagctaattttttgtatttttagtagagatggggtttcaccatgttggctaggctggtttcaaactcctgaactcaagtgatctgcccaccttggcctcccaaagtggtgggattacaggtgtgagccactgcacctggcctattttattatttttttagagatgggggtggttctcactgtgttgcccatgctggtctggaactcctgggctcaatcgatcctcctgcctcggcctcccaaagttcttagattacaggtgtgagccactgcaccagccaggattaaaggagttaacagccccaaagcactcagaacaccaccaggcccagggtaaaggctttttcagtgttccatatgtaaactatctacatatgtagatagttttttacatacgtaaaaaacctactattgacgtatgtaaacctacacacattggcttgctctaacagaagggctgtgttgtaaggtagtaagctccctgtttctgcacgtggtcaggtagaggcaacccagcatctgttggcgggcttggtcttccaggtcagggagacttctccccggctcctactcagggctcaccaccacctatttcatacttactagttgttttagagacagggtttctctgtattgtctggtctggaatcctccagctctggttattcacaggcatagtcacagtgcactacagccttgaactcctgacctcaagcgatcctactgcctcgacctcccaagtagctgggactacaggcgcatgccagtattcccagttcttttctttgaccttttttttttttttttttttttttttttcttttttgaggcggaattttgctctgttcccaggctggagtgtagtatcatgatctcagctccctgcaacctccgcctcccaggttcaagcaattctcctgcctcagcctcccaagtagctgggattacaggtgcctgccaccatgcttggctaatttttgtatttttagtagagacaagatttcaccatgttggccaggctggtcttgatctcctgacctcaggtgatccacctgcctcggcctcccaaagttctgggattataggcatgagccaccgtgcccggccaaatcttttctttgaaatgctaggtcctaaggttattatctccaaattacagatgagaaattgaggctacaagactttgaggaaatgactcaatgtctcagaggcagaagtgaaggatctgggtgagccaccaagggtcgtcttcttaggagatattattgccttcaagatttcaagattgattgttccgggctctgagattctagaattctctcctgccattcctcctcacccctcctgcccttgttttttgttcttccttttttttttaagatggagtcttgctctgtcacccaggctggagtgcagtggcttgctctcttggctcactgcaacctccacctcctggttcaagcaattctcctgccccaggctcccgagtagctgggactacaggcgcgcgccactgtagctggctaatttttgtatttttagtagagatggggtttcaccatgttggctaggctggtgtcaaactcctggcctcaggtgatccgcccacctcagcctcaaaaagtgcaggcctgtgccaccgtgcccagccattttttgttcttccttagagaaccagctcagcctagtgcttctcagccagtaggcctcattctagagcaagacttctgggctccatgctcaatagctgtggaatatattaccctctccaaatctcagtttccgtgtctgtaaaatgggtcgggcttttctggtgttaacaccgaaagtcttgcatcccaggagccccttcagccctaggcacacccgttggtcaccctaaaaatggggggaataaaagcccatctggaagagttgtggtcaggttgggctgaacagcgttcactggtattgagcatggtacctttcaggggcctgcagagaatgggagagaaaattactgctccttacacagggtgacggagtccatggcctgagtgtgacacctaatgccaccacttccagctgtgtgccctgagttcagtttatcttcctgggtctctgttcccccagatgttaagaggattgataatagtgtgggctgagtatagtgagagtataggaagatacagtgaaataacaagagctttgccaggaagtgggcacctggtgcccgctgggcaggagtgcctgtagttaatcattatgtgtctcaaaaggtgtcaaaagcttctgaacacttaatgctgtgttttgggcctggagccccaaaaccagccagtggggactttttttttttttttgagatggagtctcgctctgtcgcccaggctagagtgtgcagtggtgcgacctcagctcactgcaacctccgcctgccagtttcaagcaattcttctgcctcagcctcccgagtagctgggactacaggcgcgtgccaccatgcctggctaattttgttttgttttgtatttttagtagagatggggtttcaccatgctagccagtctggtctggaactcctgacctcctgatccacctgcctcggcctcccaaagtcctgggattacaggcgtgagccactgtacccagcctttttttttttttttcagtcgtatttccatgcaggacacagaaggaccagtggggactcttaccttgtctctagctttggtctttttaaaaaaaataaccctgaataatcaggagaatttttttgatgaatgagggcactcctctccagctgtcccaggggtgcgaggagaacagtgtccatgagggggcgccagagcaccaggcccggggctgcagcctcccgcacccacccggcctggcctgcagggccagctctccaggcgctcccagggacttcccggcctcctaccctgggaatctggaaactccctggctcagactcagcagcccagacgctgcctggaggatcctctggttctgggcattcaccactggctttgtttggacaaaggctctgctgcgtgacagatcctgggggatgcctgagttatcgttatcatgctccagcggaagtgggtatcctcgtcctgggttacacaccaggaaactgaggcacagaaatgcacggagccggggtccaaacccacggatgcccaacccccgaatctttgccagcagtctctgagaatcagtctggatctcagaatgattgtaataatcttggaggcttagaaggctagactcttagaaatattcagttcaaatatacacgtgtattattttttgtatgggtagcgcatgggtgaaaagacaaaagtaaaaccagtcccccttctctctgaccgtccccagccaccctggaggtgaccacagtgatagtttctcgggtcttgtctcctcctgatataggactcatcaaatcttagaattagatgggatttctgggtgactcggtctctggaacccatcagcttctagcacgcagccctaaggttcccactgccatccctgtcaaactcaaactcatgggtgagtttgaggatcttggctcctggaaccccccagcttcaggcccagctactcctttagagttgaaggggctgttttctccagcgacccagacttcagttccctctgtgcctctcctcctccagggggccctccttccagaaacaccctgcctgcttctggtggtataatagaggacactcagcatggcaccctctcactttatgcctggtgatgggcctgatctgtcgggtcagtgcctttccccagaaggaacgtggtggcatttgttgattcatccgtttgtgtcatggagataatgaccgtacctacaataaagggcgaggtgagcattaaatgcatgaatgtatgcagagctcttagactagtgcctgttacattctctatgggtttctattattattgatacttttagttcattcagctaaatttaccaagcattcacaggtttccgggacactgggaatacagagaacaaagcatgtttcttcctgcttgggggagaaagatccagaaagaacgtcagcgccagcatgaagagccttgtgagaaagaacaagtgctctgtgatatttcaagagatgggaccccatggaggcctggtgtgtgggtaccggggtggccttgtgctttgagatgaagccagggggtctagcggggagtacaggtggcaggcaggcatcagttacataagcgcctcaccctgggagctcaagtactgtgtgacggttctgttcacggcccccacacagaacgtgctccttgtcagtagagcagagcagggaggagaagcaccagagagctgctgcgtggagtctggaagtatctcctccaacttccttggggaggaaagcaagggcccagactcttaacaccagcccatgtagtcaggtgaataattcccagtcactatctagtccctggccctggccatctgctcagccccttcggcaactccagcctggtccagcctcatctggctctgtgtgtgtgtgtgcgggggggtggtgggtgagaggctggaggagagtggagggggttggggattggggccaggcagcgctgtgtgaggctagagatgggaggtcctagagggagaccaggaaatcaggcactcaggagagctgggagggtaaaagttgctgggggcaggtgtctcgggggcagatggtggagcccaggtgaaccccctaggttgtctctgtcccatcatccttgatcctctttgttttttgagacagggtctcacaatgttgctcaggctggagtgcagtagtgcagtcatggcccattgcaccctcaaccttgtgggctcaagggatcctctcacctcagctcctggagtagctgggactacaggcatgcaccaccatgtctggcttatttcttaattttcttgtagagacagggtcttgctatattgcccaggctagcctcaagcttgagggctcaaagtgatcttcctgcctccacctcctaagtgttgagactataggtatgagccactgggcctggccccttgattccctttgcatgatagaacttcaacccttggagccccagaggatccaggcagtatcaagtcaccatccatgttatagatgagaccatgtataacatcaccatctttaacaccaccatccagccttcagatgagatcacagccctgactgcaacctctctgaccacagctcagagagggcatgtggcatgctcacaaacagtctgttaggggcttcccctgggtcagaactcagacccctcggctcttagtccaatgctcctctcctaacccaggttgcctttggggaccttgggggggtctctcatttcattgggaatgcctaatggcattggttgccacgtgttgccattgttggtgtatgtaagtcgctcttctgtcctcatatccccactctgtcgtcctgccccttcttgggggtggatcctgcaggagagggggaagcagccaagcaaggcttcatttctacttttccatctgcaggacccagggctgggcacatttggtgcaacaggctggaaatattctcccctaccccaccctccccatccctcctcagaggcactgggccggggactggagcctgtggtgaggtccttcccctcaagccctgtcgggggcagccactaaatggccccaagatcccatggactcaagggattccatgtggcatcccttcccgtgctgcagaggctgggaaacttaaccacatttccagactctcttgcagctagtgtttctgatggcatggaaatcctgccattgaatgcaaacgcacaagactagaatttggaactgagtttcgtggggagagaggcagggcatggagcatccaagcatccattttgctgtgtggatggtggtagagtgcaggcctaatgctggagctggcagttgtaatggtggcttctgaattccacagcttcttgatggaggcaggagccctggcatcttagcccagttcagcagcgttttaggcagctttcctggatgctcagacacttagtaataatatgcttgaaaaaaaaaagccctttttttccctactagctggaatggattccgttgtctgtcactgaaccctgatgatacatcttctacacactgtgtgggacaaggccccatggaagtcccaagtcagtaacctgaactccccaccctctctgccaagaaagagcttttttctctcagtatccatttatcggtcccaggggagctctctgattggctgtgcttgggccagtcattatctcctgg

SEQ ID NO: 53 - DNA, 2525 bp, Homo sapiens
ttttcccgcgaaactcggcggctgagcgtggaggttcttgtctcccctggtttgtgaagtgcggaaaaccagaggcgcagtcatgtcgggattcgacgatcctggcattttctacagcgacagcttcgggggcgacgcccaggccgacgaggggcaggcccgcaaatcgcagctgcagaggcgcttcaaggagttcctgcggcagtaccgagtgggcaccgaccgcacgggcttcaccttcaaatacagggatgaactcaagcggcattacaacctgggggagtactggattgaggtggagatggaggatctggccagctttgatgaggacctggccgactacttgtacaagcagccagccgagcacctgcagctgctggaggaagctgccaaggaggtagctgatgaggtgacccggccccggccttctggggaggaggtgctccaggacatccaggtcatgctcaagtcggacgccagcccttccagcattcgtagcctgaagtcggacatgatgtcacacctggtgaagatccctggcatcatcatcgcggcctctgcggtccgtgccaaggccacccgcatctctatccagtgccgcagctgccgcaacaccctcaccaacattgccatgcgccctggcctcgagggctatgccctgcccaggaagtgcaacacagatcaggctggacgccccaaatgcccattggacccgtacttcatcatgcccgacaaatgcaaatgcgtggacttccagaccctgaagctgcaggagctgcctgatgcagtcccccacggggagatgcccagacacatgcagctctactgcgacaggtacctgtgtgacaaggtcgtccctgggaacagggttaccatcatgggcatctactccatcaagaagtttggcctgactaccagcaggggccgtgacagggtgggcgtgggcatccgaagctcctacatccgtgtcctgggcatccaggtggacacagatggctctggccgcagctttgctggggccgtgagcccccaggaggaggaggagttccgtcgcctggctgccctcccaaatgtctatgaggtcatctccaagagcatcgccccctccatctttgggggcacagacatgaagaaggccattgcctgcctgctctttgggggctcccgaaagaggctccctgatggacttactcgccgaggagacatcaacctgctgatgctaggggaccctgggacagccaagtcccagcttctgaagtttgtggagaagtgttctcccattggggtatacacgtctgggaaaggcagcagcgcagctggactgacagcctcggtgatgagggacccttcgtcccggaatttcatcatggagggcggagccatggtcctggccgatggtggggtcgtctgtattgacgagtttgacaagatgcgagaagatgaccgtgtggcaatccacgaagccatggagcagcagaccatctctatcgccaaggctgggatcaccaccaccctgaactcccgctgctccgtcctggctgctgccaactcagtgttcggccgctgggatgagacgaagggggaggacaacattgacttcatgcccaccatcttgtcgcgcttcgacatgatcttcatcgtcaaggatgagcacaatgaggtgagggatgtgatgctggccaagcatgtcatcactctgcacgtgagtgcactgacacagacacaggctgtggagggcgagattgacctggccaagctgaagaagtttattgcctactgccgagtgaagtgtggcccccggctgtcagcagaggctgcagagaaactgaagaaccgctacatcatcatgcggacggggcccgtcagcacgagagggacagtgaccgcgtccagcatccccatcactgtgcggcagttggaggccattgtgcgcatcgcggaagccctcagcaagatgaagctgcagcccttcgccacagaggcagatgtggaggaggccctgcggctcttccaagtgtccacgttggatgctgccttgtccggtaccctgtcaggggtggagggcttcaccagccaggaggaccaggagatgctgagccgcatcgagaagcagctcaagcgccgctttgccattggctcccaggtgtctgagcacagcatcatcaaggacttcaccaagcagaaatacccggagcacgccatccacaaggtgctgcagctcatgctgcggcgcggcgagatccagcatcgcatgcagcgcaaggttctctaccgcctcaagtgagtcgcgccgctcactggactcatggactcgccacgctcgccctccttgccgctgcctgccattgacaatgttgctgggacctctgcctccccactgcagccctcgaacttcccaggcaccctcctttctgccccagaggaaggagctgtagtgtcctgctgcctctgggcgcccgctctagcgggttctgggaagtgtgcttttggcatccgttaataataaagccacggtgtgttcaggt

SEQ ID NO: 54 - DNA, 2202 bp, Homo sapiens
atgtcgggattcgacgatcctggcattttctacagcgacagcttcgggggcgacgcccaggccgacgaggggcaggcccgcaaatcgcagctgcagaggcgcttcaaggagttcctgcggcagtaccgagtgggcaccgaccgcacgggcttcaccttcaaatacagggatgaactcaagcggcattacaacctgggggagtactggattgaggtggagatggaggatctggccagctttgatgaggacctggccgactacttgtacaagcagccagccgagcacctgcagctgctggaggaagctgccaaggaggtagctgatgaggtgacccggccccggccttctggggaggaggtgctccaggacatccaggtcatgctcaagtcggacgccagcccttccagcattcgtagcctgaagtcggacatgatgtcacacctggtgaagatccctggcatcatcatcgcggcctctgcggtccgtgccaaggccacccgcatctctatccagtgccgcagctgccgcaacaccctcaccaacattgccatgcgccctggcctcgagggctatgccctgcccaggaagtgcaacacagatcaggctggacgccccaaatgcccattggacccgtacttcatcatgcccgacaaatgcaaatgcgtggacttccagaccctgaagctgcaggagctgcctgatgcagtcccccacggggagatgcccagacacatgcagctctactgcgacaggtacctgtgtgacaaggtcgtccctgggaacagggttaccatcatgggcatctactccatcaagaagtttggcctgactaccagcaggggccgtgacagggtgggcgtgggcatccgaagctcctacatccgtgtcctgggcatccaggtggacacagatggctctggccgcagctttgctggggccgtgagcccccaggaggaggaggagttccgtcgcctggctgccctcccaaatgtctatgaggtcatctccaagagcatcgccccctccatctttgggggcacagacatgaagaaggccattgcctgcctgctctttgggggctcccgaaagaggctccctgatggacttactcgccgaggagacatcaacctgctgatgctaggggaccctgggacagccaagtcccagcttctgaagtttgtggagaagtgttctcccattggggtatacacgtctgggaaaggcagcagcgcagctggactgacagcctcggtgatgagggacccttcgtcccggaatttcatcatggagggcggagccatggtcctggccgatggtggggtcgtctgtattgacgagtttgacaagatgcgagaagatgaccgtgtggcaatccacgaagccatggagcagcagaccatctctatcgccaaggctgggatcaccaccaccctgaactcccgctgctccgtcctggctgctgccaactcagtgttcggccgctgggatgagacgaagggggaggacaacattgacttcatgcccaccatcttgtcgcgcttcgacatgatcttcatcgtcaaggatgagcacaatgaggtgagggatgtgatgctggccaagcatgtcatcactctgcacgtgagtgcactgacacagacacaggctgtggagggcgagattgacctggccaagctgaagaagtttattgcctactgccgagtgaagtgtggcccccggctgtcagcagaggctgcagagaaactgaagaaccgctacatcatcatgcggacggggcccgtcagcacgagagggacagtgaccgcgtccagcatccccatcactgtgcggcagttggaggccattgtgcgcatcgcggaagccctcagcaagatgaagctgcagcccttcgccacagaggcagatgtggaggaggccctgcggctcttccaagtgtccacgttggatgctgccttgtccggtaccctgtcaggggtggagggcttcaccagccaggaggaccaggagatgctgagccgcatcgagaagcagctcaagcgccgctttgccattggctcccaggtgtctgagcacagcatcatcaaggacttcaccaagcagaaatacccggagcacgccatccacaaggtgctgcagctcatgctgcggcgcggcgagatccagcatcgcatgcagcgcaaggttctctaccgcctcaagtga

SEQ ID NO: 55 - DNA, 27846 bp, Mus musculus
  misc_feature (800)..(3999): "n" at positions 800 through 3999 can be any base.
  misc_feature (6822)..(7192): "n" at positions 6822 through 7192 can be any base.
  misc_feature (8486)..(9520): "n" at positions 8486 through 9520 can be any base.
  misc_feature (21270)..(21289): "n" at positions 21270 through 21289 can be any base.
gcgcagcgagactgcgcctgcaaccgtctgggctcccgggccctgctgaggcagttggtccttcctgcagaaccgagcaacagcccgtcagggcactctcaccttggtcttgcattggcttcaccctccagccaggacccgcgaggtagacacagggtggaggacagaagaacctgggaacacataacatcattttcactgtcttaaaagtgtctcaaggtggcataaatttttaaagaatcatgatttagtgtcccctctcccagagtgaaaccgttaatgcattattagacctcatcagtaagtcctgcccgctccatcttcaaaacacatctggaatccgttagattcctaccaacttcaccttggtcctaaccactatcccttgccttcccaactcagccttccatctgtctctcccttgctacagatgcctcttttagtttgtttttcacacagcaactagattactttaaaaaatttatttatggatatgagagctctatttgcatgtatgcctgcatggcagaagagaccatctgacagaagagaacatcagatcccattacagatggttgtgagccagcaagtagttgcgaggaattgaactcaggtcctctggaagagcagccaccagtgctcttaaccctgagtagtctctccagccccagattagttcttaagtaacaggtggctcagtggataaaaggcttgctgaggcaagcatgataacttgacttcaatgcccagaacccatcaaaaggaggaagagaaccaactgtacacctaactgcacacannnnnnnnnnnnnnnnnnnnnnnnnnnnnnnnnnnnnnnnnnnnnnnnnnnnnnnnnnnnnnnnnnnnnnnnnnnnnnnnnnnnnnnnnnnnnnnnnnnnnnnnnnnnnnnnnnnnnnnnnnnnnnnnnnnnnnnnnnnnnnnnnnnnnnnnnnnnnnnnnnnnnnnnnnnnnnnnnnnnnnnnnnnnnnnnnnnnnnnnnnnnnnnnnnnnnnnnnnnnnnnnnnnnnnnnnnnnnnnnnnnnnnnnnnnnnnnnnnnnnnnnnnnnnnnnnnnnnnnnnnnnnnnnnnnnnnnnnnnnnnnnnnnnnnnnnnnnnnnnnnnnnnnnnnnnnnnnnnnnnnnnnnnnnnnnnnnnnnnnnnnnnnnnnnnnnnnnnnnnnnnnnnnnnnnnnnnnnnnnnnnnnnnnnnnnnnnnnnnnnnnnnnnnnnnnnnnnnnnnnnnnnnnnnnnnnnnnnnnnnnnnnnnnnnnnnnnnnnnnnnnnnnnnnnnnnnnnnnnnnnnnnnnnnnnnnnnnnnnnnnnnnnnnnnnnnnnnnnnnnnnnnnnnnnnnnnnnnnnnnnnnnnnnnnnnnnnnnnnnnnnnnnnnnnnnnnnnnnnnnnnnnnnnnnnnnnnnnnnnnnnnnnnnnnnnnnnnnnnnnnnnnnnnnnnnnnnnnnnnnnnnnnnnnnnnnnnnnnnnnnnnnnnnnnnnnnnnnnnnnnnnnnnnnnnnnnnnnnnnnnnnnnnnnnnnnnnnnnnnnnnnnnnnnnnnnnnnnnnnnnnnnnnnnnnnnnnnnnnnnnnnnnnnnnnnnnnnnnnnnnnnnnnnnnnnnnnnnnnnnnnnnnnnnnnnnnnnnnnnnnnnnnnnnnnnnnnnnnnnnnnnnnnnnnnnnnnnnnnnnnnnnnnnnnnnnnnnnnnnnnnnnnnnnnnnnnnnnnnnnnnnnnnnnnnnnnnnnnnnnnnnnnnnnnnnnnnnnnnnnnnnnnnnnnnnnnnnnnnnnnnnnnnnnnnnnnnnnnnnnnnnnnnnnnnnnnnnnnnnnnnnnnnnnnnnnnnnnnnnnnnnnnnnnnnnnnnnnnnnnnnnnnnnnnnnnnnnnnnnnnnnnnnnnnnnnnnnnnnnnnnnnnnnnnnnnnnnnnnnnnnnnnnnnnnnnnnnnnnnnnnnnnnnnnnnnnnnnnnnnnnnnnnnnnnnnnnnnnnnnnnnnnnnnnnnnnnnnnnnnnnnnnnnnnnnnnnnnnnnnnnnnnnnnnnnnnnnnnnnnnnnnnnnnnnnnnnnnnnnnnnnnnnnnnnnnnnnnnnnnnnnnnnnnnnnnnnnnnnnnnnnnnnnnnnnnnnnnnnnnnnnnnnnnnnnnnnnnnnnnnnnnnnnnnnnnnnnnnnnnnnnnnnnnnnnnnnnnnnnnnnnnnnnnnnnnnnnnnnnnnnnnnnnnnnnnnnnnnnnnnnnnnnnnnnnnnnnnnnnnnnnnnnnnnnnnnnnnnnnnnnnnnnnnnnnnnnnnnnnnnnnnnnnnnnnnnnnnnnnnnnnnnnnnnnnnnnnnnnnnnnnnnnnnnnnnnnnnnnnnnnnnnnnnnnnnnnnnnnnnnnnnnnnnnnnnnnnnnnnnnnnnnnnnnnnnnnnnnnnnnnnnnnnnnnnnnnnnnnnnnnnnnnnnnnnnnnnnnnnnnnnnnnnnnnnnnnnnnnnnnnnnnnnnnnnnnnnnnnnnnnnnnnnnnnnnnnnnnnnnnnnnnnnnnnnnnnnnnnnnnnnnnnnnnnnnnnnnnnnnnnnnnnnnnnnnnnnnnnnnnnnnnnnnnnnnnnnnnnnnnnnnnnnnnnnnnnnnnnnnnnnnnnnnnnnnnnnnnnnnnnnnnnnnnnnnnnnnnnnnnnnnnnnnnnnnnnnnnnnnnnnnnnnnnnnnnnnnnnnnnnnnnnnnnnnnnnnnnnnnnnnnnnnnnnnnnnnnnnnnnnnnnnnnnnnnnnnnnnnnnnnnnnnnnnnnnnnnnnnnnnnnnnnnnnnnnnnnnnnnnnnnnnnnnnnnnnnnnnnnnnnnnnnnnnnnnnnnnnnnnnnnnnnnnnnnnnnnnnnnnnnnnnnnnnnnnnnnnnnnnnnnnnnnnnnnnnnnnnnnnnnnnnnnnnnnnnnnnnnnnnnnnnnnnnnnnnnnnnnnnnnnnnnnnnnnnnnnnnnnnnnnnnnnnnnnnnnnnnnnnnnnnnnnnnnnnnnnnnnnnnnnnnnnnnnnnnnnnnnnnnnnnnnnnnnnnnnnnnnnnnnnnnnnnnnnnnnnnnnnnnnnnnnnnnnnnnnnnnnnnnnnnnnnnnnnnnnnnnnnnnnnnnnnnnnnnnnnnnnnnnnnnnnnnnnnnnnnnnnnnnnnnnnnnnnnnnnnnnnnnnnnnnnnnnnnnnnnnnnnnnnnnnnnnnnnnnnnnnnnnnnnnnnnnnnnnnnnnnnnnnnnnnnnnnnnnnnnnnnnnnnnnnnnnnnnnnnnnnnnnnnnnnnnnnnnnnnnnnnnnnnnnnnnnnnnnnnnnnnnnnnnnnnnnnnnnnnnnnnnnnnnnnnnnnnnnnnnnnnnnnnnnnnnnnnnnnnnnnnnnnnnnnnnnnnnnnnnnnnnnnnnnnnnnnnnnnnnnnnnnnnnnnnnnnnnnnnnnnnnnnnnnnnnnnnnnnnnnnnnnnnnnnnnnnnnnnnnnnnnnnnnnnnnnnnnnnnnnnnnnnnnnnnnnnnnnnnnnnnnnnnnnnnnnnnnnnnnnnnnnnnnnnnnnnnnnnnnnnnnnnnnnnnnnnnnnnnnnnnnnnnnnnnnnnnnnnnnnnnnnnnnnnnnnnnnnnnnnnnnnnnnnnnnnnnnnnnnnnnnnnnnnnnnnnnnnnnnnnnnnnnnnnnnnnnnnnnnnnnnnnnnnnnnnnnnnnnnnnnnnnnnnnnnnnnnnnnnnnnnnnnnnnnnnnnnnnnnnnnnnnnnnnnnnnnnnnnnnnnnnnnnnnnnnnnnnnnnnnnnnnnnnnnnnnnnnnnnnnnnnnnnnnnnnnnnnnnnnnnnnnnnnnnnnnnnnnnnnnnnnnnnnnnnnnnnnnnnnnnnnnnnnnnnnnnnnnnnnnnnnnnnnnnnnnnnnnnnnnnnnnnnnnnnnnnnnnnnnnnnnnnnnnnnnnnnnnnnnnnnnnnnnnnnnnnnnnnnnnnnnnnnnnnnnnnnnnnnnnnnnnnnnnnnnnnnnnnnnnnnnnnnnnnnnnnnnnnnnnnnnnnnnnnnnnnnnnnnnnngttaaatgcagctgccgcttgggctcgccctggctgtctggcattccccacttagggcaacctgcccacgccgccgccgttacctggtccaactccccaggaggctgggcccgtcgctctgtagccgcacctctgagctgtccggcaggctcaggtgagtcaaagggcccgggggcaacgaggggtctgcagggaagccagcgtaaaacccgtagggggacaagtcttaacagcctacgtgtccacgtctaacctgcagtaccttttccgatccccctctggcaaggccaacaaaatgcaggtcctccttccctaatctccctccacgcctggcaccttcccaaagtgtcctttccggattagctcttgaactcagacctctttggagcgcactttccttgggaatgcactttccctatcctaagggcgtccgagaaatttcctcttcaatgcaaggatccttatcaggagacctgggctcactctaatgggccactacttcaaagcaagcctttgaacgatgatgactcttctttgccctccctagacccccccccccccccgtggaacagcggatttggaaagctgaaattgagagggcagctgttttgactttctaagagtcctgaggtgcaagcgacatcaagtgcgtgttgacttaagccaagaggagcttaagggagcccttagtcaagagccaaccctgagtttcaaaggcccggtggagctatactcagatgtttgccctggggtgctggctccgctctggcccactctagaaaaggcttgcctttcctcctacctccaccatcaagccactggcacatctagctagcttgtcaccttaccaccacagaccctgccagaaggatttttgttcttctaccctcgctggaaagccagaagggagaagaatctcggataggaagctggtctggagtcagagccacgcaccggccttgctcagaatgggctcattcaaggaactggggggttgggggaggggcagccgtgggttaaggggcgatggcctgctctgccaagaaaccacagaaaaatggatagagcaggctcagtgtgccgtgtgggggtggggtggggaaacggaaagaaaggcttagtgattcttaggtgcaagggaaccaggcttctctggaggaagagacaggggtggggtgtaggggggtgagagctaggtttagttctgtgcctggagcccagctgcgtagtcttattgggcagcacattttccatccgtacagtgtgtgtgttcccttagtggttctcaagggacctagttaggctacacaggaaggagagggctcacctgttgtctccctggggtccatggctgctcatcgaggcccaggccgctctcttgctgccctctgggcacatctaccgccactgacttcgataccgttcacacatctaagccccgatccgatcctcacactggatttatcctgtccaagccttatcttcaaggtcccgggactcccagcggcctgtttgctctgggcagggacacctgctgggcagatgtaggcttcccaaggcagtagaagccagacccagcaggcgccccctggcggcctctcctaagagcaggcgagaaacagacaccgaggcgtgtcttgtgcaggactccactctctggcctaccactaagaacccagaccccaagagctgctctttggcgtgtggcacgggtttgggggaatatggggaatgatttctgtccgcagaagaagagagtgtggagcaccttagctgactcacacaccagatagacaggactctatctcggccgcagccactttcctgctataaggcgttgggtagcagcatttaatttcttaaagcctatttctgaatagggagaaccgaaccaaaacagccttaaatgtcggaactacaaagagggtcaatgccacaacggaaaagcacatttagcactatatctggtatttaggaaggggttctttcggggactggcaagatggctcagtgggtaaaggtgcttgctgtcgggactgaccaccggagttcagtcctgtttaattctgggacacacacagaggaaggagaaaacggacttcagcgaattgccccctgacctccacacgtgtgtgccatagtgtgtgagcacacaccatatacatgtatatatatgtaacacacacacacatatatggtgtgtatgctatataatatatatgatgtgtatgatctgtaatatatatcatatatatggtgtgtgtgtatatatatatatacacacatatgtatataattttttaatacaagcgtttatctccttttgagttttatgtatttttatctacttcttattaacttagtgccctgtagttctgtaaaatgccattttttacaaaggctcctctgtgagtttcagcaatcccagtgtggtgacatcaaaaaattatcatgagcctttttgttttgttttgagaaagaatctcactatgtagccctgggtggcctggaactcactatgaagaacagactggtcctcaaactcccagagatctgcctgcctttgcctcccgagtgtgcagctatgcctggcaaaacattttgaacatacgcaaagccagagtgttcatcccctgcaataaaagcaccgtcaaaactgttgctttgcgaccttcttttctagctgcaggctgtgacactgtggttcgtcatccttccaagcaccatgagaggcccctgctgctggccactctctctgttgctgctcttcctgcagtcctgggaaactcagctccagtctgcaggtgagttggatcccagccnnnnnnnnnnnnnnnnnnnnnnnnnnnnnnnnnnnnnnnnnnnnnnnnnnnnnnnnnnnnnnnnnnnnnnnnnnnnnnnnnnnnnnnnnnnnnnnnnnnnnnnnnnnnnnnnnnnnnnnnnnnnnnnnnnnnnnnnnnnnnnnnnnnnnnnnnnnnnnnnnnnnnnnnnnnnnnnnnnnnnnnnnnnnnnnnnnnnnnnnnnnnnnnnnnnnnnnnnnnnnnnnnnnnnnnnnnnnnnnnnnnnnnnnnnnnnnnnnnnnnnnnnnnnnnnnnnnnnnnnnnnnnnnnnnnnnnnnnnnnnnnnnnnnnnnnnnnnnnnnnnnnnnnnnnnnnnnnnnnnnnnnnnnnnnnnnnnnnnnnnnnnnnnnnnnacctgcttgctgggacaatccaagttatcagagatacaggagatgagatgttctagatataatctaatcagttcattcatttatggtgtctggctggctcatgtaggcatttgagacagcgacatctctttgttcactcctcaatacataacacagactcagaacagctcccagaactgcatgcgcgcgcgggggtggggtgggggaaccttgtgtgatttcctggctcaggtctcctcaaatgatggatgagtaactgtatccaaggctaatttgttaggttaaagacatgctgggcactgttccattcagataacagcaggtcttccggctttttctaagagaccagctttagctgacccgtgagagtcctcctccatcttcccgcaggtcctaggtgctataatgggcccctggatttggtgttcatgattgatagctcccgcagcgtgcgccccttcgagtttgagaccatgaggcagttcctagtgggcctcctccgcagcctggacgtgggtctgaacgccacgcgcgttggggtgatccagtattctagtcaagtgcaaagcgtctttcccctgggcgccttttcgcgccgcgaggacatggaacgagccatccgcgccggtggtgccgctggcgcagggcaccatgaccgggctggcgatccagtacgctatgaacgtggccttcagcgaggccgaaggcgcgcgcccatcggaggagcgagtgccgcgcgtcttggtcatcgtgacagacgggcgacctcaagaccgagtggccgaagtggccgctcaggcgcgcgcccgcgggcattgagatctatgcggtaggggtacagcgagctgacgtgggctctcttcgcaccatggcttcgccgccgctggatcagcatgtcttcttagtggagtccttcgatctcatccaggagtttggcctgcagttccagggccgcctgtgcggtgagttagagtggcacccagctcaggcaatgcagatgctcattctagttcgcatcattaaaggcgatccctcaattttactctgccctctgggtaccagttgccgtggtccctcctgcagagtggtatcctcagcagccagtcatgctgtgtcagagactgaccctgccacaagctgtcacccccccccttctcccgcctcccacaccaaatgtcttttaatcaagaatcgctcaaaattgatagtattgtctgtcaggagtcatgccccgcccacccgagtatgttcctccaactttaagtcccttttaaatacttgtgtgtgtgtgtgnnnnnnnnnnnnnnnnnnnnnnnnnnnnnnnnnnnnnnnnnnnnnnnnnnnnnnnnnnnnnnnnnnnnnnnnnnnnnnnnnnnnnnnnnnnnnnnnnnnnnnnnnnnnnnnnnnnnnnnnnnnnnnnnnnnnnnnnnnnnnnnnnnnnnnnnnnnnnnnnnnnnnnnnnnnnnnnnnnnnnnnnnnnnnnnnnnnnnnnnnnnnnnnnnnnnnnnnnnnnnnnnnnnnnnnnnnnnnnnnnnnnnnnnnnnnnnnnnnnnnnnnnnnnnnnnnnnnnnnnnnnnnnnnnnnnnnnnnnnnnnnnnnnnnnnnnnnnnnnnnnnnnnnnnnnnnnnnnnnnnnnnnnnnnnnnnnnnnnnnnnnnnnnnnnnnnnnnnnnnnnnnnnnnnnnnnnnnnnnnnnnnnnnnnnnnnnnnnnnnnnnnnnnnnnnnnnnnnnnnnnnnnnnnnnnnnnnnnnnnnnnnnnnnnnnnnnnnnnnnnnnnnnnnnnnnnnnnnnnnnnnnnnnnnnnnnnnnnnnnnnnnnnnnnnnnnnnnnnnnnnnnnnnnnnnnnnnnnnnnnnnnnnnnnnnnnnnnnnnnnnnnnnnnnnnnnnnnnnnnnnnnnnnnnnnnnnnnnnnnnnnnnnnnnnnnnnnnnnnnnnnnnnnnnnnnnnnnnnnnnnnnnnnnnnnnnnnnnnnnnnnnnnnnnnnnnnnnnnnnnnnnnnnnnnnnnnnnnnnnnnnnnnnnnnnnnnnnnnnnnnnnnnnnnnnnnnnnnnnnnnnnnnnnnnnnnnnnnnnnnnnnnnnnnnnnnnnnnnnnnnnnnnnnnnnnnnnnnnnnnnnnnnnnnnnnnnnnnnnnnnnnnnnnnnnnnnnnnnnnnnnnnnnnnnnnnnnnnnnnnnnnnnnnnnnnnnnnnnnnnnnnnnnnnnnnnnnnnnnnnnnnnnnnnnnnnnnnnnnnnnnnnnnnnnnnnnnnnnnnnnnnnnnnnnnnnnnnnnnnnnnnnnnnnnnnnnnnnnnnnnnnnnnnnnnnnnnnnnnnnnnnnnnnnnnnnnngcttccgcgggttgcgtggcttccgcagttgcgtggcttccgaggttgcatggcttccgagggttgtgtggcttccgagggttgtgtggcttcaggaggttgcgtggcttccgagggttgcgtggcttccgagggttgtgtggcttccgagggtggtgtggcttccgagggtggtgtggcttccgagggtggagtggcttccgagggtggtgtggcttccgagggtgtgtggcttctgaggttgtgtggcttccgagggttgcgtggcttccgagggttgcgtggcttccgagggtggtgtggcttacaagggttgtgtggcttccgagggttgcttggcttctgagggttgcgtggcttctggaggttgtgtggcttctgagggttgcgtggcttccgcgggttgcgtggcttccgtgggttgcgtggctaggctgtgaaatgaagcccctagcaaagactgacttcatcctctttccagccttggatctctgcgctgaaggaacccatggctgtgaacacctctgtgtcaactccgtggactcgtatttctgtcgttgccgagctggctttgcgctccagcaggaccagaggagctgcagaggtaagtgagcctcccacaaccccctctctgtgagcgttctgaatggcccctggtggctacactcagaagtgacatcctgcggtttcttccttccctcagccattgactactgcagctttggaaaccacagctgccagcatgagtgtgtgagcactttggcggggccacagtgtcgctgcagagagggccacgacctgctacctgatgggagaagctgtcggggtgaggaggtgtctctcatatttgtagggaatagaaagggattctagctgctgggatctaacctgaccggtcctacttggtgtctcctttaaagtcagggacttctgcaatggtgtggaccatggctgtgagttccagtgtgtgagtgagggtctttccttccactgcctgtgccctgaggggaggcgacttcaggctgatggcaagagctgtgaccgtgagttatatataaggcagagggtctgctccggccccattgcctgcctcttcttcaatgcccagttacagccccacagatggtggtgtgtatgtgcgtgtgttggcggatgtgcttataatgcccagcttcttttccaaccagtcctctatcctgctgtcaagactgatttcaaaatccatatctgatcacgttcctctttcactcaaaatacttttgtggttcaccagtgtctacaaaagcaagtgccttccctccgaatttttccagtgctgggcacaaccacattaatggataatgaaaccaaattagtgggttgcaaccagcatttaaagaaaagaagagaaaaatagtttcctgagtttaggagagtaagtattgcttcatgagctggaccgttcagttacgtgaaatgcaccgtggtctatcattattctcttttttcatcgtgggctgtggtcaattttgaaatcatcacttaatctcattaccatgtagctttggccagctctttagcccatctcttgccacacttgaacattttagtcccactggcctgtccctctccgagtgtgtcatacccttcccggctcccatgcctttgtgtgtgctgtgccaaccttctagaatgccccccttgccttggcaaattcccggtcatccttcaagacggcattagcccatttcggttgccatggtgcaacaccgatgtgagttgctataatgaaaacgctcaaagcggggtgattggttagagagtagagcttacgtggctcacagtctggagcatagcgtcaacatctcagtattggcgatgaccacgtgacaggagagagcccctgagattgaagagtatgtgtgtgtgagggttcaaatgcaggaggtggccgtcctttgtaacctttcactgacagggtcattctagtctctcgagacctactcaatcctgtgatgtgggcgttaatttcttcctagggtggtgctccatgacctaatcgtctcccagaaggcctgttatgattcagagagaaagtgctctcttgcaagctcatgcctcaaaggcttggtccttaatgccaacatgttcagagcctgggatcttattaattgattaacccaaagatggattaaacacgagagtaggtttttagggtgttgggagatggaactgtagaggataggccctagattgagaaagtgggtcactgggggggttaatgccatttttttttgagacagggttttatgtagcccaggctggccatatactagctatgtaactgataatgaccttgggcttcctaatcctactgcctccgaatgttatggtaacccccttttctgtggtgttagggctctaactcagggcttggtacaagctaggcaactgctctaccaaatgagcttcatatccagttcctgaagcctgggatttggatgtgtattccaggctggtcttgatcctgcctgtctcccaagtgctgagattacaggcttgtgcctccatgtcctgtttgaagagtgtcttgtccctgcctgcctgtctgtctgtctgtgtttccttctgtaatgaaggatgttgcattcctccatcattttcctgctgtcatgatatctggcctctacccaggtcaaaggcaatggagccagacagccgtgcactgaaatcttcccaagtcgtgagctaaagcaaatccttccacccttaagttacttccatcactgcaatggaaagacccctaggtctcaatcacttctcagtcctgttaccctggggaccaagtttctagcacatggtctcttgggcacaaaccatatctaagccacaacaatatcttaaatgtttatttctcagttctggaaaggctaagaccaagattcgggcagatacggtgtcccatgatgctctgcttcctggcttatacaagatagttttctctttgttctcccttgatggatggacggaggaagcagactctgtagaagctcttgtcagaacattaattaattgcattcatgaaggcctgactctcatgtctgtgtctaatcccaatttcgtcccaaagatgatcacattgagacagggttttatgtagctccgactggcggtgtatagctatatactgataatgaccttgggcttcctaattgaaccccaccacctccacgaagccttcctcaaccactctcagggaagtgatttattccggtcttgggctcccttactgcctcctcatagtgcactttccttaactgtggcagatggcatgtctgccttgctacagtctgccctgatcttgtgggtcaggactgtgttttctttgttgttgaatccccttctggtactcaagaagccactggatcaggacaaaggaggcagtgtcttagtgagcaggtccagtggtttgtggtttagatgccgctgccttccaatcttggctttgccgctgttaacttcagaacctagtttatgggaaatggggagagcactcgaggagaaagtgtgtcaagtgcgagtttcagcgtctgacacgtgacaaacaccagaaaatgttgttcttgccattgtcattaatactgatatggtgcttagaatggtgacagatacatactaggtgatcgaggaatgctagctattgtggtatatttttgctcttggttgtttaataacgaaccgggaggtggtgatgtttgcctttaatctctgcacttgggaagcagaagcaggcagatctctgagtttgcaactagcctggtctgcatagtgaattccaggtcagccaggactacaccgagaaatgctatcttgaaaaaaaaaaaaaaaaagccaggcagtggtggtgcacacctttaatcccaacactcaggaggcagaggcaggcggatttctgagtttgagaccagtctggtctacagagtgagttccaggacagtcagggttatacagagaaaccctgtctcgaaaaaccaaacagagaggggggggggggagaagagagctttcaataaagcatttggttagtgccaagcacttaacatcaaaagttgtcatacaaaagaggacgatggttatgtattgattgctgggcacacacagtcaggacacataactggaatgcgttatatagtaaatactggcgatgaataactagacgagtatgtggttctcctgggcaaggacctgatccctccatccaagccttctccttggcagggtgccgggagggccacgtggatcttgttctcctggtggatggttccaagagcgtgcgcccacagaacttcgagctggtgaagcgcttcgtgaaccagattgtggatttccttgacgtgtctcccgagggcacacgtgttgggctggtgcagttctccagccgggtgcgcaccgagttccccctgggccgctatggcaccgcagctgaggtgaagcaggcagttttggccgtggagtacatggagcgcggcaccatgacagggctggccctgcgtcacatggtggagcacagcttctctgaggcgcagggcgcgcggcctcgcgacctcaacgtgcctcgcgtgggcttggtgttcactgatggccgctctcaggatgacatttcagtgtgggcagctcgtgccaaagaggaaggtaggtttggcaagggatggactggtgtggggttggagttggggctgggaagcagttttctccaggcttggagctttctcttgagtgtctgggccctacaggcatcgtcatgtatgccgtgggcgtgggtaaggctgtggaggaagagctgcgtgagatcgcatcggaaccatcggagttgcacgtgtcctattctccggactttagcaccatgacgcacctgctggagaatctcaaaggcagcatttgcccaggtgagtgaatctcttccagccgaccggagtgcatgcgtatgcgcgcgcgcgcgtgtgtgtgtgtgtgtgtgtgtgtgtgtgtgtgtgtgtagggatggggacgagagggcagggtctgttgtcttttttacctagcctctgatagatgccctggtcctcagctcttcactacccttcagctctctacacagagcttgttatttaaaacccagagcaggtctgtcctttaccgtagcttgtcaaaaacgcagccccgacagtgaatcggacccttatgtgctttgtgtgcacctcagagtcaacgaggcgttgggatttttttttcactcaaattagtagtgtctggaataacttgagaaaactgtattattaaaaatatgtttaaaattgcatttcatgcacaccttttgcctgcatgtacgtatgggcctggttcatgtggaggccagaagtggggggcagttcctgtgagactacagatggtttgtgagtcgccgtgtgagtgctggacattgaacctgggtcctctggaagagcaggcagtgctcttaaccactcagccatctctccaggtcaagagaaaacttttaaaaaagcaagtcaaatttagcatttacaagcgtaaccgactataagcttccagcttgtggagattcaactttatagatttggcaaagtgacaggacagggttgtttttttatttttattttttatttttatttttttacagtggcttgtgctttctggggacatagaccataaatgccatcattgtaatgtatctggtctccagctgggggtgggggggaggggaaggatccagacatgcccgcggggaacagctgggccttatagggggcaaagtttcttggtggggggcttgattttgactatggggtctttagattctaacacatgtctaaggcgtgactcttcttccactgtctactgctgatagaggtaggtgagcagggctgtgtccagggcagagaatctgtagttaaaagtgctccctgccctgccaccaactctaacaattaactaaggtgttttggacacatcaggcttaagggcccttcccgtcccgacttatttacaatggaccctggataactcacttaaccccggccctaccttaccctcttctgtatgaggaaagatgcccaaagttactgccagctttagatttcggaggcaagttggaacgctctgctaaagctcttcactggctgaccattcaggcccaggcagatcctcatctttctgtaaccctcggttctacagctctaaagtcagaggtgaacatttgggagtgttaacgaggccatcaataaaatgacacaaggatgagggtttgactgatagtagaatctccctatggaggctgaggctaagaatcttgctgctattttagtgcctgcaatattaaaaaacaagagctggtgagatggcacagcgtgtaaaagcagctgccatgcaaacccggcgacctgagttcgatcctggaacacattaccaaaaagcccgatgcgatggctcacatctgtacccagcatccctgcagggagatgggtggtgcagacggaagcacctgaaagcttgcctggatacaaagagaggcaaaaactaaagagagacgctgcctcaaaaaggtgtgaggagagagttgactcacaatagatgttctctgatgttgacatgaatgctgtggtctgccctcacacatgtatcatacacatacataataaaacattaaaatagaaaatggcgtggaccagcagtgatgctatctccgtaatattccccaccattttctgtactgttaaggaaacatagacaaccaagtttatctctactctactcttagatgttgaagtgtgtgtgtggagataaacttggatccataattttttgtttttgcgtttgagacggggtttctctgtgtagctttggctgtcctcctggaactcactctgtagatcagactggcctcaaactcacagagatccttccttctgcctatgcctcttgagcgctgggaccaaaggcatgtaccaccacgcctgacttggacctataatttaaacattaatttcatcagaatcagtggaatcgcatattgttgcacttcatcctgactcactaggtctgggatagggtttgataatttgccattatgacatattcctaggttatgctaatactgcttgtccacggaatgctggtttactagaaatacacagtacagggttgacttgtgcctggcattgctctagatattgtgccagtacggtattcagtcgctacgtgtgtatgatgaattacaattggtcacaataacacagaataaaaactgagttcttcagttgtacccgccacatttcaagtgtcttaagctccaggtggcttttgggtattgaatcggccaggacagacagatagagaacatgtccattgtttgtcgtggtctcatttggaccagctcatccatctagactttttctaatcaaagtgaaacccatggacttcagaattaatgtgtttcaggagcttagtgaaagtgcagatttttactctgagtcgaaatctggattctagcaagctctgtggtaatcccagcaagcataagggttggagaatttctcttgcaagtgggtccacatatgcaaatcgtctaatctcataaccactagtgggtagcttctttcattatatccattttacggatgcgggggaattgagacttgaggggttgagtttcccccaggacttctgtgctatttggctgggactcaggctaggtctaaatccaaagcctgcatgtacaccatcgactcggtagaggtgtatcagaaggtcgaagccacagcctggtgggctcccttttggttcctcattcctttgactcttggctctctccttgcagaggagggcattggcgcggggacagagcttcggagtccctgcgaatgcgaaagcctcgtggagttccagggccgcacgctgggggcgctcgagagcctgacgcagaaccatatccttttgggctggaggtgcgggttgcagggcgggtgaagggatctctgagaccacatcttccttaaccgctcactggctcggctgacagagcgcctggaggagctggagaaccagctggctagccgaaagtgagggtcgcacgctgtctgagcagccacgcgagaccgaggccgagccccgcagcctggaccgtccaggagggggcgctggcgggccccacgcgctgccttcgagctggcctcacctggaccaggagccagatttaggggatggggatgaggggatggggaggtgctggtggggaaggactgctacactcgccgcgagctttgttggatttctttttttgttttccttttctaaaaaaaaaaaaaaatttggttttcacggggtcggtttgtggctattgctatgctggcagagggaggggagttcagacgagcgtgctcataggcgcccgggtggcgtcctcttggagaaaggcgcattgtgcagtactggggctggggggcagggggccgctgcttcccgtctcttgtttattcagccccagaacagatggcccgttatgtaggacgtggggagggaggggatgccccgagaacctttgggtccgaggaagtctgagtcccccatcttctagcacgtcgttttcttgctgttcctgtcttctggagccaaaaaatgtggctcaaaggccgcttgggacctggctggggatgtgagaaactctgttgagcccctgaccagaaagagtgggggatgcgggatgtgctccacctggattgtatcatctgcctctgacacttggtggcatccctgagcctgtggctctcttctgccactccttcaagaagcaaagctgagctgcatgcacacaaccctctctaccagcaaggaacacgaacttcccgggtacacacggcaaactaaagcttaaaatacgttgggttccagaatgggcgtcaggtaaattcccccgggtttgttttgccgttgttaaagctgggacaagggttaactggtacaagcaggactgtggctagaggaatgtatgctaaggtacctgactttgtgcccgacatgtattttaggtcctttgttaatgatagttagcaattattcttatagaaatatgtcttggacctggtttgaagcgatttcctaatattgccattgtatccgttttttatccagacaacctcgtgagataattaggatcttagaaggcaagatggctcagctggcaagcacatttacacattaagatttacaatctgctttcaaacatcagggtcctcatggtaaaagagagaactcctcctgtaggatgctctctgacttccacctgccacctgttcctacttcatcagaatggtcagaaacggggcgtggtcagaacggggtgaaagggaggggcctggactcgataccaggtgacagaaggctggataccttagagggaggggaagggtatgactgacctgagcctcgtgttctctaaagccacattccagaagggccggaggagagaggggagtggagggcagttgcttgtgaatcaaggaataaccacgatgatgaaaatggtcctaataatgtaaaaataaatgctaaagataattattgccttcatcatttccattttagacaagaggaaatggagtcatgtagtttcccaaaacggcacgtctagtcagaggctggactgacatgctatatttctgattgctgctgtaacaaacgagagcttcgaaggcaaaatcagttccctgtctcacagttcccggagtcagaagtccaagatgggttggcagggttgcattctttctggagaaatctgctttcctttgtagcttctagaggcctcccaagtcccttggctcatggtctcactgccctctgatcttaacacctctctctctctctgtgtgattctctctttctctgtgattatattgttatgactttgacaatcacagacatgcttctacttcagaaaaactcccagaagtctcctttgtcatgtagagtcatagatttattcataggttcccatgattcaggcatggaagttgttgagcggaacagggccgaggctaggctggctgatgtctgtactgctaaggctggatagggagtgaggtccacctgtgtacaactgtatagaaaaggggaatgtctgatgaaggatagtgcaggcaagaaaaaaaaaagggggtggtggtggtggggagctttgagcaaaaccttaaatgatatggcaatactttctgtgattggtcatgtgggtcaggagcggctgggaacaggagctgagatgatcaggaccttacttagatatcatgatcagataaagtaagcaggccggggtagtggctggcatgagagctcaccttgcccaatccctcaagtttaaagttaaggaaagtccttcctaggggccacaggttcttgtctgagagcacaccgtgagtaagcagaggggccagatagaagacttgcgtggatgcgggactgcaatagggcacttcctgttggggaactgtgagggctggtggaagctagagcatccatctttcctggatgcaaccaacacctacctgcttcctgtccctaccatttctttacgtctgcattctcccttgtggccacaggatggcgccggaagctctgctttagacctgtatctcagcaccctagcaggtgcccccctgccccctggagcttgggctaatgatggtccttccttttaacaccaagggttttgaactgcaaagaggtccgtgggccagggaggaagtctcgggtaactaagatggaagacatccttcacacttggtccatttccccgaatcaagcacactttctcagggttggatcttaccattttattttggactggagggcaccatcgattcaacctctgttaacttgcgggtctgatggtaaatgttcccctttcctgcgagcatttaaagtttatgaggagccaacagggaagagagagggagagagcaatggttgatgcgaagagaacacatggaagggctttagacaggttttagacagccaagggggtaggagcgttgtgtgaccacgtgattctcaaggcaacactgtgaggggtttggagcatagatcctttcactatcagaggaagccactggtgagagaggggaagacagatgtcccaaatcactcaccaagctcgtaatgtcctggccccttcctaactcatcagaatggtcagaaatggggcgtggccagaacgggacgaaagggaggggcctggactcaataccaggtgacagaaggctgtataccttagaggagaggaggggaagggtttgattgacaggagcctcgtgttctctaaagccacattccagaagggcaggaagagagagggagtggaggacagttggtgtgtgaatcaaagaatagccacgatgatgaaaatggtcctaatagtcaccgtgactggcgtttatggtgattcacaaggaagtttcccatcactttgcagctcagcagagccacgtgccacccaagggggattacagggcagtgcggtggctgctattttactgaagggagacacgggctacagaggggagggtgcctcgttcaagattatacgtccaattactgccagcgctgggctggacagagacctcctggctcccagccacacatgggctgccccacatgggctccagctgtggccagccagaaagaatggggcctttgtcagagctgaggatcaggcacaagcctcccgnnnnnnnnnnnnnnnnnnnnaaacttttcagtcctcctgctcaaagaaaaggagccccttctttgtgagtaatgtccactgagttcctactgtgtgccgggcttctgccaggcacttttatcttttttttttttttttttttaagatttatttattacatgtaagtacactgtagctgtcttcagacacaccagaagagggcatcagatctcgttacagatggttgtgagccaccatgtggttgctgggatttgaactctggaccttcagaagagcagtccggtgctcttacccactgagccatctcaccagcccccccaggcacttttatctttgtggtctctaccacaccttcacccttttgtgatggattttattttctctgttaccttcctatcccgcgttcaaaatggattgtgattcagggtggatatttctttccagatttcattagtgtcttgtgactttcaaggaaggtcatggcaggatggtggtagtgactatccctggaattttgctgtctttaaccagacattcttatattaaaaaaaagaaaactaacaataaaaatcctactatgcagaatatgcttgtgttgctcttgatgagcctgcgtctgggcccagggtgtccttgccaagcaaaatagaatccctactgtgttccatccttctgtcctgcttacgcattatctcatatgtgggaaatgcacagtggattagagagtagagaggaaaggacagagaataaacaaataccacctttaaaatatccgaggtgagttcaatgccaatactgatagataaaaactagagcaagaccctagttacattctctggtagacgccagccacaagcctcctcttccaggaagtgtcccatctgtcccgaaggacctggttgtctcctggagaagaggactcatgggtccttggatctctctggtgtctgatggtctatgtacccattgaactttcttatgctctgcagcttagagaggggtggcctccagaccccagaaataaaacctataattaaccaggaatactgtctgcatctctatagttcaaagataaatagtgctatctcaagcttcataattccaatcattggaggacattttataagactttggtacacttccatattactctctaggagtacagctgtattttttcccaacttgggttttaagtaatttcaaggaggacatgtttctcatagcaagaacaaagttttaaggccaggtctacacgagcttgagttacttctctgccactttttttttttttttttagctgtatgatgttaggggaaaaaaaggtctctcttaaccctttgaactttaacttctctgtgagataatgacagcacatccccaattgcaaatcccaagcctgagtgcagggattcaacgtgagcatgcacaagaggcacggttcacaggacgtcagtaattacagggatgacagcaaacagtcatttgcgtgcttgctgtgtgccaggccctagacatccatcattgtcgttaatctcagaattggctcacagagtagatgttgtaacgctccccattgcacatccgggaaggggcaaaattagcaccgagctcatcccttggtgctgtgcctgtgaatggcagcagggtagaaaagaggccaggaacttgaggggtctctctctgtgtctctgtatctctttgtctctgtgtctgtctctctctgtctctttgtgtctgtgtctctctgtgtctgtctctgtctctctccctctctccctgacaaggttttgctcaggctccattggagcttgctctccttttgcctctgtatcctgagcactgggattacagccaagtatacaccactctccccagccttggagagccttacagagagatttcctgagacccgggaaagagtcaagaaagcatgaccagctctagcttgtaaactgggacaaaggaggaagctggacagacctctgcttctgagataaactagaaggtgtgcatcttgtgggtgtaggagaccacggaggcaggggagagcacagcaaggaagctttgttcccccaccccaccccccgactccatcccaatcccaaagacagggcttctctgtataactccagctatcccagagctcactctgtagacgaggctgaacttgaattcacagagatctgcctgtcccagtgctgggactgaaggcatggaccactatggtgctcttatgaggaagagtatagggaataggagttaggtggcaaagaactagttcagtgggttggagactaaagcgatggcagtcatgcacctgggaaggactgtaggccaagctgtgctagatcgtcatattaagaaatggatgtgaaagcagaaccttctcccctccatcttgggaatcatttaattgaggaaattacaggtgcttcaaattcagtttcacagtcacatctaagggtagcacaagccaggtttcccagtggattacacagggcatctgaaagtaaatgagtcaaaggacatcaaggtttttggtctgattgactcaggatgatgtcatcgtcagagacaggaaaaggtaaggcagcccagggattcagtattagagctattaaacgggagacgtgtaggaagcactcatgttgagaaatcagaagtcagttggatttgtgagctggaagtcaggagagagactggggaaacaagccatcagtgtgtagctgatacagaggctgcacagtggatgagatcagatgggaagcaaatgtgtggatccagaagaaccaaacctatgcttgccctcctggctgccctggatgcagagactggggcggagaggagcaattagcgggaaaatctgaggagcatctggagactggagaggaaggggtcaaaccatgacgttatggtgtcctagaaacaactgtgaaggaaactggtgaaggaagactgggggactagcgacagtaactgagcatggcgtttagcaacccaaaagtcagtagtgacttggcagggacacaatggagggatgtgaagttggtcatcctaggaggcataaaagagagaggatgggaggaaaagaattagagattttatacacacacacacacatatgtatttgtgtgtaaatatataagacattgttatatatattatatacattatagacagattatatatgatatataatatatgtattttatatagggaaggtatatacaacatagagatttttatgatatatattatatgtaatatatgcatagttatatgatatattatatgtaatatatggagagattatatataatatatatgctaaataccatatatatattatagagagagaatttcttttttgttaatcaagacatagtctcaatatatagctctgcttggcccagaactcttttgtagattttggcttaaagatatccacctatctctgccaactgaatgctgggattaatcaccaggttcggtgagtatgggtggagttttttttttaaataattgtgtatttgttgagcttatagtataattgcatcatctcccattatccttttctcatgccaaaacctttcctatatccattttctgcaaataagcaataccctacctgtccttggctcggaagtttaactgtagagataaacttaacaaatgtgttagggaggtgaagagatggctgttcttccagaagcccagagttcagttcccagcgcccacaagggggctcacagccagcggggactcctgtcccagcagatgtgatgtgatgctctctgctggccacctccagtactgcatgactatggtacacagacatacgtgtagacaaaacactcacagtcaatatttttgttaaagaatagttttaaatctatagaacgccttgagagctgtggaggcagcatgcggtcttcatcctctgagtgtctctctcaacgcagatgcacctgtggatgaattgttagagctccagagtattttttttttaacatttcctcgttttcccccaatattatatgagtctatccaggacttattcctgtgtctccttagactcttccagaatgtttccatgaccttccttttcttcctgatagccttggtcacttaaaatttacatttatttatttatttatttatttatttatttatttatttattgtgtgtgtctgtgggggtacatgtattctagggtgcacaagtagaggtcagaggacagtttgtgggaatccattctctctttcatttccactgtgtgagctccagggcttaaactcaggttatcaagtttgtttgtttgtttgtttgtttgtttgtttgtttgagacagggtttctctgtgtagccctggctgtcctggaactcactctgtagaccaggctggcctcgaactcagaaatccgcctgcctctgcctcccaagtgctgggattaaaagtgtgtgctaccatgctgggttatgtcatcaagtcttgttggcaagtgtcttcatccacggagctatctctctggcctgactttgataattttggagagtgtaagttaggtgctttctaggttatttgttaactggggtccacataatgtttttcatggttaaaaatgggatataaatttttgcgaggtagaccaggggcggtgaatgcactattacaagaggtagcttgaaaactttgtgctaggtggtactggggctaaaggacaagtgttaggagaagtttgagaccccgtacaacactctagtcacactaactctacctgaggggcatccaagtgatgtggaagagcactgatctccacaaaccaaggaaggaaagggaagaagaggtaaacctgggcttcgatgggcttcctcttagagcagtgtccagcctttgctgacaccggctctgggtacaggggtgagtcttcaactttttctgttttccactttgttcttattggcctcttgaggtgtttattatattccaggaaccaaggtcaccaacggaacagagagaacacaacacttacgcaggggtgtgcagtttcaaagcagtgagatcaagccggggtagtctgtcttcacagaagatcagcgtgcctcagagtgtccattgtggtctccgatctgcagatgtattaaagggaggtgggaaaaggggaagggacttgtttggggacacaactggcaagtgacaaagtaagacctagacttgaggcaagtgtaaatcaagcttagagtccttgccaccactggaaagatgctcaagtctgccatacatatttactagtgtgtgctagggagtatctacttggtgagtgttctcagccctcaggtatgaggcctggagtctgttctctgtccttcctgctattaatgcacacagacaaaccagttagtcactgagaacgacactaagtccctttctgacatacggatgagagtgagcttattactgtatttttcttggaaaatggtttttccataagcattaagaaacttacatcttgggctagagcgatggctcagtggttaagaacactgactgctctttcagaggttccaagttcaattcccagcaaccacatggtggctcacaaccatctgcgatgggatccaagtccctcttctggtgtgtttgaagacagctatagtgtactcatgtacacaaaataaatagataaattaagaaaagagaaagaaacttacatctcagccaggcagtggtggtgcacgcctttaatcccagcacttgggaggcagaggcaggtggatctctgtgagtttgaggtcagcctggtctacagagtgagtgccaggatagccaaggctacacagagaaatcctgttttgaaataacaaaaccaaaagagaaaaacaaaacagaaaagtaagaaaaaaatctttacatttttcatttctgaacacatctactctgggaactatgggctaatgaataaatataaaacagaggagatgtttgtattttaacaatatatgaagaacagctacaagtcaatcatgtgaagataaaacagacacacagctcaagactaactaaggactatataggaagggcctatacaggaggagaaaatatcattgatcatcagaaaacacaaattcaatccacaataagatatcgcttcatgcccactggagagtttaagatgtaactctgtgaagtgtccatacgactgtggaaaacatttcctttttatgcagttatggggataaaatccagggcctcacacatgtgtggcaagcacactgagccctgcaagtgggccctgatcctcctgcctcagcctctccagagctgggattaccagtgtgtgccaccatgtctagttcctggaactcttgcacacagctaacgatacactaggatcaccattctttgcatatgttgcagagtagtacagttactttggaaaacatttggtagtttacaataaaggttaaatatgtgcccactctctggccagcaattcatttcaggtgtgtatgttcaaggacgtacatcgacttttattaaacctgaactcagaatattcgaggcaggaaaaatcca

SEQ ID NO: 56 - DNA, 2193 bp, Mus musculus
ggcccgtcgctctgtagccgcacctctgagctgtccggcaggctcagctgcaggctgtgacactgtggttcgtcatccttccaagcaccatgagaggcccctgctgctggccactctctctgttgctgctcttcctgcagtcctgggaaactcagctccagtctgcaggtcctaggtgctataatgggcccctggatttggtgttcatgattgatagctcccgcagcgtgcgccccttcgagtttgagaccatgaggcagttcctagtgggcctcctccgcagcctggacgtgggtctgaacgccacgcgcgttggggtgatccagtattctagtcaagtgcaaagcgtctttcccctgggcgccttttcgcgccgcgaggacatggaacgagccatccgcgcggtggtgccgctggcgcagggcaccatgaccgggctggcgatccagtacgctatgaacgtggccttcagcgaggccgaaggcgcgcgcccatcggaggagcgagtgccgcgcgtcttggtcatcgtgacagacgggcgacctcaagaccgagtggccgaagtggccgctcaggcgcgcgcccgcggcattgagatctatgcggtaggggtacagcgagctgacgtgggctctcttcgcaccatggcttcgccgccgctggatcagcatgtcttcttagtggagtccttcgatctcatccaggagtttggcctgcagttccagggccgcctgtgcgggaaggacctgtgtgctgagttggttcatggctgccaacacctgtgtgtcaacgccccaggaacattctactgcgcctgcaactctggctacaagctagcaccagataacaagaattgtttggccttggatctctgcgctgaaggaacccatggctgtgaacacctctgtgtcaactccgtggactcgtatttctgtcgttgccgagctggctttgcgctccagcaggaccagaggagctgcagagccattgactactgcagctttggaaaccacagctgccagcatgagtgtgtgagcactttggcggggccacagtgtcgctgcagagagggccacgacctgctacctgatgggagaagctgtcgggtcagggacttctgcaatggtgtggaccatggctgtgagttccagtgtgtgagtgagggtctttccttccactgcctgtgccctgaggggaggcgacttcaggctgatggcaagagctgtgaccggtgccgggagggccacgtggatcttgttctcctggtggatggttccaagagcgtgcgcccacagaacttcgagctggtgaagcgcttcgtgaaccagattgtggatttccttgacgtgtctcccgagggcacacgtgttgggctggtgcagttctccagccgggtgcgcaccgagttccccctgggccgctatggcaccgcagctgaggtgaagcaggcagttttggccgtggagtacatggagcgcggcaccatgacagggctggccctgcgtcacatggtggagcacagcttctctgaggcgcagggcgcgcggcctcgcgacctcaacgtgcctcgcgtgggcttggtgttcactgatggccgctctcaggatgacatttcagtgtgggcagctcgtgccaaagaggaaggcatcgtcatgtatgccgtgggcgtgggtaaggctgtggaggaagagctgcgtgagatcgcatcggaaccatcggagttgcacgtgtcctattctccggactttagcaccatgacgcacctgctggagaatctcaaaggcagcatttgcccagaggagggcattggcgcggggacagagcttcggagtccctgcgaatgcgaaagcctcgtggagttccagggccgcacgctgggggcgctcgagagcctgacgcagaacctggctcggctgacagagcgcctggaggagctggagaaccagctggctagccgaaagtgagggtcgcacgctgtctgagcagccacgcgagaccgaggccgagccccgcagcctggaccgtccaggagggggcgctggcgggccccacgcgctgccttcgagctggcctcacctggaccaggagccagatttaggggatggggatgaggggatggggaggtgctggtggggaaggactgctacactcgccgcgagctttgttggatttctttttttgttttccttttct

SEQ ID NO: 57 - DNA, 1875 bp, Mus musculus
atgagaggcccctgctgctggccactctctctgttgctgctcttcctgcagtcctgggaaactcagctccagtctgcaggtcctaggtgctataatgggcccctggatttggtgttcatgattgatagctcccgcagcgtgcgccccttcgagtttgagaccatgaggcagttcctagtgggcctcctccgcagcctggacgtgggtctgaacgccacgcgcgttggggtgatccagtattctagtcaagtgcaaagcgtctttcccctgggcgccttttcgcgccgcgaggacatggaacgagccatccgcgcggtggtgccgctggcgcagggcaccatgaccgggctggcgatccagtacgctatgaacgtggccttcagcgaggccgaaggcgcgcgcccatcggaggagcgagtgccgcgcgtcttggtcatcgtgacagacgggcgacctcaagaccgagtggccgaagtggccgctcaggcgcgcgcccgcggcattgagatctatgcggtaggggtacagcgagctgacgtgggctctcttcgcaccatggcttcgccgccgctggatcagcatgtcttcttagtggagtccttcgatctcatccaggagtttggcctgcagttccagggccgcctgtgcgggaaggacctgtgtgctgagttggttcatggctgccaacacctgtgtgtcaacgccccaggaacattctactgcgcctgcaactctggctacaagctagcaccagataacaagaattgtttggccttggatctctgcgctgaaggaacccatggctgtgaacacctctgtgtcaactccgtggactcgtatttctgtcgttgccgagctggctttgcgctccagcaggaccagaggagctgcagagccattgactactgcagctttggaaaccacagctgccagcatgagtgtgtgagcactttggcggggccacagtgtcgctgcagagagggccacgacctgctacctgatgggagaagctgtcgggtcagggacttctgcaatggtgtggaccatggctgtgagttccagtgtgtgagtgagggtctttccttccactgcctgtgccctgaggggaggcgacttcaggctgatggcaagagctgtgaccggtgccgggagggccacgtggatcttgttctcctggtggatggttccaagagcgtgcgcccacagaacttcgagctggtgaagcgcttcgtgaaccagattgtggatttccttgacgtgtctcccgagggcacacgtgttgggctggtgcagttctccagccgggtgcgcaccgagttccccctgggccgctatggcaccgcagctgaggtgaagcaggcagttttggccgtggagtacatggagcgcggcaccatgacagggctggccctgcgtcacatggtggagcacagcttctctgaggcgcagggcgcgcggcctcgcgacctcaacgtgcctcgcgtgggcttggtgttcactgatggccgctctcaggatgacatttcagtgtgggcagctcgtgccaaagaggaaggcatcgtcatgtatgccgtgggcgtgggtaaggctgtggaggaagagctgcgtgagatcgcatcggaaccatcggagttgcacgtgtcctattctccggactttagcaccatgacgcacctgctggagaatctcaaaggcagcatttgcccagaggagggcattggcgcggggacagagcttcggagtccctgcgaatgcgaaagcctcgtggagttccagggccgcacgctgggggcgctcgagagcctgacgcagaacctggctcggctgacagagcgcctggaggagctggagaaccagctggctagccgaaagtga

SEQ ID NO: 58 - DNA, 32055 bp, Homo sapiens
atttttagtagagacagggtttcaccatgttggccaggctggtctcaaactcctggcctcgtgatcctcctgcctcagcctcccaaagtattgtgactacaggcatgagccattggcccggcctgggatagctgatttctaagggtcttttttcttgggattccagaatttttttttttttaacattgtgcaattctatgctctaataatctacaattttaatattctttgggaaggaatattcttggggaaggaataatacttgctattttccacatattataattctatctcgtaacattctatgataatattcttttgggagtactactgcttaacgataattattattttccacattctataattttccacattctgtgtctttatctgtgcttcgaatagtctttgctcattaattctctgctctctattacctatcatgatttttatttacatcctacaattttatatcccaatttatttacttactttttttgagatggagtcttgctcttgtcacccaggctggagtgcaatggtgtgatcctggctcactgcaacctccacctctcaggttcaagcaattctcctgcctcagcctcctgagtagctgagattacaggcgcccactgccatgcccagctaatttttgtatttttagtagagatgggatttcaccatgttggccagtctagtctcgaactcctgacctcaggtgttctgcccacctcagcctcgcaaagtgctgggattacaggcatgagccaccgcacctggctatatcccaatattttatgactctaaaattctttgggaaggaatattgcttcatactattacttattactatttttctacatcctatgattctgtcctgggagtctatgattttaatgttccatgggaggctgctcaggaagtagcaaccatggtgagggtgatgatcttacattctgtggttctctgcattctccctttccaggacacttggtgctggtattctctgcttcttacctgaaattgcaccaccttctctgtggcaaggcataagtaggtgccaccccctcctgggggactgcctggaaactggaatgcacacttgtgcagctgggagatgggctcatccacatcaaggagcgcacactgttttgctactttacggatgatctgcaatggaaggatggtaagaacagtggtggcaaggagcccgggcgtccagaggctgccctcctagccggctgtctgctactccaatagccacacaggcactagcagattccccctgccctttgacttctgtctggtcctacgcgacactgggtgagaacaggtgtctccatgccttggggcctcactctccagccctgcccgtgtgtgccacattctctgcatggatctgaggggacccctccaggcatgccctcccttcctataccatgggaggtagtgtgatgccggtgaccgtgcagacgagctgcaccagggagccatagcgaacgtagccctctcgcggtgggaagtctccttgggcagagtgcccatcagctgggggacaaaaaaagcaagggacaaggttttcagcggcccccaagcttctgccttaaaccctgccttgttgcctctggctcttcctcacatcacacatgggccctgcgggaaagcttggtactcaggggagccaactgaaggttctaattctggagaggccatttgaggccatcctcacaaatgtctgccctgggggcaggggttgggggcaggcagcttagttgatatatggggaaagggcatggataagggagtcagaatagcttggaacagtcaccagctcactgggactgtagtcaagtatttttgtgtttctgagccttaatcacatggggcagagtttaccttccttaaggagttgtggtggaggttaaataagctaatgcatgtgaagtgcccagctccagggcctgcagatgtcattacccaggtggagcgtgaaggcagcccactgtcgtgcactggccacaaaggccccatcctccacagagaggtagcgtgtggagaccgtctgagagcgcaggcggttgaagagggagacctttgagccggaggatatgcacactgtgagggtgagggtcagggttagggtgagggtgagggtcagggttagggtgaggggatagggttagggttaggattggggttagggttagggtgagggttagggtgagggtgagggttaggattagggtgagggttagagtgagggtgagggtaaggattaggattagggtgagggttagggtgagggagggggtcagggtgagggttaaggttagttggtgctatcagtgccctgtcctggcttggttccttggactttccagacagtttccaatcttctgtccctgtgccggcctggctaatgtgcccacaggcctagatacactgggcattcccagttcacagctgtttttccaggacctgctgcagtcctgctttggaacctttgcctgttcctttgctgtctggacatctttcagttcaacaaacaaaagtaaaacttttttttttttttttgagatagcatctcaccctgtcacccaggctggactgccgtggtgctatcacagctcactgcagcctcgacctcttgggttcaagtgatcttctgatctcagcctcccacgtagctgggacaacaagtgcaggccaccatgccaggctaatttttctttttctttttttttttttttttttggtagagacaagatttcgccatgttgccctagctagtcttgaacttctgggatcaactgatccgcccaccttggcctcccaaattgttgggattacaggcatgagccaccgtgccccacctatgtcacttttagtctgtccctagttcaactcctgcctagttcaacttttgtctgctctgggaccccaactcccaacctggaatttggtatctgtccctttcctctctgcttttcatccttcaactcttctcatccccaggcctgggccgcacccactcatccagactccttcccctctcggctccgactccaccttttccactctgacccctaagcccagcctacccccacctccgcgccccagtttagccgttctgggcttggttgcacctccccgcccgggccgggggtcaggccccgccctgctcacgatcggtgtttttcagcgactgcttcttctgcgagggcttcgagatgaccttgataaggcggctgtggaaggtacccagctcccggcccccgcgcagcaccagccgcagcaccagccgaaagtgcttcctcttgtctgcatctgagatgtacagggtcttggcgcagccgaattcctagggggctcacaggtacagggccatctcatcccagccctcccccgtcggatgaaccaacctctcccagatatcggacgtccgccccgtcggaggtgaccagaagctccaccatccaggctctcaggctcggccttaaggcaggaccccggcctcccggtctccccacctatctcttggctttcggaggggagtaaaggagccctcctttcccaggagaggcagggatgggagcaggaatcggaccccttcccgtgcgctctcaccctggagtccggctgctgctcgaaattcagcttctgcgtctcagtggcgctgccggacgcgctgtccagtcccatgtaaccgcagaccgtgggccccgtttcccccgcctggtgagctggaaagggacgcgaactggctctgcaaggactcgggaggacgcaggtgccaggcaagcttagcgctcgccgccagagggcgcggggagactgcgcctgcgaaccgccccgtctcgggcccaatctcgtggtcctccctacagagcaggcggccggcagcccttgattccgccctcaccttgatcctgccctggcttcaccctccagccaggccccgagaggtagacacagggcggggggcagaagaacctgcggagataagtgagtgttggagtcgtgcatccatctccacttggctctcctgtaagcacggcaaggtagtagcataaacccagcagaaccttcgtttcctcctcccgctccccccaacgctttttcacgactgtaaaccccattcatagccaaaccttattgtttttacacccctcattcaactcatcagaaggtcctgtccactccaccttcaaaatataatatatccagaatccactggcttcttaccacctcgcccttcatcccagccgccattactttttgcctggaccacagcatcagccttcaaactggtctatttccagaaagttctgtttctatctccttcccatttcgcacagcagccagagtgctccttccttccttccttcctctctctttctttctttttttctttcattccttccttcctgtttctttctttttctttttctttttttttttttttgaggcagggtcttgctctgttgcccaggctggaatgcagtaacttgatctcggctgtctgggctcactgcaacttctgcctccccaactgatcctcccacctcggcctcctgagtaggtgagactacagacacaagccaccacacccatctaatttttgtgttttttgtacagacatggttttgtcatgttgcccatgcaggtctggaacttctgggctcaagcaatctgcccacctgggtctgccgaagtgctgggattacagggatgagccaccaggctggccagagtgttttgttaaaaacatgagtcacatcatgttaactccttaaaatcctccactggtttaaaattcaaagtcctcctgagatctgacccctgcttacctctctgacttgtttcctacaactcctccctctgatttcagccactgtcatttcttttgtacctcaaacaggcctaattggtacagcctcaaggtcttcccattttctgttgccctttttttttttgagactgagtcttgctctgtcgccaggctggagtgcagtggcatgatctcggctcactgcaacctccgcctcccgggttcaaccaattatcctgcctcagcctcctgagcagctgggattacaggtgcccgccaccatgcccagctaattttgtattttttggtagagagggggtttcactgtattggccaggctggtctcgaactcctgacctcaggtgatccgcccgcctcggcctcccaaagtgctgggattacaggtgtgagccatcgcgcccggcccttctgttccttctaattgtagcacgctttccccagatattctcctgtctggctccatttcagcattcaagtttcagttccaatgttacctcccaaaaggtctctcaacctccttgacctttctagctaatgtcccccctgccttcagtttccgtcaaatggcctcgttcagttttccttctagtgctcatcataatctgcaagtatcttgtttcctgacttgtggggagtttactgtctgtctcttccacacttgagtgagagtgtgggctacagagcaggggctgtttctgtcttgttcagctgtatgcccagtgcccagcagtacccacagagcctggtgcatacatgacaaacactcagtaagtagttgttgaatgaatgaataagtgaatcaatgggagaatgagtgaatgaatggagacaggagattcacagggaatctcctgctgtagaactatagaccaaagtgggggctaatggtggctgagggtcaaggccctggtcgaccaatagctgagatctcagccctgaggcctgctctgcgtctaaaagaggcccaatgggtggatggaggaggtgcatagggctgacagttgcagagacctgggaggggctgcggaggcacctaccgcttctcatttccgtatgatttctgggccaccttggcatgcaggatccgcacagtctgttcacactgttgctgcaggcacctgcgcacgcctcccctcagaatggtggtgtgctctggggatgacctgggagtagggcaggcaggtcgaccagccacaggagggagaagggtcaaggtggcacagggtccaagcactcaggttgagtaaaatgaagtgagcagggggttagagtgagtgggagggtggggctgctctatatcctgcccctgtggggtcaggaagaggaagcattaggtaaggaggagacttggctgcaaattgtaggctaaatatttaggctgcaaggtgctcaacgaagcctgcatggaacccatgggaccacccaggttccactctgtgggtctggcatcatgcccattggagcccagggccatagggacacgtggctgtgacacaaaggctgcacttatactggccttgggatggagaagagtattttagggctgatggaattggtagagatgaagcttccccaccctggggaaggcagggtggggggtgaggagggaggggaagggagagcctttcctgggctcctggcctggagcgctctctagcctcctgcctgcaaacagaaaagggcccaaaaccttgtcctcaggatgggggatggcctgggggaatctgagcctttctggggccaaagccatattcttccctttctcccatgagaagtggcctgttgctgtgtgggctttcctacccttgattacaggagtcaaggcagatgacattggtcctgcagagtgagccaggttagagcctagaggtctggtggcttcttaacctgggggtcttgagcggtgtgggtgggtaggcccgagcaattgcagggagcaagtagaggaggggaggtgggagagatttggggggttagcaggttgaggcccaaggagagccatgaaaactgaggctgtccttctgagcccttattcctcttggcaggaccagagtctctcctcactcctggaggggacagcgcaagaccgcaccctcgaaagccaggccagacaggcagcagccacagccaggaccgctccaccccttggggctctcctcagggaagtgccttctaagcttccaatgaattccggctgtggagtgtggctgccccggtctccccagtctcccgctgtagctgacttccagcctggcccgcagctagccctgtctgcagctccaagcgtggtaggagcagggggtgctgggtttgccccccctcaggaggaaggggggatccctccctgccagtgggaggggttgcagcctgcacttcccctccccacccgccagccctgggttaaatgcggccgttgcctctgtgtgctccagctgcctggcagtccccacctagggcacgctgccacgccgccgttacctggtccaagtgcccgggaggctccgcctgtcggcttcgctctgcagctgcatctctgatctgtcctgcaggctcaggtgagtcaaaggattgggaggcactgaggggtctgcaggggagtaggcatcaagccaggtcaggcgagtgtattttagcagagacgctgcctagggtgccctatctgatttgcagtgcccttccccacttctgcagggtcctttccaaatcgagcccccaccctcaaagccatcaaaataggatcatcccttttctactctcatccctccaggaaccccctgaaatgtccctaagggacttttgagaatttatttacaggcctctcctcccttgctgctccactccctcaacctcacctcagggcatctctgaatctttctttttttaatgcaaggattaactcctcagaggaatcccaggttctagtatcagtcctgccacgacatcgccatgtacccttcagcaagacactaccctctctggacctagttcctttctttgtagaatgaggggtttggaaaggtgatgaactttgaggcatttgctattttgactttctaggattcctggggtggaggcagggtgccaggtgagaagttggctcagactaagaatgggatgaggggaaccttaaccaagatttaggggcccagaggcatctccgggtaggaaagtatgggaggtggcagaggccccttgtgccttagccctcatgctgcccagggatgttggctttgcctgtggcccaagcttgacaagggttccccgccctcccacttccaccagcgctgccacatcttgcttggtcaccctcccacgacgggccctgccagaggatttatgttcttctaccaggcctgggaggggaaaagggagaagaatccgggatgagaaggtcgcctggagtgagaagcaggcactggcctcgctcagaataggcgcattcacggaattggggggcgggggcggagctgctgttgggttaggggcagctggccctctctgccaagaaacagcaacagaaaaatggctaacacagcttcagcatggggcgcggcggtggggtaggagctggaaggaaatgaggtttagtgaattctaggcgccagggggcctcaagagagagaaggggaaccaggagccctaggttctaatcctgcttttgcagttcggcgggctgcctccttggggcttagttttcctatttgtatagtggggagggggtgggggggtggtccttcgtagttctcacggggcgtctccggggcctcgggagggtaagcgctcacctgctgcccctgcggggtccatggtggctccacggggccccagccgctcacccgccgccctctggacgagtccagtgctgctgtcgctggaaccctgcacacccctgctcctcggctcttgcgcgggttatatcctgtccaggccttatctccaaggccccgggccccggccccctgtttgctcggggtgggcgcacctgctgggcagatgtgggcttcccacgccccctgccatctcgggcgccccctggcggtcgctcctgagagcaggcgggaaacaggcgccaagccgcgcgttctcgtgcgcagtgggttttggtccactcgctgccacgccaccacgctcagccccgcaacagggcgcagcccctccctgccgcctgcggttgggcagtgcatgtctgtgtttgtgtgtgtggaggggtctgggggggttggcgagttgcaaagacagccacacagaagcctgtgtgcgtaggggagtgggccgaggtggggaagggcttctgtctgcagaggttcgcctggcaggaggagaggcaccaaacgcccaggctggctcacagaaactagcaggcgtgggattgtatcctgccgcagccactttttggccgaatgactttgggtaccagcgcttaacttttctgagcctcaatttcattgtctgtatgatgggggacaatcacagccttagtcttacaattgcagagaggattaaatgccacaatgcgtgaagagcatttaacactgtgcctgacatttaaggaagacctgtttttttctgtttaaattttgcatatttgtatctatgtatctattcttatttaccattctcttgtgggccgagcgcggtggctcacgcctgtaatcccagcattctgggaggccgaggtgggaggatcacctgaggtcaggagtttgagaccagcctgaccaacatggcaaaacccgctctctactaaaaatacaaaaaattagccaggtgtggtggcaggagcctgtaatcccagctactcgggaggctgaggccggagaatcgcttgaacctgggaggcagaggttgcagtgagccgagatcatgccactgcactccagccgggacgacagagcaagactctatctaaaaaaaaaaaaaaaaaaaaaaaaaaagaatctcttgtgtttcccagcaatcccactgtgatgagaattttttaattctgaaacatttcaaacatacacaaaaatagagagattagtaaaataaacctgtaactgtcttccccctccaagtgcctatcacccagaataagagctctgtaaatactgttgcttttctattttccttcctccctccaggctctgacacctccattctctgtccccaagcgccatgagaggccttctttgctggcccgtgttgctgctccttcttcagccctgggaaacccagctccagttgacaggtgaactggggcccagccctcaccagtgggaggaggggagcggaagcaggtcctccctctgcagccagctcctcctgctggggagagggaagcaagggctttggaacatatgggactgggtttaagttccccacttcacctttctgggcctcagtttcttcatctgtaggatgtggcttagttttgggcgcatgcagaactgcccatggggtgtttaatttggaaaaattatttgaaaacatggaaaaaaaccaggaaattttacataaaaatccctgtttagtatttctcttgaaaaaccagggatctgctgacatccaattcgcaggggcatggcctcatttggatgcagctacctgcccaatttaggagtgataggggctctttgggtctccagcgtcctaacccaaccagttcatccatgttccctgcctggtccctgcaggctttgagtttgcgacgcttccttgccccctcgtcaatgggtaataccgcctcagaatagccctcagatctgtaagatgagggaatttgtgaaatctcctagcccaggtgctaggcacatgccgggcgagtgcatctgtctaatctgcgtttgctgtgctgggcgctgttatgtcggcatagcggcatttcccctgggtttcctagggggtctcctcggaggtgaggctttgctgacctaggagagtcctccctgatctccccgcaggtcccaggtgtcacactgggcccctggatctggtgttcgtgattgacagctcccgcagcgtgcgccctttcgagttcgagaccatgcggcagttcctcatgggcctcctccgaggcctgaacgtgggtcccaacgccacgcgcgttggcgtgatccagtattcgagtcaagtgcagagcgtcttccctctccgcgcgttctctcgccgcgaggacatggagcgcgccatccgcgacctggtgcctctggcgcaaggcaccatgacgggactggcaatccagtacgccatgaacgtggccttcagtgtggccgagggcgcgcgaccgccagaggagcgcgtgccgcgtgtcgctgtcatcgtgacagacgggcggccccaggaccgcgtggccgaggtggcggcacaggcgcgcgcccgcggcattgaaatttacgcggtgggggtgcagcgcgcggacgtgggctccctgcgcgccatggcatcgcccccgctagacgagcacgtcttcctcgtagagtccttcgacctcatccaggagttcggcctgcagttccagagccggctgtgtggtgagttaggagggcgctggagtgaagctcgaactctcaatccaaatgcttggattcctttcccaccacagtaaatcccatcccgtgggggtggccccgcgatttccaggtagagttgccctgacctaccgcaggctgtgtcagatttcagctctgaccacttctgctcagcctccatcaacaaggagcaacctataatttcttgccctacccgccacagcttaccacaggcttaatgtcaaattccagcaccaaccccctgcacacacggaaccagtgattctcaaagctaagagggatcggctgctccaaagagtcgtggccctcccacatggggatgacttctcccattatcatcttagctcctcccacaaatgctgcaagatctgttctgatctgttttgagtttattccgcccacctcgacttagcacctctccaccttcctacccactcctgcccctgtgtagtcctgtcccagcccactgacgtgtctaattgagtgtctcctcttctgagcctactcacaggggctccttaagccttattctttccctaagccctctcacttggtacggcccttctcaaattagtcatttccttctgaaagccatttgagggtgatgcctgcctctgaccccatccccatccagctctctcttgttggaggcttctgcccatctgttccctactgattctagtcctgtgtgtcctcagggaaggaccagtgtgctgaggggggacatggttgccagcaccaatgtgtcaatgcctgggccatgttccactgcacctgcaacccaggctacaagctagcagcagataacaagagctgtttggatgacagctatccctgtcctgcaatctcactgctcctgaaccttctttggctctccattgccccaacatcagaccaatgagtctggaagggcctttggcagtaaaagcacacctccatcactttacaggcctaagaaagaaaggtattgcctggggtcacataagtccctggtgggagcccacagttcagtgtgctttctgccctctttctccctgttttcaggccagtctctaatcaacctcccaaacttgtttctgttttcttcttttcttttctctctcttttttttttttttttttttgagacagagtctggctctattgcccaagctggagtgcaatggtgcgatcttagctcactgcaacctccgcctcccgggttcaagtgattcttgtgtgtcagcctcccaagtagctgggattacaggtgctggccaccacacccagctattttttgtatttttagtggagatggggtttcaccatgttggctaggctggtctcgaactcctgacctcaagtgatctgcccgccttggcctcccaaagtgctgggattacaggcgtgagccactgcgcccggccatttctgtcttcttacaggcacatccttacggtttctcttcttagatactgttggggggtcttcaattaggtgggtgtcccccctcatgccacccattcttgactctgcacctcagctctttgtgtgctgctcacctgagctgcccttgccactcccctctgcctttgcaaatctttcaagactctctctttttaagagatagggccttgctatgttgcccaggctggtctcacactcctgggctcaagagatcctcccgccttggcctctcaaagtgctgggattacaggtgtgagctgcttcttcatttttgtcttctgaaaagctatggcatagaataccttgcttattcaattcagttttttactgagtaccaagttagtattagacattgtgctaggagcattacacatgttattatctctcagcctcacaacaacctggaaaaagaaatcatgtaatcccaataacccagatgtcagctggggtcttcttgtttctagaaactaaaagttggcttgaactctgatttgatgactgtttaacattcaaatctctctccaagacctctggaaatcccccaagtgcttatcttctggttgtcacctcttgctgtgagcctctgctaaattcatttgatttatggatcctctctcatttctcaaccctgcacatgctgttcttgttccatgcatgttaatcaacctcttcgttggtttacacacttgtgtatgcaggggcatacacaagcgtgtatgtgctaagtaactcatagcgcgtgcacacacacacgaaaaactcattataattgaatattagacagctttgtttctgaaagtcctcagtcagcctagtacaagggatttttcacaggcagcctcaacccacagagttactcatcttcatactggctctcttgttcttttttttttttttctttcctctctccactctcatctcctttccaggaaccccaaatactcacttttttatacagggtaattatcttctctccagtccagctctcggccatctttgcctatccagatcatcaagatgctcaacagggcaatagttccccatcttccatggaaggaagctgtgaatagcaatcactgtcttccattatattcccattttgcaaatagaaaaatggaggctcaaataggtaaagtggccaaacctgtcctctgtaagtcagagagcatcttgaggacaggggccctgactaattaggtcaggatttttggggttggggcccaggcgtaggtattctttaaaatttccttaggtggttgtgctaccagagctgagaagggcagtcctgggcatagactgaccccatttcttcctcagccattgatctgtgtgctgaagggacccatggatgtgagcaccactgcgtcaattccccaggctcctatttctgtcactgccaagttggctttgtactccagcaggaccagaggagctgcaggggtgagcaacacccccaccctcccaccacaccctggactgtggcctccgagggctccaatcagaggcaacatcttgctgtttcttccctcctgccagccattgactactgcagctttgggaaccatagctgtcagcatgagtgtgttagcacccctggtgggccacggtgccactgcagagagggccatgacttgcagcctgatgggaggagctgtcagggtgaggagggctctcctacatttgtgggaggggtaagagatcttagctggtggggtccatcctgactcatcctgacctgtctctcctttcagtccgggacctttgcaatggcgtggaccatggctgtgagttccagtgtgtgagcgagggcctctcctaccgctgcctgtgccccgaggggcggcaacttcaggcagatggcaagagctgcaaccgtgagtgatgggcgggagggtgttctgttggcttctgccccattgcccacattcggagtgtccttgactttgccattgctgtggcccctaggctgtggtgtgaatgtctgtgtgtgttgtgggggtgacattggagggtgtgccattccctccttccatctctttcctacaatcctctactctgctgtcaatgttaatttaaaaatacatatttgatcacattcctcctttgtgcacaagccttctgtggctcaccaatgactacaggagaaagatcaaatgacttacccctaagtatttcaaatggtgagcagaaccacattaatgaataatgaaatcaaattactgggttacaaccaacattaaaaaaaaaagagtggaagacaatatagagtttactgcctgtagaaagagttatattatttctgaaattttagttctgtgtgaaatgtctcatgatgtattgtcattattattatttttactgtgggctgtgataaaaattttgaaaccactgccttaggtcatcacgatctagcttcagccaactccatctgcccatctcctgccacacttgaacatttcagtcttactggcctgcccctccccggatgtgtcaggatctccccagatcccaagcctctgcacgtgctgcatctcaccttctagactgtcccttactgccttggcaaactcctactgatctttcaagactgtcttagatcattcaggctgctatatcaaagtactgtagactagacatttagttttcacaattctggaggctgaggagtccaagaccaaggtgccagcagatatggtgtctaatgaaggcctgttttctgattcttagatggcacacctttcaaagcctccccacgccaacacacacacacacacacacacacacacaccaattttcttgctgtgtcctcacatggtgaagacaggaagcaagccctcttcgactcttttttttttttttttttttttgagactaagtctccctctgtttctcgggctggagtgcagtggcgcgatgtcggctcactgcaacctctgcctctggggctcaactgattctcctgttacagcctctggagtagctgagactacaggtgtgccccaccatgcttggctaatttttgtatttttagtggagatggggttttgccatctcagccaggctggtctcgaactcctaacctcaagtgatctgcccgcctcagcctcccaaagtgctgggagccaccatgcctgacctcttcagactcttacaaggacagtaattttactcataagcgctgtaccctcatgtcctcatctaatcctaattaacctccaaagatctcacctccggagactatcacataaaggcgtagggtttcaataaatgaattttgggaaacacactcattcagttcataacaaagatcagatagaaggccatcatctccatgcagccttccttaacaactccaggaagaatacactattcctaccttgggatccctgcatgatcttctcttctagcactttccttgaccagagcacatagcatgtctgacttgctctgctctgtcctcatggaacaggattatgttttaattatttcaaaacctttgaaaacctccccacgccaacacacaccacattttgggcctagcaactttcctggctcagaataggggaggtgacattgtagagtcattcaggagcatgggttttggagtcagatggacctggcttcatgtcttggctcagtcagtactagctatgaaatctggggcaatcactttatccatcagaacctcaggtcatagaaaatggggacaatattcaagcttattgggaggattgagaatatatataagcacttcacccagtacctaccacatggtaagctgtcggtaaataatgtttttgttattattattgttaatactggtagagtgcttagaagtgtgcctgatacatagtagatgatcaataaatggtagttattgtggtcattactatgattgttgttaaaaaaagatgcttttagcagagtggtttgttctaagcactgaataaatgtcaagggcgatgatgagggtgatgatgatggtgatggtgatgatgatggtgataattattattacttagcacactgcctggcacaggaaggactcaggaaatgttgtctgttatataataaatgtttgcgaatgaacgactagatggatagacagctgctgccagtccagaatctggtccctcaattcaagcttttctggctgtgcagggtgccgggaaggccacgtggaccttgttctgctggttgatggctccaagagcgtgcgtccacaaaacttcgagctagtgaagcgcttcgtgaaccagattgtggacttcctagatgtgtcccccgagggcacgcgggtggggctggtgcagttctcgagccgcgtgcgcaccgagttccctctgggtcgctacggcaccgcagccgaggtgaagcaggcggtcctggccgtggagtacatggaacgcggcaccatgacagggctggcgttgcggcacatggtggagcacagcttctccgaggcgcagggtgcacggccccgtgcccttaacgtgcctcgtgttggcctggtcttcacggatggccgctcccaggatgacatctcggtgtgggcagcgcgcgccaaggaggaaggtgggcttggcatgggacacagtgggctggggttgggtcagacgctgggaggcagctttcccgaggcctggggcaccctctgagaccccggccttgcaggcatcgtcatgtacgccgtgggcgtgggcaaggcggtggaggcggagctgcgcgagatcgcctcggagccagcggaactgcacgtgtcctatgccccggacttcggcaccatgacgcacctgctggagaacctcagaggcagcatctgtccaggtgagcgcatctctctcggggctcctcctctctctcattgcccgtcctctgatatctccccttcctattcactccctgcccactttgtagttatagccagaggttgggctcactagacagagctttgctactccaaatgtggtctgcaggccagcggcagggcggtcacccggtagcttcttagaactgaaacatttctggtgctctccagaccgaatgaatcagaatttccacttcgacaagattctcaggtgatttgtaagcatattaaagtctaagaaatcctagactaggctacctgtcccccaaatcagtggaggttcagaataatttgggaaatttttttgaaggcacaccagacagcatttgtaagtggagccacagcatatatccctgaacttgttagaattcaaccttatgaacttggcaaagtggcaggactgaatatattttaagtatgcaaagactttttttttttttattggggacaacatacctcataagtgcaatccctctacttcatcatctggtgctcagctgaggaaaaagagactgactctacctgtgaagaaggggactcttgaatcgcatgcagtgtactgtgctctaggtgatacagggaatgtctccagggtaacttttaccctagagactttagacactagcccaggcttaagatgtgactcttcttcccatttatcagactgcagctccagaaacagactaagtagggctggtttgggtctggagaatttgcctttttttttttttagatatatgtaggggggctgggcgcagtggctcacatctgtaatcccagcactctgggaggccgaggcggctggatcacttgagatcaggagttcgagaccatccttggcaacatggtgaaaccctgtctttaccaaaaaatacaaaaattagccgggcaaggtggtgggcactgaggcaggagaattgcttgaacctgggaggtggaggttgcagtgagccgagattgcaccactgcactccagcctggtgacagagtgagaccctgtctcaaaaaaagtatatataatatactatatatactatattatataatatgtgtttgtgtatgcatgcacatgcacgtgcatgtatatacatatacaaatatacacatacagtccttcccccaactctccttccctccccgctctcagccaattctaattattgtggctctttcagattaggggctctttcagagctcttcctatgtgactcttatgggccctgcagtgtgactttggacgagtcacttaccccacacctaccttaacttttctcttcggtaacaggagaggcactggctgcccaaggttacctctagttctagagttctaagagaagtctgggttttgtggttgaagctctttatcaattggtggtatgactgttccctgtctccaaccctttgtttagagaaacaaatctgtgaagttaggggtctttgctggattccagcagtttgttcatagtacatataagactaagatgaagagacaacttttaaatcattatggcagtgttttcaaaggttaaatggcaggtattgtgcttattatttcaccacctgtaatcctttttcttttttttcctaaggtacttttattgtagcattttttttttctatgtcattccctgtaatctttttttttttttttttttttttttttgagatggagtctcgctctgtcatccaggctggagtgcagtggtgcgatctcggcttactgcaacctctgcctgccaggttcaagcgattctcctgcctcagcctctcgagtagctgggacaacaggcgcatgccaccacgcccggctaattttttctagttttagtagagatggggtttcaccgtgttagccaggatggtcttgatctcctgacctcgtgatccacccgcctcagcctcccaaagtgctgggattacaggtgtgagccacagcacctggcctccctgtaatcttaacaatggcacatgcttatagaatttcagtgaatctaagataccattcattttaagattcatcactaccttatgtactgctaagaaaaaacatgtgccagttttaattgtaaggcctcctgcccaacccccaagatgttgatgtgtggggagatagagttggatcaggatcagtggttcctaaaaattaggtcacaccagaatcacctggtggacctttaaaaacacaaattgcagctgggcatgatggctcatggctgtaatcccagcactttgggaggccgaggtgggcagatcacaaggtcaggggatcgagaccatcctggctaacacagtgaaaccccgtctctactaaaaatacaaaaaattagcagggcatggtggcacatgcctgtaatcccagctactcgggaggctgaggcaggagaatcacttgaacccaggaggcagaggttgcagtgagccaagattgcaccactgcactccagcctgggagacagagctcaaaaaacaaaacaaaaacaaacacaaattgctgggcttcaactctagattttctaattcagcaagtctggggtgttgtctgataattagcatttttgataaattcctacacgatgccgatgctgctggtccaaggaccacactttgagaatcactggtctagttgaaatacactataaagcagtggtttccaacctttttggcaccaggcagtggttttacggaagacaatatttccatgatggtggtggggagaatggttttgggatggttcaagcacattacatttattgtgcactttatttctattattacattgtaatatacaatgaaataattatacaactcaccataatgtataatcagtgggagccctcagcttgttttcctgcagctagatggtgccatccgtgggtgatgggagacagtgacagatcatcaggcattagattttcataagaagcctgcaacctagatccctcacatgcacagtttacaatagggtttgtgctcccatgagaatctaacaatgccactgatctgacaggaaaggagctcaggttgtaataggagcaatgaggagcggctataaatacagatgaagctcccttgcatgctggctgctcacctcctgctgtgtggcccagttcctaacaggccatgggctggtactggtccatgtaatgtgctggtactggtccatggcctggggattggggacccctgctgtaaagtatttacttgaaccaggcagtgttctagatctgtgctttttcaaaaaggtaggcagtacctatttaattacaattgattaaaataaaatacattttagtcctttagtagcaccagtcatatttgaagtgttaaacagccacatgtggcttgtagctactgctttggacagggcagatgtagaacactttcatcattgcataaaattttatttggagagtgctacacaaagtgtggtccacagaccaggagcatcagcatcatttgggagcttattagaaatgtaccttctgagcttcttctccattctgaagcagaatctatattttaacaagctctcctgatgattccaatgagcattaaggtttgagaaacagtcttgtaagttgtgcgtgagcacacacacacacacacacacgtacacaggtgaatgaatcctcgaagccactaatgcgtacactctttcattatatccattttatagatgagaaaactgagcttagaaaggttagtgagtttttcagtatctcacagctacttagcttgggactcagcccaggtctctctaaatccaaagcccatatactcaaccataggcccagtgcagggaaatcagagggccaaagctagggcaatttctcatccccctgaccctctgtgtccggcttgcagaggagggcatcagcgcagggacagagcttcggagcccatgcgaatgcgaaagcctcgtggagttccagggccgcacgctgggggcgctcgagagcctgacgctgaaccatatcctttggggctggtggcgcgggctggagggaaagtgaagggacctcggcgaaccccaacggcctccttaaccgctcactggcccagctgacggcgcgcctggaggatctggagaaccagctggccaaccagaagtgagggccacggacggcccagacccgggctggggcgcggcaccacggacggtgccccttgcgcgccatcggtgcgccggggccaggcagaacctgggcccgtccggcttgggctgtcggggcggaggcgctggcgggcttccggcattgagctgagttggcctcgcccggaccattaggcggactgcggcgtcagggggatagcgggtggtgagggaaggggcacgtgctagaccggcacgccctcgccgcgtgctgcgctcagttctttgttggatttcttgtttgtgttcttaaaaaaataaaaaaaactgatttccacggggtccgtttttgggtcttgctgcgccgcctgggggaggggaagccagacggagcgtgctgtggcggcgcccgggcggcgtctccttggagaaaggcgcattgtgcgggggtcgggctcgggggcaggagacccggcgctgcttccccctgcttgtttattcagccgagaacagatggctccttatgcaggctgcgggaagggagggggctcaacaggaatccttggggtctgagtaagtctgcgccactccattccccagcggactgaacgcttcgctcccggccacgcctatcccatgatgcccccaaatctggctcaaaagctgctagtactgagcgctggtaaggggtgcgggggtggcgttggtgggaaagtgagaggcagtaattgaacccctaaatggatggggtgggagtggatagatgagctttgaccgattttaactctctcctgcactaggtaggaagagaaggaggtatcagctaggacccctgtctgtccagcctgtggccttccttctgtcatcttatcaacccctcccaaaacacctctatcagcaaagaacacaaaccagtaccatttcccgagtgcatgtaagaaacaacgaagtttaaaatgcttccagtcctagagtgatttggggaaaattattttgtgtttgtttcctcatctgcaaagtggagactggaattgttacccccaagcgtgatggggagaatcaaggacattcttctaaggcatgtgccttgtacctatccctcaattaatggtagctattaactgttcttatagtaacagctaacatatttagtgttgggcattattgtaactgatttgcaggtattttcattttatacttggaaccagtgaaataagaattattgcctttatcatccccattttacagatgaggacactgagacacagaaaggttaagtttccaacagtaacataaccagtacgaagctgaaccaggatgtttcctatggctgctctaataagttaccacaaattgagtggctagcaacacacatttattaccttacagtttttaggtcagaagtctaagatgtgttggcaaggctttattccttctagaggcttttgtttcctggccttttccagcttctagaggctacctgaattccttgggtcatggccctacatcacttcagactcagtttccatcagcacatctctttctctgactctgaccttcccgtctctgtcttataaggacccttctgtttatattggcatgaccttgataatcaaagataatcccatctcaagctatctttttttttttttttgagatggagtttttgctcttgttgcccaggctggagtgcaatggcgcgatctcggctcactgcaacctccgcctcctgggttcaagcgattctcctgcctcagcctcctgagtagctgggattacaggtgtatgccaccactcccagctaattttttgtatttttagtagaaacagagtttctccatgttggtcaggctggacttgaacttccgacctcaggtgatccgcctgcctcagcctcccaaagtgttgggattacaggcgtgagccaccgcgcccagcctcaagctctctatcttaaccacatctgcaaagtcccttttgtcgtgtgaggtgaaatcacaggtgccggggattaaaatgtgtacatctttgtggggaaggccattctgcctaccacatggggcttgaagccaggctgactgacttcagagcagctgctcttaagtactctgtgccgggcaccttgctaggcttggtgaagagggagaaactgatgattgagaaaaactcttgagctgaggaagctccgggctagaagggctgaggtccacctgactgttgcagaaagagggaacttcagatgagaggagggagaaatcctggagaggtgatccttaaacggtggctggaatttccgcaggaggccatggaagactttacaggtgagtgaagcttgaactatgcgtggtcaggagggactggagtatggggggatgggaatgatcatcttacctggccatgaggatcagatgagctaaagacctatggacttggcatgtgacctcaccttgccttaccattcattttacagttggggaaactgaggcctagaggccagagttgcctgcccaaggtcacacagagagaaaacatcagttgcaccaggaagaagcctagtggggaggtcaaactggagcagggtagtcaactgatagggggcactgagggcaaaggccaggctccttccttcctcttccctggagttggcaggcactggcttctctggggtttcttttctcatgcttttttctcttgcaatctccctaatggccactggatggcgccgggagcactgatttggagctgggtcctagagccttcgcaggccgttggcatctggcacttgggctgcagagcctgtcctcccttaattccccgactctggcagccccaccaccgaagtctacaagctgcttctgttcccatgcagtggccccatagtcctggatttgaagaccagccctgctacttaccaggtgtgtgttggtgttgacaggtactggttccctttctcacttcttgattcctttctctcatttccctttcctcctaccagcttaaccctgctggatacagggaattcctgttccctaaccatgccccacataaggtcagctagcgcttgcttctttgtttatacccccatcttacgttatgggatagaagacttacaaaggacccgtgaattcaggaaaacaaacatccattaactcaagaacagaaagtgagaacccaagtaacagtgtgaggagagtaacactgccaagaaagcttagatggagaaggcaccgagcccgaacaaagacccccgggcccgggtcttttggtacccaggcaagcacgggtttatgtggctttcagagcctgttaagatcaggaataaagcacgtagatattgggggagtcctgagcccaggtgtgtggagagaactcagcgccctcagccttcttggttccctggagagtttgaatcattaaaaaacgacaatatcttccctagtggttagcagagatgccacttctggagctgtttcttagacttagtaacatgaactaggcatggccttgggtgggaaagggcagggcaggaagggcctgtaacttcagccaagtgctggactcgctttctgaatttcacctctgtgttgtctggctctgtttctccgtggtttttggcctttctcttcttctattctagctcacagctctctccatttctgcagccggcacagctgctgtctctaaggactgtctactcttctggttctttggacctaggatagtgaaacaggagagaaaactatcaattaccaaacactggcctgcatgctgggggccaggctgtgcctttcatctgtgttgtctcgttgaaacctctcaacctacaggagggaaaactgaacttgaaagaggccagttagttgcccaaggcccagagcttccaagttagggtttgaacccaggtggtcttgatcccagagtaggcccatttcacatttctacccttcagttattagggacaaatttggactttttcaaagaaacctttttcaggaagtttatggagtagaccaaagcaaagcccgagatacagtgcaggtgaatggcaggagccgctctgccgtttgtcagcagcacagcctccatgggacacttttgcctcagtgtcccctcttgtaaaacctgtgagcaggccaggcatggtggctcacacctgtaatgccaagcactttgggaggttgaggcgggcggatcacaaggtcaggagttcaagaccagcctgaccaacatggtgaagccccgtctctactaaaaatacaaaaattagccgggtatggtggcatgtgcctgtaatcccagctactcaggaggctgaagcaggagaatcgcttgaacccaggaggcagagtttcagtgagccaagatcgcgccactgcactccagcctgggcgacagagggagactccgtctcaaaaacaaacaaaaccaagaaacaaaacaataacaacaacaaaaaaaacctgtgggcaacgccaacctcataggttaaaaggaaagagcgaagtcattgatgaatgtgaacatgcacagtggatgatcaggaagggcccctttctctgcaggccattacttgccctttttccacaccctcccactcatttgaagtggcgtggcttcagatccccaggcccaatgaagaagttcggccacatcacacaatgaaaagcaaattgctgttaaatacacagaggagggcataagcagctcagctttatggagcccaggaaggcttcctggaggaggtggcaagtgagctgcaccagcaaggaagggtagacattccgcagatgataaaggaggagagggctcctgggcacaggactcgagtggcttttcaagggcatgtggggagggtgaggctggagaagacagtcgccctcagtcccccaggtggatcatgctgcatcccatgacaagggcttgtgggttagtggttctaacccacaagacttcatggacttatgaatcacctgagggtctgttaaaatgcagcatcctgcagtggggcccaggaatctttgtttctcccagctcctgggtgacactgcacaagtgatcagaggaagaaaggagacacaaagcttctggtgatggacatgagtgctgggcaagggctcagtgtcctccaccaggcaggggagcagactagggtctcaggatcttgggtgtgggcgtgtactagaccttgcgccccacatgagcggacgtgaggagctaagctgagaaacagcaaatgggaaagcaaatgtgaatgccagggcaagcattacaagtttgttaggagtcaccaggggctgggcagagaaggcaggttcagtcacaagggttttagtccagagacatgtgctggagaggagagggaaggctggaaggggaggtatgaggagcaactgctgggaagcaatttttttgttgcgggaggtgagtggcagccctggggctttggaaaaggtgataaaaaagaacatatactaagggcctgaaattctaaggacttatgaagaacccatttaattcccataaccatcttaattagaaaaatatattgttattcttaatttacagacaaagaaacccagtcccagaaagtaatttgcacagcaaataagccgtggagcagagacttaagtccagactgtgtcagtccagagctgggcactgattcttcattctagggtatcccaagctcatttaaaactcccggatccatgagccactgtttctttctgttcttcctcctgccatggacaatcccatctccagcccacctcatcccttgctctgctctttcccaggtccaagatggttctttttcctgaagcggtgaatggaactgctgctgtttatccctctctaggcagccagggcatgcgtgttcttcccagcagctgagatgaggatggaaattaatagaggatatagacagaaaaaagctaacaactaactacactatgcagataataattgaggtgtattttctcccagatgaacaagataatctgagtgacccctgttccctattacaggactccaattcctaatcttggcagttgccccccaaaataccctcccagtaaatgtttcttgaatacctgctttgggaatatgttaggtactgtgctgaacactggggattcagtggtgaaaaagagagtcctacactgtctttaagaaacttgtgttctaggagagggcagacaacaagtcagtaaatgaataaggtttcaactagtgatcattgctgggaagatgatgaaattgagtaagggtagagagctgcgctgtccacaggatttccgtgatggtggaaaggttctatatccttgctgtccaacatagcagtcaatgtgactaatgtgaccaagaaactgaattttaagttctgttttagataatttaaatttaaatagccccatgtgatttgtggccactgcgtcactcatcacaggtatagaggacacctggaaaggggagaggtgattaagtgaggtggtcaagggagactccctgagggggcgaaatttgaactgaggtctgagagggaggcagccttccattgttccagggggagagagtgcagatgtgggggccttctgggataaacaaagcttgaagttctggggcggagagaaggcttgtgagctggcattcactgggtgaggtagtgtggtgggagctgatggtggaggggtggtgggtaccggataactggggcatggcaggctgcggcgaggtgggcacccctcattccccttagcaacacagcaggtatagctgccctgcccttgcctgcccccttctctctcagggctgtggggaggactagatgagaccaggtaacgtgcacatgctctgtaagttgtacagagctgccaggcgatggctcatgcctgttaatcccagcactttgggaggccgaggcagatggatcacctgaggtcaggagttcaagaccagcctgaccaatgtggtgaaatctcatctctactaaaaataaaaaattagctgggcatggtggcgggtgcctgtaatcccagctactcgggaggctgagacaggagaatcgcttgaacccgggaggtagaggttgcggtgagccgagattacgccattgcactcgagcctgggcaacaagagcgaaacttcatctaaaaaaaaaaaaaaaaaaaaaaaaaaagttgtacagtgctgcccataagggtagagctgtggttctgagtgtgatcttggaccagcagcatgagcatcatctgggaacacgttagaaatgaacattcttgggccacaccctggatctactagtttaaagctctgggtgtggggcccagcaacgtttccaaaagccctccgggtggctgtgatgcaggctcaagtttaagagcaactgcagaagactggcggcaatcacctcctcctcctccttctcatctcaggcccccaacaaattgtccttccaactccaaccctggcagaattccttggtggctcattgcgcgccctagccctccttccctcagagctagctcagcttttggcttcacatacacagactaaaacaaacaaacaaaaatcagatagataaaacctttgtattaaaaatattttcaccatacaagccgtccagggtcgtcattaaaataaaacttaggccagacacagtggctcatgcctacaatcctagcagtttgggaggccaaggtgggcagatggcttgagctcaggagtttgagaccagcctggccaacatgaagaaacctcatctctgctaaaaatacaaatattaggtggtcatggtggcatgcacctgtagtcccagctacttgggaggctgaggtgggaggatagcttgagcctgggaggcggaggttgcagcgagctgagattgcaccactgtactctcgcctgggcgacagagtgagactgtctcaaaaaataaataaacaaaacgtctatagcatagaaccgatcaagtgaaaaaagatcccctgcttccgttaatcctattccctagagattaccacagaatgatttcttgtgattccttctagacgtctcctatgcctgtagaggcagctagtgtagtgctccaaaaccagtttgtttggtttaaaatcccaggtttgcttatttgtcaaataaattggacaagttgtctcagtgttgtcattcagaaaatgaagttaataatagcaccaacctcatagaattgttgtgaggattaaataaattcaaataaagcaatcaggagacaatccacttaacattcttacaacagtgcctggtatatagtatgtacaaacatgagtgtttgttaataaataaaatgcatggctgaggtttaattattctatgccttttccttggggatatagtcttgagagaataagccaaaggtgcaggaacagttggaaagccatttacgatggggatgatattgagagccactgaaaaaatcctgaccagatgattcttgccggtgacctcggctgacttccttggtttctgatcattatttcttattttattttattttattttttatttttttttgagatggagtcttgctctgttgctcggctggagtgcagggacgtgatcttggctcactgcaacctccaccttccaggtccaagcgattctcctgcctcagccttccgagcagctggaactacaggcacacgccaacacactcggctaatttttgtatttttagtagagacggggtttcaccatgttggccaggatggtctcgatctcttgaccttgtgatccgcctgcctcggcctcccaaagtgctgggattacagccataagccaccatgcccagcctctaatcattatttctataaactccctggtatctttgcaaagcttctaagtttcacagtttcaaaaaacatagcaggaggggggtatttacatagaacccagtgtggatggtacaccctggacttgtgaaatggtctgtctgatatcagccaggtgtggcatgtctgttgcttgcaaccaagaactctgaccatgccttcctccattctttctaagggctgtgtagtattctactctatgtatgtgttgtatttcacttaaccatttcttattgatggatgtctggatagtttagctattctacactacacagacaaatgcaatgacaagcttcccagagcctattgtccagcccccacctgtaccctattccccccgctttttttttggagacagggtcttgctctgtcatccaggctggagtgcagtggcacaatcacagttcactgaaggcttgctctcgcaggctcaagtgatcttcccaccttagccttctgagtagctaggactacaggtgcatgccaccacaactagctatttttttcattttttgtagagatgagatctcactatgttgtccaggctggtctgaaactcctgggcgcaagtgatcctcccacctcagcctcccaaagctctggtattataggcatgagtgactgcatccggcctgaaatgggctctttatcttacatgatcctgtgtagtgctcatgccaacactgtgaagtttgcatcaacactttccctctacagatgaggcagctgaggtcagagagaggatgagatatgcccccaaaccatcagtgagccccttgatgagcagggctcttgccacttcatcagggtggtcagtcggggggagaatgtttgggatgaaagcgggggccttcccttgactcaataccagctggcaaaaggcagaggttcttggaggagagaggtaagtcagggaaggactcgtgggagtgctggggagccttccactgtcaactcagctgctttccagagggcaagaggagagagagggtggaggacagttggcatgtggattgaggaacaataatgatgatgatgctaataatcacagtgactaatgttttgggcgagtcacaaagcaatttcctattatgaatagttcagcagagccacacaaccatccccttggaggaagacaaggcaatgtggctactcccattttgcagaagggaaaattcaggactggagagggagagtaacttgcccaagtttacatgtcaagataatcgccatgctgggtggggccagacctttcaggtcccagcccaggatctagctccctcccatgggccacagctgtggctggcagagaggtgcggcttttgtcagggctgaagctcagccacaccctctctccagcctcaagttgggtgccaggcagagggtttggactgaaggctg

SEQ ID NO: 59 - DNA, 2092 bp, Homo sapiens
ccaagcgccatgagaggccttctttgctggcccgtgttgctgctccttcttcagccctgggaaacccagctccagttgacaggtcccaggtgtcacactgggcccctggatctggtgttcgtgattgacagctcccgcagcgtgcgccctttcgagttcgagaccatgcggcagttcctcatgggcctcctccgaggcctgaacgtgggtcccaacgccacgcgcgttggcgtgatccagtattcgagtcaagtgcagagcgtcttccctctccgcgcgttctctcgccgcgaggacatggagcgcgccatccgcgacctggtgcctctggcgcaaggcaccatgacgggactggcaatccagtacgccatgaacgtggccttcagtgtggccgagggcgcgcgaccgccagaggagcgcgtgccgcgtgtcgctgtcatcgtgacagacgggcggccccaggaccgcgtggccgaggtggcggcacaggcgcgcgcccgcggcattgaaatttacgcggtgggggtgcagcgcgcggacgtgggctccctgcgcgccatggcatcgcccccgctagacgagcacgtcttcctcgtagagtccttcgacctcatccaggagttcggcctgcagttccagagccggctgtgtgccattgatctgtgtgctgaagggacccatggatgtgagcaccactgcgtcaattccccaggctcctatttctgtcactgccaagttggctttgtactccagcaggaccagaggagctgcagggccattgactactgcagctttgggaaccatagctgtcagcatgagtgtgttagcacccctggtgggccacggtgccactgcagagagggccatgacttgcagcctgatgggaggagctgtcaggtccgggacctttgcaatggcgtggaccatggctgtgagttccagtgtgtgagcgagggcctctcctaccgctgcctgtgccccgaggggcggcaacttcaggcagatggcaagagctgcaaccggtgccgggaaggccacgtggaccttgttctgctggttgatggctccaagagcgtgcgtccacaaaacttcgagctagtgaagcgcttcgtgaaccagattgtggacttcctagatgtgtcccccgagggcacgcgggtggggctggtgcagttctcgagccgcgtgcgcaccgagttccctctgggtcgctacggcaccgcagccgaggtgaagcaggcggtcctggccgtggagtacatggaacgcggcaccatgacagggctggcgttgcggcacatggtggagcacagcttctccgaggcgcagggtgcacggccccgtgcccttaacgtgcctcgtgttggcctggtcttcacggatggccgctcccaggatgacatctcggtgtgggcagcgcgcgccaaggaggaaggcatcgtcatgtacgccgtgggcgtgggcaaggcggtggaggcggagctgcgcgagatcgcctcggagccagcggaactgcacgtgtcctatgccccggacttcggcaccatgacgcacctgctggagaacctcagaggcagcatctgtccagaggagggcatcagcgcagggacagagcttcggagcccatgcgaatgcgaaagcctcgtggagttccagggccgcacgctgggggcgctcgagagcctgacgctgaacctggcccagctgacggcgcgcctggaggatctggagaaccagctggccaaccagaagtgagggccacggacggcccagacccgggctggggcgcggcaccacggacggtgccccttgcgcgccatcggtgcgccggggccaggcagaacctgggcccgtccggcttgggctgtcggggcggaggcgctggcgggcttccggcattgagctgagttggcctcgcccggaccattaggcggactgcggcgtcagggggatagcgggtggtgagggaaggggcacgtgctagaccggcacgccctcgccgcgtgctgcgctcagttctttgttggatttcttgtttgtgttcttaaaaaaataaaaaaaactgatttccacggaaaaaaaaaaaaaaaaa

SEQ ID NO: 60 - DNA, 1746 bp, Homo sapiens
atgagaggccttctttgctggcccgtgttgctgctccttcttcagccctgggaaacccagctccagttgacaggtcccaggtgtcacactgggcccctggatctggtgttcgtgattgacagctcccgcagcgtgcgccctttcgagttcgagaccatgcggcagttcctcatgggcctcctccgaggcctgaacgtgggtcccaacgccacgcgcgttggcgtgatccagtattcgagtcaagtgcagagcgtcttccctctccgcgcgttctctcgccgcgaggacatggagcgcgccatccgcgacctggtgcctctggcgcaaggcaccatgacgggactggcaatccagtacgccatgaacgtggccttcagtgtggccgagggcgcgcgaccgccagaggagcgcgtgccgcgtgtcgctgtcatcgtgacagacgggcggccccaggaccgcgtggccgaggtggcggcacaggcgcgcgcccgcggcattgaaatttacgcggtgggggtgcagcgcgcggacgtgggctccctgcgcgccatggcatcgcccccgctagacgagcacgtcttcctcgtagagtccttcgacctcatccaggagttcggcctgcagttccagagccggctgtgtgccattgatctgtgtgctgaagggacccatggatgtgagcaccactgcgtcaattccccaggctcctatttctgtcactgccaagttggctttgtactccagcaggaccagaggagctgcagggccattgactactgcagctttgggaaccatagctgtcagcatgagtgtgttagcacccctggtgggccacggtgccactgcagagagggccatgacttgcagcctgatgggaggagctgtcaggtccgggacctttgcaatggcgtggaccatggctgtgagttccagtgtgtgagcgagggcctctcctaccgctgcctgtgccccgaggggcggcaacttcaggcagatggcaagagctgcaaccggtgccgggaaggccacgtggaccttgttctgctggttgatggctccaagagcgtgcgtccacaaaacttcgagctagtgaagcgcttcgtgaaccagattgtggacttcctagatgtgtcccccgagggcacgcgggtggggctggtgcagttctcgagccgcgtgcgcaccgagttccctctgggtcgctacggcaccgcagccgaggtgaagcaggcggtcctggccgtggagtacatggaacgcggcaccatgacagggctggcgttgcggcacatggtggagcacagcttctccgaggcgcagggtgcacggccccgtgcccttaacgtgcctcgtgttggcctggtcttcacggatggccgctcccaggatgacatctcggtgtgggcagcgcgcgccaaggaggaaggcatcgtcatgtacgccgtgggcgtgggcaaggcggtggaggcggagctgcgcgagatcgcctcggagccagcggaactgcacgtgtcctatgccccggacttcggcaccatgacgcacctgctggagaacctcagaggcagcatctgtccagaggagggcatcagcgcagggacagagcttcggagcccatgcgaatgcgaaagcctcgtggagttccagggccgcacgctgggggcgctcgagagcctgacgctgaacctggcccagctgacggcgcgcctggaggatctggagaaccagctggccaaccagaagtga

SEQ ID NO: 61 - DNA, 52479 bp, Mus musculus
  misc_feature (13300)..(15985): "n" at positions 13300 through 15985 can be any base.
  misc_feature (50929)..(50948): "n" at positions 50929 through 50948 can be any base.
gtcttgtgtcaatttatatggttttatccagtctccttccttctggagctccaagtttacatacacaagaccatgtggttgtgttccatacattcctcgagttccatttttattttctcgtgttctagttatattttcaaatgatatatcctctatgtttctcacttttgaagtcttttattgaattggctttagattaattgtatcagccttgtacctggtgctcagtaaatacttgctgagtaagcaaagatcaggagaacaaagacacgaagggctgacaagaaacagcacagggtgtgaagacagtatgcattgtttatgttcccaaagtagacttttacatgcagggtacacagtgataaaagacgggactaacggcacacgttgaataatgaaggagcaagaagctcaggtctcaaacattatgaaggtaacacacataatcagtagatgaaccaggaaggttggttccatggggcaaagcagaacaagaagaaaattatttttacactgcagataccaaagggcaagaggatttagaagaagcgagagggaaattggggttctgggaaagcgtcaacacaggtgatttcttttcataactgcttgcttctgtcttaaatagcaacagaagatgtgtgattatggatacgtgcctacagcttccggatctgatgagatagcatagaaacacaagagcacagactgactccgagacaaaactgtttgcaaccatgggtgggcctatgcgttaaacagaccattcagaacaagggcatggttcagcaggaaagggcatttgccaccaagcctgacaatcctgcttaatgtccagaacttatgtggtggaaagagagaactgattccctcgaagcagtcctctgagccacacgcgtgctctacggcatacaaacacacattaatgtaaagaatagactctataacgtctctataatgtctgaaaagagaagcaatcccatattttaccgagacttgatgccatatatcttaagagatgtgtggaatctattggaaactccaagcgctggcagaaactcactggcttgcctttggttgctctcttgtggaggaaacactttccttaccttgttcataagtgcctaccactgcccaagatgcacccagtcaccagacatagtcaggtacagtagacattcacattagtgaactctggtagagtggggccagaaagctgagcaactgggggagccatctagagcaagggtgaggtggagacatgtccgaatcctgaaaatctcatcctgaaactgacaggagtaggactgttctccccctgctctgggcctgcatattctggtgcatgtagccttgagactctcacctctgccatctctgaggtagtcacatagcttggtagccaggttacaggttaaacttcctctcttcctataaggatgtgtccagcaagcacctgaaattcctcctcatgcatatgaagcattcccagctccccaggcccagccaatgctgtcctctcactctgacaattcctaccccattccccaaggtgtatccatagcccttgttcccctccttcccaataaggagagacttttcactaaaatctttctccagagaaggctgtttctcctgcattcacaacaacagagatcttgcctaacccacccagctggataagctccacttctttcagtccagcctggtgtctaatgtgcctggataccctgaagggagaagcagaccaggggtggcttggtgtaaaaagagaaggttaatgtcctttacatttctaccaccatggttctgaaagctcgagtcaacacacaagcataagtttttttttttttttgttttttgggtttttttgttttgttttggtttttggttttttgttgttgttgttgtttccagaaagttggttagaagaagtggagtcatggctgtgactaaactggaccaagtagttcagagtcttcagaaatagtttttgagagggcttagaaaattttgaagaaattggcctgagaaagccaaaagtgtctttagtgaactacactaatgagaagttatggtagaacttaatgactgaaatgttggcaggaatatagacaacagagattgtgatggtgaagtttcagtaggaatgagagtgctactgtggactggactcgtggatactcatgttattttgtgacaaagtccgtgtctatattttgtttctattctgagactctgtggtagactaagtttcaagatctctggaagataaaattccaaggcagcccaagatggagcactgctattgctggcttcttttagccatctttacgctgaaaactgggaacaaaagcagaacatagacattagaaaccactgtgtgcatcggtaggaaaacaagaccattgaagctgtagacaaggaaggtgtataaagaaggagataaactcagttaaaaggaaatgagaacaattcactatgggcaataggaaagaaatctcaggaattcctaagaccctacccattcagagtataaaatagtaaacttatttgaaagttttttccccctggagaagagagtacactcagaggctggaagagacgtgcgtgtgtgtgtgtgtgtgtgtgtgtgtgtgtgtgtgtgtgttttaaattagatattttcttcatttacatttcaaatgctatcctgtaagtcccctataccttccccatgccctgcttcccaacctacccactcctgcttcctggccctgacattcccttgtactggggcatataatcttggcaagaccaaaggcctctcctcccattgatggccaactaggccatcttctgctacatatgcaactagagacacgagctctgagggtactggttagttcatattgttgttcctcctatagggttgcagaccccttcagctccttgggtactttctctagctcttccattgagggccctgtgttccaatagataactgtgagcatccacttctgtatttgccaggcactggcatagcctcacagagaaagctatatcagggtcctgtcagcaaaatcttgctgacatatgtaatagtgtctgggtttggtggtttttttatgggatggatcccaaaatggggcagtctctggatggtccttccttccatctcagttatgaactttgtctctgtaactccttccatgggtattttgttccccattataagaaggaacaaagtatccacactttggtcttcattcttcttgagtttcatgtgctttgaaaattgtatcttgggtgttctaagtttctgggataatatccacttatcagtgagtgcatatcatgtgagttcttttgtgattgggttacctcactcaggatgataccctccagatccatctgttgggctggagagatggctcagtggttaagagcactgaatgctcttccaaaagtcctgagttcaattcccaggaaccacatggtggctcacaaccatctgtaatgggatctgatgcccctcttctggtgtgtctgaagatatgtgttttgtatcacatttccttcaactgaccaaaaaattaataagatgaggcaagtgaatgctgatgtatggcaatgggaaatcaaatacatttttttaggttgatggctgggaaatgcacagccttcaccataaaggaacatacttctagtaggaagttatcagctacaaggtggatgagttagttactctgttcacactgggaccaaacacccgaccagcacaacttaagacaagggtttcttggcacaccccaaactttcctttgagtcttttaagtctctatgactctgtagcttcttacaaacatggctgctgaactagcaccatgttgctgatgacacaaaggtgaggaagtgcttccaagagatccagctgtaaggcattttctcaaatagtgattaagggggaaaggcccattgtgggtggtgccatccctgggttggtagtcttgggttctataagagagcaagctgaacaagccagggaaagcaagccagtgagtaacatctctcatggcctctgcatcagctcctgcttcctgacctgcttgagttccagtcttgacatcctttggtgatgaacagcaatgtggaagtgtaagctgaatcaatcctttcctccccaacttgcttcttggtcatgatgttttgtgcaggaatagaaaccctgactaagacagagtccatgtgggctgcagtcaggaaggctgtggattagagctgtccagcccttccttagaagcctgtatcacaccaagaaatgtgccagatgccaggcatgatctgcaggattatccaattgccctctggagtttggtcttgctgtgtctgtgccttctttcaatgtgctcctcttccttcttggaatggaaatgtatagcatgttccactgctgtgtgctagaactatgtctttcatttttgcttttacagaggctcacagccaagagttctgcctgagtctcagagggaatttgaacttagaattttgaaaaagattaaaactcttgacactttggggattgttagacatggactaaataaacttcgcattgtataatgaacacaaacctagagggatgaattggagtgttctctacaggagcagaaccgatagaatgaatatatattaaatgagagtttatcgggttactgtacatgtgtaccagtttgggtaatctaacaatgactgtagccacactggagaaagctgaaccagtagatgttcagtctacatagttggacgcctcaaaagtccaaatgtagggctgagggtctggaggattcctgaagagccacccatcttcatcttcttggaagcctgaagaggctcggttctgatatcagtgaagaaatgaagcagcaaggtgataaatgaaccgagcagtgtaaggtgggaggccatgaggggaaagtgaagctttgtccccagagctccttttatctgggctgcccagccacatgcaggatagatctttctacttcacatcacctgagcaagaaaagcccttcgaggtgtgtccagcagcttacttctcggtttcttccagtcaagtactgacacaagaatcaaagacagaatgtgtggttggagtctaccatgccttcccaaagctcctgtgtggaagcccactactgcagatagggcttagaggaatccattggatcaggaaagctctgacttactggttgcatctatccactcatggggtcataatttgagagcacagttgtgatggttgagatttataggtttgtgcctagtgggaggagctgggctgcctgggaggtgctttttgaaggacatattttgtttctggaccccatttgtctttgttttttcttcctggctaacagaggtgagtagcattctccactacatattcctgctgccatgttgttcagcctacctcagtgttggagccaaaggactatggattaaagattcttatactatgagtcaaagcgaaactccctcatacaaaataaagtagtaaggaccctgttttcctcctcctgggttgccttctcctgccttgatgtgatggatggcatgtgtctagtctcattgtagcttgttatgcagtgtttgaatgatgtcccttggaagcccgctcttttttgaggtgaggcagggtgggtggatcttggggaaaggagagattgaggagggaggaagctggggagaggagagggaagggaaactgttgtcatgatataatttatgagagaagaattttaaaaaatattaaaggtcctaaagaaaaaaaaaaacaagaaaacagagagatatctataagaagaaatctaaaataattaggaaagttcttgagctacatgaaagcatctcaaaagactgacttaaaacttaggtctggatttccaaatacagcagatcactcaaacaacagaatagaaacagctgaaaaatctaacaaagatctattacagaagatcaagtgaagggcgtatatatgtacgtatgagaaatgatacagaaaagttctaacaataagaatggaagaattcctatgatccacacagtaagagcttcagccatcaggacagaggagacattaacacggtagcgtttcataagcaaaacgaaactgcacattgattcagaaacaattaggggatacatacaatgcgatacttatatatcatttgactgttttcagaaacaacaacaataatcttccttatttatttcaatattctcaaaagtttgcttcaaaggtccaatactcaagacagtatttttcatttgataaaatgctagtattagtagttgtgtcacatgcttagattcctcatccaatgaaatgtgcatatttaaagccaagtgctttcttactttaaacgtgttgctttgggtgttgctgaaaatagtatacagagttgagtacatactgaccttggtcacagcaacttttcttcagaggaaagcttaacagggagtgtactgggtaaaagatgggaccaggctgtctcatactgcagtgggaatgtgaaaattagcctctatcctggtggtgatctgatggttcaagaagagaccctggtgagttctgctgtgtagatttggacgtaggaaatgtttatgaaaccggtgtccttataccagttaactaggaaaagtaatcaccagggacagaggataatgactgacattccttgttgccctgaatgggcccgatctcctctgatctcggaagctaagcagggtcgggcctggttagcacttggatgggagaaacgttgaggcaggctagagtgcaattcccaacactggcccattgcttagtgtttctgagttccaagctcctcacttgtgcctgactcatttccttcttccggataacatgtctttctctcttgctttagaatcccccagtgctatttactaccttcaaaacttcttttgaccaagcacttgccatatacactaaaactagctgtactgtgcatggctttcccaaaagaatttttcactgaagacaatgattctcacccttcctaatgctgcaatcctttaacacagttcctcatggtatggggaccccaaccataaaattactttgttgttactttataactgtaactttgctactgttatgagtcataatgtaaatatctgatatgcaggatatctgatatctcccaagggggtcacgacccacagattaagaacagctggtctaagagagcaatgtttctctaagggtcctcttagcaccttgacaggatcacacctatctttatagtatccctgtggcatgggtttatttatttaatagttgctcagttttttactatgtagacattaacactgacagacagaatggtccagccgcatcacaaagcaaggagagccagcatgaaacctgtatagaagaacagaagacatttttcatctaagcatgtccttcgctagctgggcatgatggcgcacgcctttaatcccagcactcaggaggcagaggcaggcagatttctgtgttcgaggccaacctggtctacaaagtgagttctgggacagcctgggtaatacagagaaaccctgtctcaaaaaaaaaaaaaaaaaaaaaaaaaaaaaaaaaaaaaaaaaccacccaaccaaacaaaaacaaacaaaaaagaatgtccttcgctgaggctgcaaaaatggccctggcgttatgaccacttgttactcttgtaaaggacctgggtttggttttcaggttccacatgggggttcaccagcatgctggaacttcatgtccaggtatctgaggctctcttgtgacctagaggacagcaggcatgcacgagatgcatgcacacatgcagatggaagcagatgtacacagaaaaaataagtaatcctaaaagcaaaagaatgtccttgataggccagtaaaagttgctgttgttatagcttgacacttagatctcgattttaaaaacaacatcctgtgggcaaagtgggaagtgtgcattttgaacctttctgctatagaatgaggtggtggtcttgcagacgcgctgatgcctggttgcaagctgatcacaagacaggtaaacttggttattctggaaaatgaataagacgcttgtcaatttaagagcaactggcctcattagtggctaacgatacaactcaagttctcaaggaaaaaaaatcatagctttgagaaacttctgtcacagaaatgtactttcccaaacactaaagattctcatgattaaataaaaaaagtggcatagatgatttagactcttgctattgagacataccatgtgtcagcactggacgctctgtggaacccaatcaatactttccaaatgaccaatgaatgccttgtgttggcatcggttcaagtgtccctggataagagattcgctaaaagaatacgaggaaccatggatctcattgtagcacagtgagaaaacaccacgatctcaaagacaggtcaccagtgatacatggcccctgtggaagtgtctgttagagaactaggctgagacaaatgcccaacaaaagtactacttaaaaaggttagaaacacccaaggtttataggtgttctaagggacagcacctcacctttgaaaacatatcagatactttgaacatgtatactgtgaacttgtatcaaaatttgtaagagctaatatttgtcacctaaaggcacaattctgattcaagacatttttttaaaaaacttttaaaacatattttttaaaacatacatttattctagttgtgtggtacatacctttaatcccagcattgaggaggcagagaggcagagacagagagaggcagagaaaggaggcgagggcaggtgcagaagccgacgaggcagaggcaggggcaggggcaggggcaggggcaggggcaggggcaggggcaggggcacgggcacgggcacgggcagggggcacgggcacgagcacaggcacaggcagaggaggcagagatggcagagaggcacaggcagaggcgagtggatctctgagtttgaggtcagcctggttcatatagcaagctccaggccagcctagtttacatacagagaacttgtctcaaacaaataaaccaaaacgacaacaaaacaataacaaaaatatttgtgcgcgcgcgcgtgtgcgtgcttgcgcacatgccggaggaaaaggatgaggattcttctggtcaaattcaggtcctcaagataagttgcaagtgccttcaccagctgagccgtcttattggccctcagcataaggatttcttaagcagtgaggcttaactctgacattagctctgctaacagctctttcctgactgttccatcatccccacgctgggaagcctgcatgcagttttgtaccctctacccatccctttgtctagttcttcctggctcacccaccccattcttttcctacttcattcctctcttacgggagtctataggctcattggagcatctgccccatttgaagtcacttttgagatgaagataaaggcacttgggagggagttctagaatttccccaagtcttcccaatagcccgtgaggctatatttggagggataactgaggctaaacctcacgattcttgatggtggtctcctctaagattttgagagtggtgtacaggaaagggcttcggacggagttcactagagctgactttttaaatcttacagaggaaactgaggcccagagatgcaaaggataggggccagcctagagagccagaaaccaaccactggacccaacccacagcctccacctcagagggccctgatggggagggaggaggcgggtccctgagagcgaagaagagtgggagggcgaaggaaaggaaggagggcagatgtgggagtgaaagaggcaccctcctggaggctgattggctctggaggccagctctctccacgaggtttataagagttagggctgcctggggtaccctgccatctctcccacgtcccggggagccactgccaggacctctgtgaaccggtcggggcgggggccgcctggccgggagtctgctcggcggtgggtggccgaggaagggagagaacgatcgcggagcagggcgcccgaactccgggcgccgcgccatgcgccgggccagccgagactacggcaagtacctgcgcagctcggaggagatgggcagcggccccggcgtcccacacgagggtccgctgcaccccgcgccttctgcaccggctccggcgccgccacccgccgcctcccgctccatgttcctggccctcctggggctgggactgggccaggtggtctgcagcatcgctctgttcctgtactttcgagcgcaggtgagtgattgacatccctgtccgagtctctgcggtgagttggggggtggggtgggggctgagtctggttctaggacttattctggaagggaaagagacccaaccccccacaaggaagggaagttgggggcctccagccaagctcatctcctaccagcgcagcgtgcagaagctgaactctgattctggctgaggatgggtttgaatttccccccattggccgctcccctcgtgtgcctcaagtgatcgcacgctttctccccaccgtgaatttttcacttggagttaagaaccaacttcaactcgtttagggaaagtggggaaagtgagaacttttacttgggcatctaagcttcccaatgccactaaccgacctgttccctgacactttgggaccacaacgtgtcagtagtctttggaagagctagggatgacactcacaattcatacagtgacagcgctatcagatgtgcccggtctcaggtctggggctctggggctcctctggagctcaggttctgaaaggtgaagggacagccccactgcgcctgcctaggaggtgggtggaggaaggaaggtgcctctctgtgtgtgtgtgtgtgtgtgtgtgtgtgtgtgtgtgtgtgtgtgtgtatgcgcgcgcgtgtgcctgtgtgatagtttagcctgaatacaatctagccagtaaccaacctttgaagagaggaggaagctccgtgctaaagattcagaacctcggggagatggcagagggaggaaggggtaaatttgtaatattatgctttctggtggtttgtgctcttgtgttttcttggaaattgcagcgcagttggtcgtattcattcaaatactcttgtctggtgctatgaattctttctcagaggaagtggggggctgactgtgcatatttttatgggaaaagaaagttgggtttggacttcgtttgtttccagaatccgaggtgattactaaaccgaactggatgcattacaatgtgtcattgcttggactgcataggtttttgacatgtgccaaagccttgagccgtactttggatcacgggctttgttaagtcttcagacctactggtttgcattttatcccatgctgtggttacccactaatgcaaaaacagacagaccataagccagtccttctgaaaaccagggtctccatgctcataatcacatgcagtacctgtagagattttcttcctcagacaaggtctgagtggtttgcttgcgatatgaatcacagaaatctgtatgaaagtgagtaaacatccacccccctttcattgggatacataggaatcaatgaagaatggcttatctgttgttttctgccgtctgccattttaatggatgtgtccagagaccctgcatagttcatgccagtatcaaatgcgatgggattggcttagaaacaactctatatgcagtccccgtgtctttctgtgtgtggtaccagaggatagcgtgtgcttccaaggaaaggctattgtaattctttgcaaagagactttaggccagaagatatgcagtagttctcagtgtcttctatttttttaagcctgttggggtcacagcatcttttcccagcagtaaaagtgatgtgagcactgaacttggaaagaagtgtggggtgagcacgttctcggggttcttagcttaccaggaaccctgggacttggcatggctgtggaggaatgagtcaccagctgtgttcttgtccagttttcctgaaggaattctatggtggtagggtgacatgagatgcctgtcactctaagggtatggtcaccttttaccttgatggcataaaaattgtacaaaacaactttttcccaatgtaaacacttgagatagcactcggagccaggtgattttcctctggaggatttaatgtcatcagaattctggatccaagcgtttgtcttctcttttccttcccccgccctcccctgcccccgtcccttcttctcttcctccatctcttccttcctagctagggtctcatgtagcccaggctgacctcaaatttgtcatatagccaaggatattatacctccaagatagtgtttcagatatgcatcacggtgccccatttatgtggtgtgatgcttgggactgaatgcacatacatagctttgtgtgtatgttaggcaaacactgtaccaagtacactgactgtacctctagtgcccggttgctgcaaggattgagtctctcagagacttacttaaaataactttagtcattattctgaacccaggtctgtcactacattgttaaaaggtcgtctccgtcaccagggtagttttaggaaaatgtttgaatattctgactgcatctcactgagtgtcgtatggcatccgcatttgacacctcaggggaccctagtcacttagagatacatccagaatcccttgcccatgacatgctatgtctggaaaatgctccaaaatgactgagtacgtgcaggcgttgggagatcttagcttatgcgggaagcgaggtctcttgctgttggcgaatggttgttgaggataggttttgggtacacaagggttcgatctacaactcttttcctttttatatattatggaaaccttcttttgtactttaggtattggtgttgactaggattctgttttctttttttaaagttcttttaagtttttaagttctggatgaaatacttggaattgaaatcatctcctatcagggaacacatttatactttaagataaagcaagccagatttattacagtttaaagacattgaaaagagacaatatgaattctctgaagcaaaaggattggaagttccaggccagcctggatcaaaacaaacaaacaaacaaacaaacaacaaacagaaccaaagttaaaaccaaagctaatgcaaaatcaacctgggtgttttagatnnnnnnnnnnnnnnnnnnnnnnnnnnnnnnnnnnnnnnnnnnnnnnnnnnnnnnnnnnnnnnnnnnnnnnnnnnnnnnnnnnnnnnnnnnnnnnnnnnnnnnnnnnnnnnnnnnnnnnnnnnnnnnnnnnnnnnnnnnnnnnnnnnnnnnnnnnnnnnnnnnnnnnnnnnnnnnnnnnnnnnnnnnnnnnnnnnnnnnnnnnnnnnnnnnnnnnnnnnnnnnnnnnnnnnnnnnnnnnnnnnnnnnnnnnnnnnnnnnnnnnnnnnnnnnnnnnnnnnnnnnnnnnnnnnnnnnnnnnnnnnnnnnnnnnnnnnnnnnnnnnnnnnnnnnnnnnnnnnnnnnnnnnnnnnnnnnnnnnnnnnnnnnnnnnnnnnnnnnnnnnnnnnnnnnnnnnnnnnnnnnnnnnnnnnnnnnnnnnnnnnnnnnnnnnnnnnnnnnnnnnnnnnnnnnnnnnnnnnnnnnnnnnnnnnnnnnnnnnnnnnnnnnnnnnnnnnnnnnnnnnnnnnnnnnnnnnnnnnnnnnnnnnnnnnnnnnnnnnnnnnnnnnnnnnnnnnnnnnnnnnnnnnnnnnnnnnnnnnnnnnnnnnnnnnnnnnnnnnnnnnnnnnnnnnnnnnnnnnnnnnnnnnnnnnnnnnnnnnnnnnnnnnnnnnnnnnnnnnnnnnnnnnnnnnnnnnnnnnnnnnnnnnnnnnnnnnnnnnnnnnnnnnnnnnnnnnnnnnnnnnnnnnnnnnnnnnnnnnnnnnnnnnnnnnnnnnnnnnnnnnnnnnnnnnnnnnnnnnnnnnnnnnnnnnnnnnnnnnnnnnnnnnnnnnnnnnnnnnnnnnnnnnnnnnnnnnnnnnnnnnnnnnnnnnnnnnnnnnnnnnnnnnnnnnnnnnnnnnnnnnnnnnnnnnnnnnnnnnnnnnnnnnnnnnnnnnnnnnnnnnnnnnnnnnnnnnnnnnnnnnnnnnnnnnnnnnnnnnnnnnnnnnnnnnnnnnnnnnnnnnnnnnnnnnnnnnnnnnnnnnnnnnnnnnnnnnnnnnnnnnnnnnnnnnnnnnnnnnnnnnnnnnnnnnnnnnnnnnnnnnnnnnnnnnnnnnnnnnnnnnnnnnnnnnnnnnnnnnnnnnnnnnnnnnnnnnnnnnnnnnnnnnnnnnnnnnnnnnnnnnnnnnnnnnnnnnnnnnnnnnnnnnnnnnnnnnnnnnnnnnnnnnnnnnnnnnnnnnnnnnnnnnnnnnnnnnnnnnnnnnnnnnnnnnnnnnnnnnnnnnnnnnnnnnnnnnnnnnnnnnnnnnnnnnnnnnnnnnnnnnnnnnnnnnnnnnnnnnnnnnnnnnnnnnnnnnnnnnnnnnnnnnnnnnnnnnnnnnnnnnnnnnnnnnnnnnnnnnnnnnnnnnnnnnnnnnnnnnnnnnnnnnnnnnnnnnnnnnnnnnnnnnnnnnnnnnnnnnnnnnnnnnnnnnnnnnnnnnnnnnnnnnnnnnnnnnnnnnnnnnnnnnnnnnnnnnnnnnnnnnnnnnnnnnnnnnnnnnnnnnnnnnnnnnnnnnnnnnnnnnnnnnnnnnnnnnnnnnnnnnnnnnnnnnnnnnnnnnnnnnnnnnnnnnnnnnnnnnnnnnnnnnnnnnnnnnnnnnnnnnnnnnnnnnnnnnnnnnnnnnnnnnnnnnnnnnnnnnnnnnnnnnnnnnnnnnnnnnnnnnnnnnnnnnnnnnnnnnnnnnnnnnnnnnnnnnnnnnnnnnnnnnnnnnnnnnnnnnnnnnnnnnnnnnnnnnnnnnnnnnnnnnnnnnnnnnnnnnnnnnnnnnnnnnnnnnnnnnnnnnnnnnnnnnnnnnnnnnnnnnnnnnnnnnnnnnnnnnnnnnnnnnnnnnnnnnnnnnnnnnnnnnnnnnnnnnnnnnnnnnnnnnnnnnnnnnnnnnnnnnnnnnnnnnnnnnnnnnnnnnnnnnnnnnnnnnnnnnnnnnnnnnnnnnnnnnnnnnnnnnnnnnnnnnnnnnnnnnnnnnnnnnnnnnnnnnnnnnnnnnnnnnnnnnnnnnnnnnnnnnnnnnnnnnnnnnnnnnnnnnnnnnnnnnnnnnnnnnnnnnnnnnnnnnnnnnnnnnnnnnnnnnnnnnnnnnnnnnnnnnnnnnnnnnnnnnnnnnnnnnnnnnnnnnnnnnnnnnnnnnnnnnnnnnnnnnnnnnnnnnnnnnnnnnnnnnnnnnnnnnnnnnnnnnnnnnnnnnnnnnnnnnnnnnnnnnnnnnnnnnnnnnnnnnnnnnnnnnnnnnnnnnnnnnnnnnnnnnnnnnnnnnnnnnnnnnnnnnnnnnnnnnnnnnnnnnnnnnnnnnnnnnnnnnnnnnnnnnnnnnnnnnnnnnnnnnnnnnnnnnnnnnnnnnnnnnnnnnnnnnnnnnnnnnnnnnnnnnnnnnnnnnnnnnnnnnnnnnnnnnnnnnnnnnnnnnnnnnnnnnnnnnnnnnnnnnnnnnnnnnnnnnnnnnnnnnnnnnnnnnnnnnnnnnnnnnnnnnnnnnnnnnnnnnnnnnnnnnnnnnnnnnnnnnnnnnnnnnnnnnnnnnnnnnnnnnnnnnnnnnnnnnnnnnnnnnnnnnnnnnnnnnnnnnnnnnnnnnnnnnnnnnnnnnnnnnnnnnnnnnnnnnnnnnnnnnnnnnnnnnnnnnnnnnnnnnnnnnnnnnnnnnnnnnnnnnnnnnnnnnnnnnnnnnnnnnnnnnnnnnnnnnnnnnnnnnnnnnnnnnnnnnatacacacacacacacacacatatacacacacatacacacacacacacacacatacacacacacacacatacacacacacacatacgcacacacatacacacacatacacacacacacacacacacacacacacacacacacacacgtttatttcatcgtcacaacatcatccgttagggatagttgcattttccaagtcccctgtttatcccctgtttgtctgtgtgtgtggtgctggggatggaacccagggcctccagtatggcagacaaatgctttcccagccccaaccttccttttacaatcagataactcaagatttagtgttggcaggtatacctgtaggtgtgactcactgtaactcagtttgctatgctcttttgtggaatgtgatttgatatgccttccagggaaagacaaggacagcttgtttgttctgttcccctgccccaccaacccccagtatctaacacaggacctgaagtactgaaagggcctttcaaatgatttgccaccccacacatctttccatttctactttactattatgcaaagtaagtgtctagtagctgacatggtacaggtcttcaaccgtgaaagtgctctatctagactgcccagtaccccagaacatgctgctgggtgggagctacatgcatttggtcactcaacactctgttagtcttgcccaccaaccttattccttgccccgccttccttccgcagactgtccttggttacctgtgcatttgcccctgcgcctctcaaacctccttccttccagggcaccggaaggagaaaacacatcgggttagagacacaaagcggctttctgacttgggatgcttaagaaagaaaatgagggaacaaagttaatggttgccgagtaatcattctttcttcattcacagtaaatgatgaggtcttaaacatcatggagatgtgacgagtggctcttaagtatattttgaatgaaagattcgacaactgaatctaacttaggcacgcgataaaattgtccaagggctccaaatgagccatgtttatttttatgtttttatttaagagagaaaagacaaaatctttgcattctactttttaatttgctccaaatcgtgtaccgttattaggtgatgcaacattgtgctaattagtgaaccttgctgtggggtggaggggatttacattcatgttcataccagaatagctataagagctatatgtatttgtttatttgacacttcgaagcattatttctcagagaaataatattttaatacagagaacatgaccttggatctagttaatatgcagctccccataagcccatgtaggtgattagctacatcctaaatactgacagtgttggaactgctgcttctgttagatagcttcaatttgtttgtgggatgcaagtctaaggaactttgtttagagtctccgggcatttcttaatgccacatggtctcttcagctcaggtcttatctggtaggaagctattgcagaattctgctttcctaaggtctgaacccagctatgattgacagctgcccttcagtgaaaactcacactctctgatctgtacttcttattgtaaagaaaatacatgaaatacgtacgcattgcaagtaattttgtttcgtggtatgacctcacctgtgctttcagagcatccttatgtattttagagctttaatgcttatttttttatttagttgtgtgtatgtgtctgtgtgtgtatgtgcatgtgtgcagacaccttcagagagaccacaactaggggtcagatctcttgaagctggagttataggcaacaaatactcctgtgtgtgtgtgtgtgtgtgtgtgcgcttgtgtgtctgaaaatatacaaaattttaaaaattatttttatttatgtgcattgttgttttgcctgcacatatgtctgtgtgatggtgtcaggttccctggaaccggagttacacagtttgcactgctatgtgggtaccaggaactgaaagagcagtcagtgctcttaactgctgagccatctctccaggcttagatgatccttctattggcatgactagaataataaaacatgtctctgtgtgcatagagaggggaccttttagattgtttctgaggattggttaataacggcatacatctttctgtgtattttaattaaatcaggaaaggagatagtttatttctgactgagctttagttattataaactttgcctttggtctagtttttatttactgacttctgaaaggaagaggacatgttaagctgttaaaacaatcaagttcagctgagtggtagtggcacaggcctttagtctcagcaatctggaggcagaagcaggcagatctctgagttcaaggccagcctggtttaaaaaaagccagttccaggacatcaagggccacacagagaaaccctatctctaaaaacaaagcaaaacaaaaacccaacaagaacaaactcccttttctatggtgatcgaagccaccgaaaaaccttgagggggcttgggaaatagaagacaagattctagaacagcactcgcagagaggctgggctgggtgggacaccttttttaaacccagtgtccagctagtaactccacggggatgtgttgggcaagacaatgcttatattttagtatttgctagcacttgcccagatagcctgcaggagtgtcctctccaccttagagtgatgagggatgtcactttaacatatttgtaggatccaggcctggagtactagctacatagtattcatcagaaagggaagttacataatattcatcagaaagagacgttacactcctggcttccggttttgattgaggtgcagatgggtttctcattcttttctttcactcatcaaaatactcatagattagggaagaagaccaatggcaacagtagctaaagattatgctaattttgcctgatttatgcaggcttcaagctttggttcttaaagtgggcttcatctccatgtggtttcatctagcattttggcttgtgtcttattcgtgtttatgagacagggtcttacacggtagccaaggcttgcctggaaaccactgtgtagcccaggttgtcttcatactcagtgttccttctgcgttagagtctcaaatagattataactatgagccaccaatctagtgtcatgagtcttcccctgcctgccgggatcacgtgtgatatctgcgatacctcttctagccacgaagaagttcaattcctgaaaattatacacgtacattttttgttgttgttaagaatctatggcctcatgtatctggggtgattgtcagctactcatcaaagtgaattagaagtcagtgtgtccagggcaggggaaatggatccatcaataatccttgtgatgggacatagagacaggagatcctgaggtcttgctggccagccagtctggtgagccagacagtgagctctatgttcaatgaacatcctcatgtcaaaaaattaaagtggagtgtggaacacactcctgtgtaccacatgtgcatgcacaggtgttcatacccattcacacatgtgtgcatacatacttacacactccaaaaagatgttttaatatgtattaaaataaaattatatatatataatatatatatattttataccacacttttttcaagacaatgtttctctgtgtaagcattctggctgccctagaactcactttgtagagcaggctggcgtctcactcacagagaccgacctgcttctgccttccatatgctgggattaaaggtgtatacgaacatgcctggcttgaggataattttattatcaaccactggaggatagaaaagtctaagcatgacccttctcttatcaagtcacagttcattaactataacccctttcatatcctttcccctcgtagatggatcctaacagaatatcagaagacagcactcactgcttttatagaatcctgagactccatgaaaacgcaggtttgcaggactcgactctggagagtgaagacacactacctgactcctgcaggaggatgaaacaagcctttcagggggccgtgcagaaggtaagtcctccctgacgtcgtaaagtcaagggtcttgatgatgctacagtaactgaatgttaaggcttgtgaagggctaactaaaaaatctatatttcatctctgctaccccagacccaattggcgaagtgacccactaggtccactttcctggattcttacatgctggcgggcctttaggtttcatctttctgcttctcagtcatggccattctccgtctctcccgctccctctcggtcccttgcccagaccatctaaaagtcctgcccagccttcctgcccagccattggctgtactgtggcaattctttattatcgattgaagctagctgagggcagggaccctcaggtctggaagctcagcttttgggagtgaaataagacaaagcattagaatcagttcccaaccatgtggtgagagggaggggtccggagcaggagatatagtgatgtgcgacacgggtattctgtgcttctgtctcatgttctgggagagctgggccacaggagagatgggaatggagaagactggtgtcagcagctgccaccgagagaaacatacctgcctgtcagggtttcctgagcctcctgggaattctgctgccccagaactagagtacttactgactccaccaaaaactcggtaggagtccagtgctcagtgctgtgtgtctgggtgtgaacccatgcgctggccctcccagcttccagatggctactccttgctttgcctcatcatctcagagtaaaccctgaccgtctcaaagccattggaccttggatttgttcagacttactaattagctagtacaacccgttctagcttagctcttcagaggcatagtgtaggtctgacagtgtcagctaaaagtacaggcaaggtataatacttttaaggtaagtataacattttgaaggtgaggtttgcattttattagacttacttcgttgtgtcacatcgcccagacaatatgctaactaaaaaaattcaacgtgatcatcacagagtctacttgcatcttaatttcagagatgactaaaactgagtgtcgtagagttgatgaaatagatgttattgtagcaagcacaggaaggcgtgttgcttatggcagccttatctgcctgtgtgaatatatgcatgtataatttaatacagtatacaattattttaaataagtgaacacaactcggattaggggaaaaaactttaccagtttttaaaaagttatggctttccttggtctgggatgaacctcagtagtggaatgtgtgtttattgtgagtgaggctctgcattcagagtcagagcctggcaaactaggactaaggctagcgtcaacaatagagtcaacggcttctattaaaggcacatggttaccaggtgtagcccatgtctgtaatcccaaactgcggcagggggattgtgaggttgagattagcatgagttacataatgaaacactacctctgaggaagagaggaggggagggatggaggagggacagggggacagaggggggcttttctattaacagataataatggctcgctctcaagaggaattggactgtatttaattaattttgtacttgtttttgctatgctgtaggagtttacatgtaaaaaaatgagcaatttataaaatctttttaaaagctcaatgaataattacaataagccagtacatattggaatagcatgcacattattgcaatgcgccagcatgtgctggaggagatggctctgtctctttggaggcctgatctttaggagggagatgaatgtttcccaaaccttatcattacagttaaccgacatccatagggtgcaactgtggatggaggcactttgccagacctttttcttatgccccagaatgtactcttttatcctagtcaaatgaacggggtttttaccaaatgtattatcctttgatgaaaaccactggttaatgtgacgtccgagtaatttgccacagtaatcagatttctcatttgtcttggcaaatgctaaaaataggaagggtgtggtaagcactctggaagtagtgtgcacatcttagctttagctctaggagatactgagcgaacccaaagaacaattcaggtgtagctgccatcggctttgagagatcagcccatgcagcggtggcccaggccagacatgggtgcaatatcacgttataggcgggcagaacgtggtatttacccagctcgttgtggtcagacaagtaatcttgtttttccctcctttttttttttttttgtttgtggctgtgttttcttggctttatttcccctttagcacagaactctgaaaaccctcttactgggccagctctaccaaccacaatttataaagtctatcaaaacagtctatgacaataaaacaaacactagtatgaatgtggtgtctgatttgtaaagcgatgcctggtttcaattttggcagccttcctgggctcttcccagccagtcgggctggggcagagcggtgagttcaggcggtgaccaggactgccatgcgtggcaggggaggatgctcaccctagtccgccgtccgttttcactcagtggagagacatcttttatttgccaagtagagattctgggccctgggggatgtgactctacctgccttcagtgtgccaggttgttgatctccactccaggaccccgcctgtagaagtatttacaggtttgatatcgagtgctttaaaggataggaagaagcaaagcgtgggctgctgagggggtaggagaaagaggggggagggaaagagcccaagtccggccagagctcctgtgctctggacaggcggatgcgggagggctgccggacgctttccactcggcccctggtgggcatctaagccactgaccccactctacgaggggtggacaaggggcagccccccgataccagggtcccggggatacgggagagagggatgagggagagaggttcccacacaggcgagagtccttagtccggtctgtggctggagcacaggaagaccttctgatgggaggttagacatggctcattaggagaaagcctatcccatcatccaagcacagtgggccttgatgaacagagacagtctatgattttagagctttattgtagaaaggcagggagaaaggagagaaggcagaaagagagagagggactggccatggccaagaatgagagaagggggaaaggagagagagagaagaagggctagagagtaagaaagtttagagagagcgaggtgaaagcttagagagtaagtgagggagagagtaagagggagagtagagtaagagagtgagaggagagagaataagagagaacgaggaaaggatgaggagagtgagaggagagagagagagaggtggggccaagcagcccctcttatagtgggctgttttatcttgttgttgctaggtgactgggaggagtttagcctgaaggtcagaagcttgggacattgcctacgtgactactagccacgattctcctgtgggggctgtgggggcagtaacttcgacaggagccagggttccaggagacgtgaggaaacgcctaccttcccatgtaggtgaattatcccccgggttcagacctcagctcgactggagaccagcctgtctatgcatagcccattgctccacagcaaagggctattggctgctttgtctgtccgtttatttatttaatctatatgggtgttttgtcttcatgtatgtctatgtgtgtctggtggcctcaaaggccggaagaaggagcaagagcccctagaactggagttctgagcagccctgtgagtgctaggagttgaaccggggacctctggaaggacagccagtgttttgaactgctgagccatctctccagcccctgtgcttgtttttcaaagctagactttaaactgtgaactgtgtgtatgtgtgtgcctgtgtgcacacacatgtgcgcacgaattgtgtctatgtatgcttgccctgcttgtatatacagaggctggtagattcctcactcgctttttttaattaatcattttattcatttacatttcaaatgatatcccgttggctaacaggcaggacttagaagaccacgccttgcagcaagggaggctagacctctgtcttctacctgaactgccatttgcttgtgattcttgatatacaacacctatctacctccccacgcccacatagatacacacatagatacacacatatatggatcaaggattaacacaagcctgaaaggtttaggtggtcaggattttattttcttaagttcacatgtagggaactagagacagcatggcagggagattgaaaagtggatttaagaggaagtgtcaggaatgttgatggctgcctgctgttttcagctagatttcatagattgagaacatttactcaaagccagaatgttcctcattttgagtggttgttttcttttttttgttcctcatggaactctgatcctttaggattctaatgttgattattagaaagaagcctagtttaagaaaagaaagaaggaaagaaagaaagaaagaaagaaagaaagaaggaaggaaggaaggaaaggaaggaaggaaagaaggaaggaaggaagaaagaaggaaagaaagaaagaaaggaagaaagaaagaaaggaaggaaggaggaagcctagagacaggcttgtatatacatctttaatcctagcactcaggagaagcctggtctatatagtgagttccaggacagtcagagctaagtctcaagtaaatagatagaaagataagtgaatagatagatagatagatagatagatagatagatagatagatagatagatgatagaataaaatttttaaaaaaagcctttcccctaaatttcaactgaagtgaaatagaaatcactggaaatcttagacaggttatagctgcctggagactttggagttgttatgtggatgaaatttctcctaggcttcctagttacaaaagaaggatcaagggggaagtttaaattccatttactgcctctttgcttttgtgttcaagaatatgtgtcctatgagagtttctcacaagcccagaaggtttgagtttgggtcactggcattctcaaatcgagatgttagtcatgtagtggttttccagtagaatcccgtcccccctttgccaccgtggttttgagaattgcaaccaacctcagtcatatttagtgtgtataaaagctgtcttcatgggaaatctggagtgagatccacagagatttcctacagagccaaagctttgtacttacttttctcttgctgtgataaaacatcatgaccaaggcaacttacagaagagagggtttgcttgggcttccagatcctgagaagcaggcattcatgatgggctgatttacagccgggaagcttggcagcatgctgcagacatggtagtgtgtaccagatgctgagagctcacagtgtgagtcataagtaacacacacacacacacacacacacacacacacacacacacggaggggtgagcatgcatgatgagaatggcaggaggctttgaagcccatctccagtgaaatacttcctctagcaaggttgtcccttccagaccaccacaaatagtgccaccaagtgttcaaatgcaggagactgtgggggacattcttatttaaaccacagaaccatcactgtcattcactcaacaaaggctgatggtggtgtgtgctcaatctcagggaagaaggcagagccaggagggttgcaattcagaactaaccagtaagtgatgccaggggtgagctttgatctgtgctgtgggtgtcccaggatggaagagaaaattctgagtgggcatcttggaagaaacagagttagaagcattcacccgagaggagggtattcatgacgggctaacttcagaggtttaatggagcttgtgttgctaaggggtgggttggctcgtgaattcgaggagagtggcaacctgtggaatggatgggaatatgtgtctgggggctgtgttttacaatagctgcatcttcagtgaccttggggcccttgcttaagacctcccagtgccttggctagaggttctgccttgatagccagaaggatggaccccaggatgtcttcaaaccagcctaagtgctaagagccacggatggacagaacagcctttttttgtttaataaattaaatatgataaagaaaatggagttggttggtggaagggtggtattagaagctggagagaatcatctatatcagagatgatctgatatggagtgcctgttgagcttgaagttcaaggtctagaggaagcccattctaggaagcatcctggttattaagaggctactccagttcttggtcttggccttttgggaataccaagtggtgatcacagcaatggctgtggtaaacaaaacaaaacaaaacaaaacaaaacaccaatttaaaatgccaagggtaagactcttccagaacacgaactcctctccatatgcccattcagccacacctctggtccaccctctcgagtggacagcttagtcattacgtcaccaagctaggagcctgaggatggtttaactcttgcccaccaactcttccctgactggcggccagctgtggattctgcctcctcacaaaacatccaagcaggatgttacccgatgaataaatggatggattagggttcttgtgtgtgctcttttatcatttccggcccattttgtttagttgttcttccaattgtctctcaaaatgaagtgcaggcatttctcaaaacaggctcccactaacgcttgcccacctgcctgtgtaatcaggaggccgtcttggatacacatggagtttatctgtacaccaggtatatgcacccagattgggcctggctcaccataggtgagcttttcaaggacccgtgacttttatttatgcccccagtggcaggcatgtggtaatacaacttgaagcacaaagttaatgagtgactaacccatatctatcctgaattatgtgtcacgttgtgtatgggcagggttttcatcgctatgatgaaacaccatgatcaaaagcaagttggagaggaaaaggtttctttggcttacatatgagtgttcgtcatggaagggagtcagggcaggaaattagaagtggctagaacctcgaggcaggagctgataggaaaaacacagcagagtgcttcttactccctatgttggcttgctccctatggcttgcttcacttgccttctatagaaaccaagaccacctgcccagggatggtcccacccacacggggctgggcctttgatcactaattaagaaaatgccctacaggtttgcctgtaggtccatcttagggaggcgtttttttctcaattgaggttcccatctcccagatgactctgccttgtgtcaagttgacataaaacaagtcagcacatgcggctagtcacttatcagaagcaagtcatgttgtacactcataagatttgttagggttgtgggtctccagtatagtctgtttccagagggcagctttctctctgtagccgtgagcctgttaggggcttttctctggtggcctctttccattgtcctcctcagtgtctgcagcggctggtctgacatcttggctgccctgggactcctactcatagagtatcacgaacagggctgggagactgtgaaagccatccttttgtgaggaggcggtgtttggtgatgtagaaagctctgctagttagtgtatggctggcattcttgttgctgtggacacagcaaagcaaaggcacgccacactcctccgttgagcccctgcatacccctcctcccctttaaaaatgcgtagcataatagaagacactttaaagttgggcttttacgaagactaataccgctgtcataaggcatttgctaaatcaaagcccaaggagacctttaaccactgcagaagcttcctcatttaaaccatgaaggttaaacaataaaaactaattttctattcccagagtacccattgcccttccaggaaaagcatcactcttctttatgaaaacaagggacgcgtagctcctcgggcgggctctcggtgtagaaagtacatcagcagttgtagaacgtctcttctgctcactcctggaagaaatggtacccatgtggccgtcacggccaagttcttcaccaggagctttcaaagacgtccatggcattggctcagagagcaggaggaggtccgaccctcaggttcagtgggttagaaaccccttctgcctttgccctctccttcttttcctgagctgctggacttcatccctccctcatggggatggtgaggagttgtgttcattctgagagctctcccggggctaaggtgaggggcatctctggtgacagaagagggctctacagtcttagctttggggactcaaggactccacctaaggacctgcgccatcttaactaaggacaaataaccatctctctctgggtatgagctttagggtcagggagagccgagataaggattctaagtcctgctctggcaggggttgtacagcgacacggtagttgctcttccagttcttggaggtgaaaaagctttgtgcctaaagatgactcactgcaggtaccactagggcattctggctaggtacaagaccaaaccaggaacgatacaccttgcaagtcaatggggaaccaaaacagaaacaatattccttgcatgttaagggttctttttgcatttaaggcagttaaaaataagttcctgtttgtcctatgttaagcccttgcaaattaaggtttctatttgtaattaagaataggtttctgttgataagttatttctccgctggtcaaatgagccaattccagccagattagattatattaaagaaaggtttgttgggaagctactcttgggcgagttctctggcccctgggaaggaggccagggaagtcgccattggaagagagagaggagaggggggaactaaagagagaaagtgtgcatgaacagagagaaggggagagagagagagagagagagagagagagagagagagagagagagagagagagaagagagggaggagaacaaaatgtgtggattatatagagaagagcccctaagggaagggcagcccagcccctgggctggaaagttcacggttgggggcagagtatgccagctagggactgagggatgctgggagaacctggaggccaggtctgctttggtgtgtaagataagcatctcagtcccttgacccaggatctggaaccaagcacccatttcttaaatctgatgtaaactgcaaccccgtgtacgtgatgtatactgtaccctcgttccatccctatcattctttctaacaatgtatataatagccaactctcacccctgtgaacaccttacctcttcttaaaaaaaaaaaaaaaggaatttcatgaggccagcaggggctgctctcttgaatcctgagacttagggtgagtcatctggctgacgagttcgtggtgcatcccaaactacagcttgcttgctttaattggacaatcgtggatttggtcttttctcctcaagattctcaggtttagcaaaaggagcagcaggtatcaatggtgcccatgaatgggaagccaggttctggcacccggcaccatcagaagcagctccacacagtactgccggcatctacccacagtgctgccagcatccttgagggaggaggtggcccacaggggaggaagagctatgaagccaggcagtcagctcagttaacagcttattgctttctctacacccaaagacttcagatagcaagtgttccagttttccccttgaccaaaacagtttctaagtcttaagatgtggaaggacagtgggatacgccttgcaaaattcctatctcctaatcgtgtacttggttgctttggcaaccagctcccatcccttgagttatctcattggcatgaataggtctggttgaaaaaggtttatgaataacagaagatgctcctatcccccctctccctccctcccttcctccctccttctctctctctctccctctccctcttcctcctcgtcctcgtcctcctcgtcctcctcgtcctcgtcgtcctcctcctcctcctcctctttcttcttcttctctctgtctctctgtgtctctctgtctctctctctctccctcctcctcctccttctctctctctctctgtctctctctctgtctctctgtctctgtctgtctgtctgtctgtctgtctgtctctccctctatctatcttgcaatatcacagaggcccagtcgtgagggggccttataaaccttaggactgtacttgttcctgaagtcaccaagtgatttcaagaagaggagggacaagttccccttgtacttaagatgctttttcctgccaccatccatgcatctgtctgtggcacaaagactgtgagattaggtaggaagaggcaattgtcttcctgaggagtgatgggatcttgatgctgcagcctgggccgggaggaggagataggatttctgagctatttaccaagtagaagtccacaggacttcccagcaggagtgggaaatggactattcatttccagaaagagccgggagtgtggcattcaagtgctaactggctgatgaatgcactattcttgtaactaggttggagaagaattacatgaagggtatcattaagatgttaaaatgaatgcattacatatgttaacaagtgtatgaaccctgtattatatctggcaagcggggtgttaaatccttgttcaaccagccagatgtccctgcagctgctgtggtattgcagagggaggcagccacctgagacccttgctactgactgctgcgatagtgtctagtgtcgggagcatctggctgtacaaattgcttctcccgtgatttgattgacaggtaccaatggatcacgtgattcctatcacagtccaaatgggatttcagactgataaacccagactccaataacttgaccttttacatggaacctaggcagctgggacatatatttttattatttagaaggatggtatccagattgcagtcaaacaaacataaaaccaatttaatcttatatactcggggtcttgttcctagtagttagttatttggcagtttgtaaaggcggtttagaaattggttggaagtgttgaaatccctagagccagccaaggactttcaagtacaactcagagtttggtatttattcttaccagtgtggcctcccataagtgggcccaacttctcaagatgagcagctatttcctgggtttggaaaaaaaaaaccaacaaaaaaccaaccctcctaaatcatttaaaaggccatgcaggggtctgaagggagctaggtcctaggagactggatgctttcgctatcacactcctgggaaccacactcttttggatgtcctgtttaagaaaagtcgcacaaagtcaagaccacagttacacaattgatcttttgtatgccgtgctccctggaggagagattgtgaaatcccagcattttttcctatgagttaaactacagttgaaattaagaaaaaaaatcaaatcagttgttttcatgtctctgcagatgtactctgacagaaaagatgaaaaaaattaatgtaatctactttgacagagcactcagtgttgaaacttccccattggaaaacctgggactgtcaattgggacaatgtccactaggtggcactgtgtccgaacatttatccttgacttggctgcaattttggggggggatgcccactttattcactttcctcttttccttctgtcttgttccctttccttgttctgttaaaggaagctgttatagttttggcctaaattatgcttatctaaaaatgaatacatctttttgaaaagactacttgttacagtttgaccataaattcgttcattaattcatggtatttcttattagctctcacaaggttaaagattcttgttgtcctggatagtttatacaaatcaagataggtgtgtgtgtgtgtgtgtgtgtgtgtgtgtgtgtgtgtgcgcgcgcgagtgtgtgtgtttcgcaggtagctgtgttctgggaaggcagattgttgatcttctaagatagggaagtcaggtagaaaactgggttttctagagcaaaacttgatagtgggatctaggcaaggggggtggtagggagggaagaggactctgctctgttccacactctaagatctgtccaggcttctgggatgtttattctatgcgtttcatataattctaaaggatactacaagggaaaacttggttggctgaaaacataaggcgttactatgtttcaatgtgtgggatagaaatgtaactctttgagtggacctgactcatgaaaacactcatttagcaatcccgtttctcaaagcatgctgtgggttagagtccaccttacagcatctttggaaaatatcagtgcgatttgagaccaatggctgtgagttggaccagggcgactccaaagtttccactgaattgcagctgtgtcccccagccggaaagcatcaagttctacttagaagacatttatgtgtgcatgtgaaggggtgcacttgtgtatgggtgcgtgtgcgtatgtgtgtggaagccagaggccactttggggtattgttcttcagaagccacacacattggtttactaggacccgtccctcactggcttgaagagtgacgattagcctaggttggctgtccagagaattccaaatatgagcttgtcagtgctggggttatgcactgagcgctgagatgacctactgagtgctggacctacctaccaagtgttggtatgacccactgagggctgggatggcctactgagtgcataggttaactactgtgtgctgggatgacccactgagagtgaggattacgagagtgcaccaatgtctagtattccaggttctcttatttttaaaatccatcaaacaaacccccactggttccggggatctaactcgggtcttcttggttgcactacgccaactgagctatccttcagctaagattacgttttattcgtctcaaaacccaaagacagtttaaaatgatagatttactagaatggattgccctcaaatagccatttctttggggttcggaagattggggtagagacatacatgctgagtattgtgtctgtgtgaccagagctcacagagtcatcataagatccctttttggtattgaaacttcctttctgaatgtctgagaagaattacagttcttgggttctctagagatataacacaaaggcatcacctccctgggtctctaacgagcgctctaattcatcctgggacatgaaccctttcttcccctgacagcaggcattgaaagtgcttctgagaggtgctatttattgaattttcttgtaactaaatgggtctgtggcagctctgacctagaagccactgattaaatgggcaaggaaagtgcgttcacagtggagagggagaaaaagacccctgcccattaatctggggcttcagcctgctgcttggtctgggtctcaagctttaagatcatttcctcatttgcccatgtagaaatcctttcaaaggggatttgtcgatctcagtagagactgcagcagcagctgctagtgtgttagaaattcaagtcagagactccagcccaggcttcctggatctcagacgacctgatcctgcagctggcacctgcctgccctcctttaggtcagcatgcaccaccctcagttttgagtgtcactgccctggccacagtgacatttttcttgatttttttttctatgatgaggtgtgtgtgtctgtgtgcgtgcgtgcgtgcgtgcgtgcgtgcgtgcgtgcgtgcgtgcgtgcgtgcgtgcgtgcgtgcgtgtgtgtgtgtgtgtgtgtgtgtgaatcaagcaaaatcagaaaattccagaaattgggataccattgggaatcccaagaagagaactgtggactagaggtcagcaggggtggggaggaaaaggaaaccaactaagagccattgctttgtctaacgcaagaagccaccatctgcttaacattccctacagtgggcttcaggctgcacagggacccaggggtaggccaggacagaggctgaccttatgtgacctcagtggtatctctaagagttatgaaaaacagaatagattcttatcttctttggggttgtctgaaggcagagagaacaataaagaagaataaaatcttatctctcattgccaagaattgaattcatgtcattttacctacccatttattggtctgactataaggagtataaggctgaaagcctttctgtctacatagggaaagctcttgctacgtgatctattctttagaccttgtggggtagtaacagtcggcaggagtatttatcccattaagtgtgaactgggactccatcttgtgttggtagttccaggtatctgggtttactgggcactcgggctgggtgttcacctatattacctcatctaaccatcctgactggtctgctcttgaagccatgatctgaaccaaggcaagactagagcttcaacaggctctgccttatgggatattttgttagctaacgtctgaattgggtgggcacatggtcacttggtagaggcttcattctgggagcgcaggttaaatatgcagttatctactcctatgttcttatactcaatcgtcatctggcttatgcatctagacttgtttcctgcagtattttaattattggcattctaaaagcttttagactttcatatagtactttaaacacactgacttaaaaaaaaaaaaaaaactactgggagccaggtatcattctcttacttgtgggctgagcctctgcatcataatagaaactcactactgaattccatagaaagaggcccactggagtctgaagagaacaatatattttatatacacttcatttccatttatgtacctgttatatattaattatgctcagttgttttgttttataatttaactttgtttccttttattgcctcaaaggatttgtttggtggtggtggtggtggtggtgatgtgtgtgtgtgtgtgtgtgtgtgtgtgtgtgtgtgtgtgtgtgtgtcggactttttaagcattttgggagctcagatgctaggaatgtgcgatccaggaattctgttgcctctcagcttctggcttcattttaaagcatcctaactgattttgcatctggtagtcctgcgtaaatatatatatatatatatatttttttttttcccgctgctttacacaaagaatgagtttatgaatacagttctcctttatttcaggaactgcaacacattgtggggccacagcgcttctcaggagctccaggtaactatgagtaatttgaatgagtgtttgaagtcctgtatgggtggtagtctttaagctcatgaacttctgtcatccccagctatgatggaaggctcatggttggatgtggcccagcgaggcaagcctgaggcccagccatttgcacacctcaccatcaatgctgccagcatcccatcgggtaagttacatttccacccagcctgagaacattgtttcaatctttcattcttcggccagtggacttactcaaaccttctaaaccatgaggaggaggtaaacccttcagttgaaccctaccttgccaatcctgtcacatcatccctgtattcactctcagggacggaagtgggtgtttgagctcctgccggttggtgggtgtaattgctcacagttcccatccagtttccctctgaagtagacgaatttgatatcaaatggatcccccacttcctactttcttggtggatggctgcagtcaggaagccagagacatccccatttaggaaggctgtgtgggggctagcaggtgacagcagtcctctggaagctgagacattctgtcccctttccttatgcttatcttcccagaataagtatttactttattagaccagagacctagttacttttgaagatgaggacccagagctgtgtgcccgtagctacctcagtgtgctaggtagtcatcacagagccccactgactgctcactccgagctaggcaaagatgataaagattacagagagcatcatgggagagtgatcactgagcctcagtgttagcaccactgtggcctgcatgccacgcacctccagtggctgaggtgtttcagtgtgtgttcattccctctcagcctcactgcaaggtagcagttaccgttcagattgttcagctagtaccacagtgcttcacacagtttgccctttgtttgaggtccctgtggttacaggaggagaagctgacattcctctctacttaattcccagatcggtgccgtgcattatcctagacgcaggcacgtgtgctaggatggctttgtcagaaggcagttctccaagggtcacattacttttgctcgaagtagattagtttggaaaccagtgaccgggctctaatgtctccttgggcctgtgacctgcctgtgaccttgtatgaagtactgcaatctgcgcctcagtcttcataaccagggaggctctgtcctttttgtagggcggctatacatactatgtttcggggtggggagggaccatattacattcagtagatgtgatctaaaaattactatttgaacttaattaagtcattatgtaaattccactttgtttcataaatggcttaaggcagaattttctcctttttttctgagtttaaactttctgagtcttttaaataatacaaatctatcttttaataaatagttttgagccattattatagcataggccatagcgatatttttttcctgatgggagatgccgacggtgagaaatcacctcttgagctgtcaggagattctctaggctgcctgctctgatcctctggatagttacttccatagacagggtttctgtctgcgtgggcctggtggtgcttcactaattttctccgagtggggaaactagtttgcatgttcacaacggcaatcaaattaataccagtgtgcgggctgcgtgtgctgtgactgtaccctgcatttatcttttcagttcactttaaatggcataggataaatattgcctaagagcgtgtgccaaagtcggcttggcaaccgcaagcatgttttagttataaagctccctctgcaggcacctagaatctactcagcgccaaaacccaggcaaaactcctggttctgttccgatagctctttggtttaggatgcagggaaacgagccactctatgcttctgtttaagagaatagagttagttgttctgtttgggccaacagcccctctaaccccttgttctctcaatgctggccagtactgaatgattcagaggaagctggctctcacttgctatttttattttggagcactgttatatatttatttacacaggaggagacagaacctactgtacgtggactgttaccttaggaggttttaacgtttttagagtaaaatgcactcggaagttcttgggggtagggtcagaatatataatttttcttaggaagctgttgcaggctaaatgtttgctgaggtccctttccaacctctagcagctgggagcccagcagagagctgaggaggtcagccagactgggcgaagaggtcctcagcgtgcctcattagcaatagaagtcctggaaggcagggcagccctccgccctccgcacttccgtgttctcgactgttatctttggtgagtgcttttatccactctgtctagctttccagcctttcttctgcgggcttcgtgaactccccaatgcccagtagagtttctctcaccaagatgccccctctcttcgacattttggacgcaaagcttccggttttctagctcacctgtctgtcttctcaccaagctcagctctgctgagcatcaggagtctcttcagtttcgtttgggcagctccttgtcactgaagtcaaccctgttgttgacagcacgcagcaccggacaggccatctttatatgctcgctttccttacggtcagcggtaagcatcccgaggggctgctacttggggaaagtcttcattatggacgaagtgaattcttctgcactatgggaaaagtgggtgtccagaggaagcgccacatcaggtgtcccctgtcagatctccaggacgaaagaaggcttgagaacggggatggagaaaagcagagaggcatattatagcatagaggcttccactggactcgaagtggcacacgatcagggttcctgcctttcctcaccacgactgtgtattgcttttttgtcttccttggcagctcactccaatgtgagttagccaatcccatagaaagaagggacttcacactagtgatttaacttgtctctattaagagacacataaatagcaattgaatgaaatacaggacagagagaagctggggcaactatgggataatgtgagatggcaatatcttgaatttcatgagccttgcccatgggttaggtggctatctaccaggttggaggagttacaatgtcagcgcttatgtagtgagcaagcttttctattctcatcttgactcacttgggaccctagggtcatgtttgtatttggaacatttgactccagggagagctgggataggatctaccatggcaaaggagaacaattgctgcccagagcctgaaggctggtgactgtagcagccctgctgtgaagtctgagaacacacctgtcctctttggaagctggaactattgtttccttggtcatgtaatgatgggttgtcccactgtagaatgaaaactgcctcatctcctccctcccactttttctgttacctgttgttcagtctgctgtagcttgatttggaggtcctcagatcaccagatccaagagaccatagaccatctctggttcatcctctgactctctagagaaagatataggtgttcaagtcttcccaggaccaggccatagtattccttcccataaaccgtagcataggtggtattattgctgctgctgttgttgttgttaataaaaggatctccttggatccaccaaaccaaagagttgtcctttcatgagttggaatctagttcatggggtggtggcttcaatgtcagtctcagggctaaattatattatttaaaaataaactatatttattttaaaataaattatatttatttttaaataaattatatttattttaaaataaattatatttatttttaaataaattataaaattatttatgtattgttgtataaagcaataggtttcataatggcatgattgttcaaatatgtcatgtattttgatcttatttactttccatcgcactcagtcaccaatactgccctttctttttgcatgattgtggtgtgtaagtgtctcctagtttccatacatgagcaagaacttgtagttcttgtcttctttggtctccctgactgacttctgtcatttactatctcaagactaacaagttgaagacaacatggcacccaacatttttttttatgctactgaaacaaattatcctctgctctcattgtctgagacctgtctgtgttttgacttgctgacatcagagaggtggcagtgttagtttggtaaaaactcttcataaaatccctagggaaaagatgtggtttggacctttccagagtcctgtaaactctcacctatcagttatcatgtttgccagtagaataataaatatctgcattggtacacatatggaatagtttgatttattacagaggaatcaccaatttttttttaaaaaattattagatattttcttcatttacatttcaaaaacccagttatacacatcaaggacctgggctatgaacaccattgggcgcacagctgatttagaaggctctgtagaactttgacttctccaaaaacagtagcaaggaagccctttgtcatttcattttgtggaccagaaggggttgtaggagaacatggaacttgggagtgactttacaatgtgtgaatgcaattgcgtgatgctgaggagctgggaagcttggagcttggtggcttctggggatagtcaccgagtcatgtgacccaggctaaggtggggttaccagatagtgacacaattggaggttggtctccgcagagcttctgcaacccagattctcacatccctttacacaccccccaccacaaactaaataaaggttagctatacgaaggatggaaggaaggattctcttcctatacaagttggtttctttccaaggtgaagcgactctggtcattaccctctttcaactaggaatgaattgctcctgtccacggggcttaactttcttctttttatgctcggtagcacctacatggagtcagttttgatccttttctgtgggaataatttgcattctctccctctctccctctctctctgtatctctgtctctgtctcccccccccccataatcatagcaattctctgtattttccccaagctttgctgctttcctggaccatgttgctccatcactagtatcctatagcttaagggcaggatagaggatttttagttttgtgcctttacagtgcctgacagaatgcactaagtacatctgcatgcacccaggcccatatagaaaatgagtatcaaagtaagttattgtgttggaataaggattgttatgttagtgtatgatgctaccccaccagcctgtggaaataatgaggaacttttctcatccaagtagtggattctaaatcctgtgcctttgtttctctctaggttcccataaagtcactctgtcctcttggtaccacgatcgaggctgggccaagatctctaacatgacgttaagcaacggaaaactaagggttaaccaagatggcttctattacctgtacgccaacatttgctttcggcatcatgaaacatcgggaagcgtacctacagactatcttcagctgatggtgtatgtcgttaaaaccagcatcaaaatcccaagttctcataacctgatgaaaggagggagcacgaaaaactggtcgggcaattctgaattccacttttattccataaatgttgggggatttttcaagctccgagctggtgaagaaattagcattcaggtgtccaacccttccctgctggatccggatcaagatgcgacgtactttggggctttcaaagttcaggacatagactgagactcatttcgtggaacattagcatggatgtcctagatgtttggaaacttcttaaaaaatggatgatgtctatacatgtgtaagactactaagagacatggcccacggtgtatgaaactcacagccctctctcttgagcctgtacaggttgtgtatatgtaaagtccataggtgatgttagattcatggtgattacacaacggttttacaattttgtaatgatttcctagaattgaaccagattgggagaggtattccgatgcttatgaaaaacttacacgtgagctatggaagggggtcacagtctctgggtctaacccctggacatgtgccactgagaaccttgaaattaagaggatgccatgtcattgcaaagaaatgatagtgtgaagggttaagttcttttgaattgttacattgcgctgggacctgcaaataagttctttttttctaatgaggagagaaaaatatatgtatttttatataatgtctaaagttatatttcaggtgtaatgttttctgtgcaaagttttgtaaattatatttgtgctatagtatttgattcaaaatatttaaaaatgtctcactgttgacatatttaatgttttaaatgtacagatgtatttaactggtgcactttgtaattcccctgaaggtactcgtagctaagggggcagaatactgtttctggtgaccacatgtagtttatttctttattctttttaacttaatagagtcttcagacttgtcaaaactatgcaagcaaaataaataaataaaaataaaatgaataccttgaataataagtaggatgttggtcaccaggtgcctttcaaatttagaagctaattgactttaggagctgacatagccaaaaaggatacataataggctactgaaatctgtcaggagtatttatgcaattattgaacaggtgtctttttttacaagagctacaaattgtaaattttgtttcttttttttcccatagaaaatgtactatagtttatcagccaaaaaacaatccactttttaatttagtgaaagttattttattatactgtacaataaaagcattgtctctgaatgttaattttttggtacaaaaaataaatttgtacgaaaacctgcctggtgctttttgttcttgttcgctttcgtgtgggtcttgctctgcgatcctgttctttccaatatgataatgtggcttctatctttctccaaaggttactgggagaagtgcagatttaattaaaaactaggaacagattcaattaaattaatgaaccttggaatttgaaaaataatttgcaggggatttgtatgcaaggatgtagccagagagaaaacagacttttcactcaaaaaaggaaaagttttctctcctcaaatcatgagaaaaatatggtgctttgagctggggggaaattggggcttgctttcccttaccgtagtaaaggggggctcactttggcctggacatgtttcctcttggaaatcagtgtggatgagctgtctaaaccacgtcgattactcatgaagggcagagaccagaaaacagtcagcttgggaaggcacagcaagccattctctgagatactcgtcactggaagataaatgttttaggatgataacaacagcctagaatagagggagggatagcagatgttacagagaagaaaccgtaaattttaaacagcggagctatcacggtgggactcgatggtgttggccacatacacggactattttacatctgtcagtaaatctgagtctgaacagtgcaaaacgtgacttgggcactgtgtatcccgacagctgctgcttgtttcaaggaagaatttcgaggagcagccgagtttctgcagcttccgcagacatagaattttgttgcggcctcatgagctacccagcttagagcctgctccagcagtttcggctcgctcatttcatattactttgtgcagcgtcagtgatgtgctagttacagtcccaggcaccatggctacgaaggcaggtctcccagccccaggctcctgttctagcgctggttctgcttatgttagatgtggcaaggagcatgcgctgcttgatccaaatcttgggaatctcagagtctaaaatgaaaccgcaggaaatggaaagaaagtacaatgtgggcacagaatattcactattaatttttactgaggggtagcatgttagttatttttgaactgctgtgattaaaaatctaaagtgaacaccttaggggaagagaggtttattcaggctcaagattttagaggtttcgatcctccatgttggggagatggcggtgacagcggggcggtcaaggagcagaaagcatgcccatactgcaagtggctctgtccctcggtcctctcaggaaacgtccatgctgacatgctgtgccttcctgatcagtccagactagcagaccctcaacatcggctatccatcaagaataaccaacttgcactctcccaaagatgcaggggcaaagtgtcaggatcgcctgcggtgattcgtgggggctgtccaacatgtgaaagcaacatggcttcacatgatgccaagaagaacctccttggcagccctgggggattcagccacagtgtgatgtggaggataatgaacgctacgctatggcacctcaggtcggttgggggaggggagacaatgacttagtgacttatttagaaatcaaccagtgttttaaagtgggtaacggcagggatgggatatagtgagaggcaagaagccacctcgcttccggtcatgcctcagtttgccaggctcggagcagcatcttctaagtgggtttaaaatgcaggcgggaacacacagcacgtccctgcttccttctcttccttctgctttgctttcctgtgcatctctttcttgtgtctgccccctacgactgaaccctcccatcctccgcctgcccagactcccgtgtctcccatcgtcctactttgctttctgttgctatgacggaagccgcaacaaaagcagctagggaggaaagggtttatatggcctacatgtttcaattgcagtccatcggagagggaagtcggggcaggagcagaggcagaatctggaggcagacactgaggcagagtccacagtggagcactgcttactggctagcctgttttctgataccaccctggacctccatcccaggggtggcaccacccacagtgacctggaccttcctgcactaatcattaatcaagagaatgtcccacagacctacccagaggatgatccgatggaggtaaccctccagtggacgttccctcttcccacatatgtctaagtctgtgtcaggttgatacaatctggtcagcatactcatggtccttaggctgttgggtctccttgagatgaacgtatgtccctagagtatgtccctgccccgtcacagctgactcggtgggaggcatgacaaaacagtgtaggaaacctgtgtctagtggaagtaatggatctgagctgctggctccttttacctgcagcatgtcagccctcttaacctgccaagtctggggaaggagagcatgccaagtcccaggttatctgtcttcctgaatcaatttttacaaccacaccaggcccatgcatccaaaaactgacatgaagcgattcttactttagtgtgttagctttctccaaactgtctcgctttttgccattcatttgaaaaggaaaaaaaaaattgcaatggtattttgtctacagctataaaacaagcatccttttttactaataacgcacttatgggaattcttttgttcttttttaactttaaagatttactgtgtgtgagagggaatgagagagagagagagagagagagagagagagagagagagagagagaagacgaatgctctggaaccaaagggggccttctgatcccctggaactagagtcacaggccattgtgagcatctttacatgggtgctgggaagtaaattcagatctctgctaagtcacctctccagccctgtttttattttggtaacttgaaattctattcggggctcggtactacggcatcttaaacaacattccagttcttttgttttaattagagatggcctgagccaggagcgttggcatctgagcacagatgatgggcatcccagatcaagcaaagagcacaaatggcttctcttccagctttactcagaccgtcagtgtatcagatgctgcccgcccacactggggaagacagtcgtgactcagctgatcaattccagaaataccctcacagacacacccagaaatagtgttttcctgtctgtctgggagtcctatagttgttcagtggatctgcctcataaaactaactatcatgcgacattaaggactccgagtcacctgtaacataacttagaagaagtttgctattttagaaacccaaacgcgcttggacaatggcaattttacttctcaacttgatgggggttaccatggaaacaaatctctgatcatgcccctgagagagtatctagattaggtttgttgaagtcagactagacttgaatgtgggcagtacgattccctgggctgagttcatgcccaggtcggcagtacaggagtcattaggagcgtctggtccgtggggatgagatagaacagtgagattccatattaacccaggtttcacggctattagtaccagcatctgtttagctcagagcatgtaactcaggaggaagactggcagaatcatcaaaaatcatccagtcgctgaatgtctacccagacaacagagggcgccatgtgcctgtgagtcctgggctacccagacaccagggggcgccatgtgcctgtgagccttagacagagagataaagaagagcctttgcagggtgaattctcaaagtatccacgaagtcctgccttgaaactatgatgagctctgttgacctctgaatgggtatggctgctataacataacagacaaacttggtgggttagaactgcagaaatgcattcgctttacttctggattaagaggttgaaacaaaggcgtcggcggggccataacttggaaattctgagagccaattcttcacctctctggtttccaaggatccaaggagtttccagtaccagtcttgtttcaaattctgcctctgccccgtcttcacactttccatacctttgatttccagtcctccatctgagctctttattttattttatgtgtgggcaccagcatatcacaggtggagtacagaggtcagaggacaagttcttcggggagctgattttcaactcggtcctcgggcttcacacccgaggcctccacctagtgagccatcttaccagcctcatcttttctttcttataaaggaacagggcgtgacgtttagggcccaccctgacctcatcttcacatacagacttatgcctgcagtggctctttgactgaggaaagtcacattcacgagtcccagaattcataggctgtcgacatgtcttttactgggggcccttccacctactagactctccgaagcatcatgtctaaagtctcagcggctctgttgccagccactctcctctcctcccttttggggccttggcttgagggagggattgggaacgaagagactgtgattatgaaaataacaagcaaaatacagagcgatgcacatttctgtgtctgcaaatttctaaaaatgtggaggcaaaccccaggggaggttcacaaataccagcgtgtatctgtgttggagaggtgggattatgggtgttttcatcctgttgccacgctgttgttacaccgctattgaagtcggcagtaaggggcattaaacatcttttcaacataggaaagagactctggcttttggaacaatctaggttctgagcggtggccctgtgtgcttttgaagtggaatgcccaggggcttgggccgagcactggggagctggaatgtgaaggagccagctttttgagctggaagaagctctgattttgtttacagcctttgacttggattacattcctgattacaggctaaatatacctgtgggagtcgggctcagtcaccactgctgactgcatcactttctcccaagatttgccttccctctgtcttcctgattctaatgaagagattaggaagcaggatgcggttgaagaagggagagcagggccctgcatgcctcaagtgtctgtttaaggggctcagagttaatttttcaaagattactttgacagcttgttttctgccgtcaacagggagtaagcaagacagggacgaagataaattaattgaaatgttttcttagcatgtaactgtggcatggtgatttaatcaggtatgcatctttgtaagggattgttacaagaagctcagagttaaattgtatctttttggatgatacaagagagcttatggagaaagaattctttttttatagtagaaattattttgttgtacccaagttcctatcaacccaaagaagtctaacttggaagattatggtacttacagagcatctactggccttggaacagaggtaagcttatggcccgttagcactgtgagaattcagatgttctatcagtaaagtctgatgaaaggaagtaaactcctcagaattcactaaaggagcatgtagggacatactgatcaattggtggtagatctaagtggggattaatttaggggaattgccttatgtcaatatgggaggctgagaaattccactttcaaactttaaaattttttaaatttaaatgcaccatttatttatttataccccaaagactgcctctgattcctggtccctccctcacagagagcttctcgccataccccctccccttctccgctgagaggatagatttcctcctgggtataccccaaccctggcacattgtctctgccagattagcacatcctctcccactgaagccaaacaagacagccctgttgggttaggataccacagtcaggcttcagctttagggagagcctccactccagttgctgggagtagggggtgggcacatggaaacttagctacatgtgtgctgcatatgagccaggagttttgttccagcccatgtgtatgttctttggttgatggctcagtctctcccaggagtcccaggagagtcccaggagagtcccaggagaactcccaggagtccaggttagttgactttgatggtcttccagtagggttcctatcctcttcaggaccttcagcacttccctcaactcttttataagagtccctaacctctgtccaatgtttggctgtgggtatcttcatctgaagctgctgggcaaagcctctcagaagacagttatgctaggctcctgtctacaagcaacacagagtatcattaataatgtcagggattagcatatgcccgtaggatgggtttcaagttgggccggttattggttggccattccttcattctctactccatctttgtccctgcatttcttttagacagggcaaattttggcttggtgtccttatccttccactgagggtcttgactggctgtgttaggtggccacttcagattcatgtccccactgttaggcatctccactaaggtcacccacattttaaagctggggatgctgatagtactatttagttgaactcacaaggcctcaggattggggtggagggcatagataagagtcctacactctaaagaccaggtaaggtccagagttctgatatcagagggcaggggaggaagcggataccctagctgcaaaatggagagacttttggctctgtgtttgttctgttcagctttcagctgtttggatggtttccccattgtgagaggggaccctcctttcagtctcctttgaaaacactctcccagacatactcaaaataattcctcatcagcggcccacatgtgggcttcactctagtgcacatctaaaaaggaaccattgtaggcttaggctttcctctaaacctactttatttaggtttcttaaacatttcagcctcccttctagcccactgaccagaggtagaggtggggaaaaaatgaaggtttttaggaaaataaggatgtgaacctgtttagaagtagttctttgggggtgattccattctttgttgtcaggacacacaaatcattagcagcagctctgtccagcagaaactgcagggctccactaaatctgcatgagtcagcagaagatgcaagaattagccggaataccacaagacgctgtttggcatgtttttctctatgaactgaagaccagcaaagagttgtctggctagcaagcaaggaccagtgaagcattacgtggtgtagcaatgcaagaaagacctctccaatgtttgcagggttccatttatactcgttccgtacatcacacaccctctcacaagtctgcttcagccacatcctctcatgtgcctgtgcaatgaaagcagaggaactcattgtgtcttgttatttatttgtttgtttgtttatttatttatttatatttactttacaccctgagcccagtcccctccctcctctcttgtcagtcccacccttatatatcgctctccccattgcccctccctttctcgggaagccactcttgggtcccaccccaccctgtgactaggcacatcttcttccactgaggcccaaccaggcagtccagataggggaagaggaaccaatgggaagaaacagagactgaagactaaactacacatttgttacaagtgagtagggagtctagcatactccctggctggcaactcaggctctgtgtgcccccagggtcccaggtcattgtgtcttgtcaatgtttatagtcattgttcttattgttgttgttgttgttgttattattttagacaagatctcactatgtagctctggctgacctagaactctcaatatagatcaggctgacctcaaactttagacctgccagccccagcctcctgcatttaagtcacatatctttgcattcatcctattcatcgtctatagattattaaaatgagccatcttatgactgatatgccttggttttgtagggggctcagggaaagttttgtggtcataggagtccttagaaaatggactcactcagtgtcctggctctactgtatacagatcccgagttaatctagggctgacacatattttaaagtatccatttagtatctttttctgtgagcaaaggagagtgtagggggcactggtggcatcatttttgacaactccatttggctgacgggaacagtctaggtttggctcacacaggtgttcactgggatccacccagagagattaacagccacttttcattaggggaaaacactgcagagaactgtcatctgcctccctcaaatgtggaggactgctgggctgagagtgattgaggagaagcagacgttttactgattcactacatgcaggtcatagatgtgcttaaaatcaccgaagctgctccggccttgttcccatggggtacaaaggctgatcagcaaatacaactgcaggctctcgatggccaggaactggtaagagcagagnnnnnnnnnnnnnnnnnnnntagtctacgaaatcatgagcagctgaagagaggaaagaggctccaacagcaggtggggcctagatggacaggtgcatgtatgacagccaacagccaatctacaaggcttcctgacccggtcacatcaaagaccacagctccatcattctcaaagtcagaagtagagtccatagaaatatttccacagaaaacttctttgcactcaagtagagcaacttgactcattgctttggtgaagggagggactgtgagatctagggaggctaggtcactaagtggacctgccatactgaagggctttgaaactagccctttctggcctattttgtcatccaaggcaccgtgagatgtttcaggggctctgcctagcagatgttagcatctgctttaatagttctggtatctgctgtcgaatttcacgcatgttcatttctgttctcctttcccatagtgggaagatcacgtgacccccgtcttcttctaactggatgtccatatgtggtgacatgtggacaggagaactgagttcatagtcgaagagtctttgtggtccccttactttggtatcactatgagtagattccataaacatagcttcccgtaccttgggagcctgcagtaaatgggaccagggaagcttgggcagcttccctgtttagcttgttgttggtgacttgcattttatcttgagtgctgagagccgtgcctcttggctgtatactcccattagctgtgctatctgtaacacctctgatgtgtggtaaccatggtgacagctgttaagcagtgtttcagaagcttggaggctgctgcagcctacttcaaactggttggagccactgatcttcccgttcgacttgcacagttgtctgccttcaatagtacatccgattgccatatgtcaccaggttttgaacatgtgtcctgtgaagcgccgtggcttgcttatgtacacacagaccattggctacctacattttcccacactccggaaaatcttgttttctagtttccaaaacttctctaaactgtatctccaggaagatttggggtgttccctccttgtcataagtaaaactcttcactgccaaactggtcaccttagagattgagttgtagtgggtaaaacgaacatggtttgtcgggctttgtatcatgggtatgtgatgaggcaaatactgctgatgctcaatagacaggtaggttaagtaggaataaactgcatttgaatttggagtggctacttgtgtgactaaatgtttcctagggagatgcaacattcctatctactaattccagatagggagcccacgtacacgttcagtttggtgagccaaaaagtttatgggtgaggggttacttataggagcagaaacaactcagtgacagctgcgccaccaaagctcgtggtgatcacaaagcctggaaactggagcccacaggcatccgcaggctggagagtgtcctttccaggtgtttaaattgttcaaaacctctttcaggcagcttaactagtttctgctttctccag

SEQ ID NO: 62 - DNA, 2237 bp, Mus musculus
cccacgtcccggggagccactgccaggacctttgtgaaccggtcggggcgggggccgtggcggagtctgctcggcggtgggtggcccgagaagggagagaacgatcgcggagcagggcgcccgaactccgggcgccgcgccatgcgccgggccagccgagactacggcaagtacctgcgcagctcggaagagatgggcagcggccccggcgtcccacacgaaggtccgctgcaccccgcgccttctgcaccggctccggcgccgccacccgccgcctcccgctccatgttcctggccctcctggggctgggactgggccaggtggtctgcagcatcgctctgttcctgtactttcgagcgcagatggatcctaacagaatatcagaagacagcactcactgcttttatagaatcctgagactccatgaaaacgcaggtttgcaggactcgactctggagagtgaagacacactacctgactcctgcaggaggatgaaacaagcctttcagggggccgtgcagaaggaactgcaacacattgtggggccacagcgcttctcaggagctccagctatgatggaaggctcatggttggatgtggcccagcgaggcaagcctgaggcccagccatttgcacacctcaccatcaatgctgccagcatcccatcgggttcccataaagtcactctgtcctcttggtaccacgatcgaggctgggccaagatctctaacatgacgttaagcaacggaaaactaagggttaaccaagatggcttctattacctgtacgccaacatttgctttcggcatcatgaaacatcgggaagcgtacctacagactatcttcagctgatggtgtatgtcgttaaaaccagcatcaaaatcccaagttctcataacctgatgaaaggagggagcacgaaaaactggtcgggcaattctgaattccacttttattccataaatgttgggggatttttcaagctccgagctggtgaagaaattagcattcaggtgtccaacccttccctgctggatccggatcaagatgcgacgtactttggggctttcaaagttcaggacatagactgagactcatttcgtggaacattagcatggatgtcctagatgtttggaaacttcttaaaaaatggatgatgtctatacatgtgtaagactactaagagacatggcccacggtgtatgaaactcacagccctctctcttgagccctgtacaggttgtgtatatgtaaagtccataggtgatgttagattcatggtgattacacaacggttttacaattttgtaatgatttcctagaattgaaccagattgggagaggtattccgatgcttatgaaaaacttacacgtgagctatggaagggggtcacagtctctggtctaacccctggacatgtgccactgagaaccttgaaattaagaggatgccatgtcattgcatagaaatgatagtgtgaagggttaagttcttttgaattgttacattgcgctgggacctgcaaataagttctttttttctaatgaggagaaaaatatatgtatttttatataatgtctaaagttatatttcaggtgtaatgttttctgtgcaaagttttgtaaattatatttgtgctatagtatttgattcaaaatatttaaaaatgtctcactgttgacatatttaatgttttaaatgtacagatgtatttaactggtgcactttgtaattcccctgaaggtactcgtagctaagggggcagaatactgtttctggtgaccacatgtagtttatttctttattctttttaacttaatagagtcttcagacttgtcaaaactatgcaagcaaaataaataaataaaaataaaatgaataccttgaataataagtaggatgttggtcaccaggtgcctttcaaatttagaagctaattgactttaggagctgacatagccaaaaaggaacataataggctactgaaatctgtcaggagtatttatgcaattattgaacaggtgtctttttttacaagagctacaaattgtaaattttggtttcttttttttcccatagaaaatgtactatagtttatcagccaaaaaacaatccactttttaatttagtgaaagttattttattatactgtacaataaaagcattgtctctgaatgttaattttttggtacaaaaaataaatttgtacgaaaaaaaaaaaaaaaaaaaaaaaaa

SEQ ID NO: 63 - DNA, 951 bp, Mus musculus
atgcgccgggccagccgagactacggcaagtacctgcgcagctcggaagagatgggcagcggccccggcgtcccacacgaaggtccgctgcaccccgcgccttctgcaccggctccggcgccgccacccgccgcctcccgctccatgttcctggccctcctggggctgggactgggccaggtggtctgcagcatcgctctgttcctgtactttcgagcgcagatggatcctaacagaatatcagaagacagcactcactgcttttatagaatcctgagactccatgaaaacgcaggtttgcaggactcgactctggagagtgaagacacactacctgactcctgcaggaggatgaaacaagcctttcagggggccgtgcagaaggaactgcaacacattgtggggccacagcgcttctcaggagctccagctatgatggaaggctcatggttggatgtggcccagcgaggcaagcctgaggcccagccatttgcacacctcaccatcaatgctgccagcatcccatcgggttcccataaagtcactctgtcctcttggtaccacgatcgaggctgggccaagatctctaacatgacgttaagcaacggaaaactaagggttaaccaagatggcttctattacctgtacgccaacatttgctttcggcatcatgaaacatcgggaagcgtacctacagactatcttcagctgatggtgtatgtcgttaaaaccagcatcaaaatcccaagttctcataacctgatgaaaggagggagcacgaaaaactggtcgggcaattctgaattccacttttattccataaatgttgggggatttttcaagctccgagctggtgaagaaattagcattcaggtgtccaacccttccctgctggatccggatcaagatgcgacgtactttggggctttcaaagttcaggacatagactga

SEQ ID NO: 64 - DNA, 52754 bp, Homo sapiens
cttatttttaaaaacattccacttctttgttgcagttctctatctcttcatccattttgtttacctttgcctctgttttctttactatatgtaaaagaattatttaaaaattattgtaggctgggcacggtggctcacacctgtaatcccagcactttgggaggccaaggcaggtggaccacctgaggtcaggagttcgagaccagcctgaccaatacggagaaacctcgtctctactaaaaacacaaaattagccgggcgtggtggcacatgactgcaatcccacctacttggtaggctgaggcaggagaattgcttgaatccagaaggtgaaggttgcggtgagccgagatcgcaccattgcacttcagcctgggcaacaagaatgaaactccatttcaaaaaaaaaaaaaaattcttgtctactatttccaatatttgggtcatctgttggtctgtttttaattggatattttttccctcttcattatgaaccatgcatttcagcttcttgtcatgtcatgtgattttgaaaattgtataccaagcattgtatataaaagaactaatgtagatattattttgcagctaaggtgaggacttcaatcagaaactgagctggattgcagctttaagtagtttcagtgcaactcttgtttcaaatatcttgaaggaaatattttttgtgttcttattttgttctctttctctgacaagtttctctcatacactagaagatctctctctaccttcccagcccagttcaccagccactttgccagtactcaacaaaatctgtgggggaagaagaccagtaattggagaaaatagttgggcatttgtagattttaatctgttacatcagctccagtaaaatatctctgcctacagcaaactcaacactacacctatctgtgtttatgcttgacaaatgttccaagggaggaaagggactgttaatctttcttatctagaaaagaatgttcatgtggaattccatccctttagatttttttcattatcagctcatcgataacttttaaaatatatatatatattttttttttctttagtttatctggtagctttgtctagttgttatggttatggtaatgccatggtctactgagatcttccatgtaataaataaagcagtttactgaatggttttaaactctcattgctgggaggaaataatatgctttttctctttgcatctattaggttctattttttcaatgttactacaacatttgccttagagtgtaagctttgtgggcacaacaattatctattttattcagcattatatctcttatgcctaccatagtaccagactcatggttggtatgcagtacatgtttgttgaatgactaaattatgagcatgaacaagggaatagaggtttgaaataaatagtatgatgtacaagaaaattacaagttattcttatgttctaaaactagaactttaagtgcaaggcagtgatggatgttgaggctaaagacagagatgggaaaaaattaagagtttgtaaagagcctggactttatcttaagtgttggtaggctgctgagtggtttcaagaggggaagttatacatccagttgttcgtgataaatggatcaatctggaagatgggtttaagtgagaggagactgctggaaggaggatgaaagggaagccattttagtacttaggcaggaaatgatgagaggctcatttacagacaagaaggaaggaaaaagcactctgggaatatggcagcacaggcttatttcttgacaccctcccactcccatctcaataacacagagagtatgtggggatgggaagtctacctgaggctttaggacctaaggagacagtataggaatagaagagcacgggccaacttctggacaaaattatttacagcaatgagcagacctaagtattagtagatttggggaagtctgaaaacagaattaatcccatagcttcttgggagactataatcacttggccaggtaatcccatgcatcctgacagacatatggaatctacttgaaatttccagccatgagagatccccagtccttcttatgctgccatcctggtgaggaagcatcttccctacccctcacttcatggatgtctaccattgcctaagacccttctaataatctgacatatccagaagcaatggggactgacaccaatggacattggtaggaaaagaagggtcaggtatcacccaaagggtctcaggagcttgaaagagggacttgaatcaaataaactcagcagcttgtttacagagaaagtttggtaaagaaacagaggtgaatttataaatgattgtaagaagaattattgaggaggtacaagaagctattgtgaaagatcaattgaagggaaaaaaggatttcttgaaataaaatttaattttggactttaaaatccaacagatcacctgaataatagaacagaaactgctgaaatattgaacacagatctagatcaaatgaaggaacatattcaggatgaagcataaataaaggccaggcgtggtggctcatgcctggaatctcagctctttgggaggccgaggtaagcagatacttgaggtaaggagttcaagaccagtctgggcaacataggaaaactccatctctagtaaaaatacaaaaattagccaggcatggtggtacatgcctgtaatcccagctactcaggtggctgaggcaggggaattgcttgaaccggggggcagaggttgcagtgagctgagattgcaccactgcactctagccttggtgacagagaaggactctgtctcaaaaaataaataaataaataaataaataaaatgaaactgcaagttaaacaatgtattatagaagacctaatatggcaaaaataagagtttcaaagaagaaacaataaaaaattattttctgaggaaaactgaagtggagacagattcaggaaacatttaggaaatgaatacaataagaccctttgatattatttaattatgttttcagaaacagctacaatctccctaattaatttttgtatttcccaaaagtttatttaaaagctctaatactttagattaattttattttaggaataagtctgagataatattaatgaattaaaaacctgtcaaacagagttgctttctagaaagtaagagataaaattactctaaatatttctagcattgtgcacagaagagataaacagttatggacaggtttacttccttcatacatgaccaagatgtttttcctcttccacctcccatccagttttccgtaatgtctgataatttgccattagaaatgcactcctttaggggtgagagctaaaccaaaccaaccaaataggccctgtttggccaggaggacctcagagaaaccttaaaataataataattaaaaaaacccacctgagttcccaaccatgatgggatggtaggtcagatgcctcattatatccctttctttttgctgtttagacacaacagctgacagcattaatgttaaaacagagatcataagactgacagaatagactgtttatggcaataagataccaaattgtaaacaagagctatggccatgccaggcaagggttaagtcacacactttacacttaacaaataaacgatgttctaattcccacagggtttcttctccctctttctccagcagctaaacaacactagctttgagataagtgatgttgaagcagttgcagctccccagctatcagacaccaaataactgagcccccacctgttacacaagccacagtgacagctttgattggacaagagagtgatttctgtaactttctcctgataagagaccaccaaccatggactacttctggctggttttacagcagatgcacatttgagtgacttcctgtcccttcttcacctaattgtgtacatttaaatgttaaatctccatcccaatggaactgtgggacgcacgtaacatgcatgtttgcttatcatgcatgcttacaccctttcatgaatattcatagctcttcctatgtcctgttgaatatgtatgctttgccaaccccttcagcttaaattcctgtgttactcttccctctgttgaagggcttgctttaggttttttccagtggcaggctgcccttcctgcctgcaggttgtaattccattcttaagaaataaaactcacctttctaaatttattaattgtgtgatttaagttaagggggtaaggcagtatatttccagaagactgccaacataaaattttaattcaattgtccattgacacagtgaatgttaatttgtcatcacatactagttaatttgttagctgaagggaatgtaataagaccaagttgcttgtaaagggtaatgggtaagctggattagattattagggaggccggtcctaggtgagaagtttcattaggttttcagtgagcagcatatgagcctggaccggagatcagaagacgcgggaacagacagaaaaagaagaagagtgatcaaaggagaggtggcaagtacaaaagacaaagcccaccagtttcataaagttgctcaggctgaccccatttccagggtgagatattttcacagacttattacctatgattatacacattttaaaaattgttattagcatgaggggctgcatatatattttataatagccacacttataaattagttgcaactggcttcagatttagcaagtatcttatacagggtcctggcaggaaataggtggcaaatccaaggggtttaactgaaaagactttaatttgaagagttgaggtcagggttaagcaaactaagaagggatggtaaggaacccaggggccagcaaaagtgggttcgctttcccacactgcagtaggttaacgccctccgccacgaaggaatccatatcctaagccccagactccgtgactatgttacctcacatggcaaaacttactttgcatatgtaatcaagttaaggatctggagatgcagagatgatcctggatagtctgggtgggcccaatgtaatcacaagggttcttatcataagagggagatattagctgggcacggtggctcacgcctgtaatcccagcactttgtgaggccgaggtgggtggatcatgaggtcgggagatcgagaccatcctggctaacacggtgaaaccccatctctactaaaaatacaaaaaattagccgggcatggtggcggtcacctgtagtcccagctacttgggaggctgaggcaggagaatggcgtgaacccaggaggaggagcttgcagtgagccgagattgcgccactgcactccagcctgggctacagagcaacactctgtctcaaaaaaaaaaaaaagaaaagaaaagaaaagaaaagagaaagagagagagagattagagttagagtcagagagaagctgtgaggacagaatcagaggtcagagactggagtgatgaggtttggagatgaaggaaccaaggaatttaggtgacttctagaagatggatcctctccggagttcagcaaagtgaaacgtctgtcataataataacgaatgacttcctttttcattttcattcatatagtgaagttttctaaaggctgcatcatgtgcaatattgtaacagagtaagtgcaggactgaatgtgactctatcaggccaattgtagagatgtgaaaaaatgtaaaacagtggcacttttctccctacttttttttgaaaatctgtttttttaaataaaataattttataaaagtattatgaattatttataaaattatattaacattatgttaacatgctaatatggtaaaattttctgcttggagtttgaatacaccaaatatttataaatataactcacacaaataaaacctctttggtgttctcaaaattttgaagaatgtaaaaggtttgaaaattgctgatctagcaaatgactgaacatgaacagctatagtatttgtacctgcccagcagtgcagcaattccttatccttctcatatctgcactttaattttcctttgacaaatatctctccctcctctcagcccatgacatgaggttcacatggggttaacttaattccctggctcaaaggaaaggtattaaattcagacttgtatccaaccattcctgaagctagacttagccctatttttcaataacatgaaccaatcaattttcacatgagtccaaaataattctatgttaatacactaaggtactaggaaatatagtttgagaaatgttgatccaaacattgtgttatttacagtggagtattgacataaactttgaatcttcaaatatgttctggtgtcttggcatctcttaatacctattagcttacaaggctttcactcaactattttataattttgataatgacttaattgattagttgatatattgttaaaataaatatattaatgaatttatgataaataaggcagataaataagacatgcaattaggaagacatgttaaacaaattgttataataatacaatcactctcagcttaggatagctcctggccactttctctctgggtggtttttactctgggagtagtttaaatcattatctagtagtagtttaaagcattatctttgcctaagagctttcgctgactccccacatttgcattgtactaagagttttctctgactccccacataggtctagaccctagtattataagattctcattgtacttgcactttgccttcaaagtactaatcacggttttgttagtgatttgtgtgatgatttgttgaatctttttttttttcccactagggtgtaagccccatgttccatcttgatcaccatgtttctagcccagtgctggcatatagtgggttctcactaatatatctgtagagtaaatgaagaaatgcatgagtgacatgacaggagaatttaaggatgccatgggagcataaaacagagggagccacctgggtgaggagagctgagaaagacttctggagaggcgacatttgagctgagaaaggaaagacaagtgggagagtcctccaggtgtagaagttggagagatgagcgctccagttaggtagtatttgaagctgatgtagaaaaggagtcttgagccagcttgtgaaggactattggagagttttatttttatttttatcttttttttaatttttgagacagaatcttgctttgtctcccaggctggagtgcagtggcatgattgtagcttactgcagcttcgacctcctgggctcaaacaatccacctatctcagccttctgagtaactgggaccagagatgtgcaccaaaatgcctggctaatttgttcattttttgtaaagatagggtctccctatgttccccaggctattctccatctcctgggctccagtgatcctcacgcctcggccacccaaagtgctgggattatagaagtgaaccactgcgcctggcctattgaaggtttttaatcttcagagtttcgactttatcaacaacacttagaagccaccaaagaattgcaggtatggaaatgacatatacttttgcttttagaagaaaatcctgatcagtgtgcacagaattcttcagggggcaagtgtgattcattctgataagatatagcatggcttagactgggagactggcagaggctttgaagatttctttgctcaaattttattcagcaagtatttaccatgcacctactatagcaggcaacatttttaggaaatggtgaatgttacagaggtgaataatacagcaagagtcgttgaacatatggagtttatctattagttggggagtgaatgttgacaaaggaataagtaaatacataggcaagaaagatacattacctgtgaaacagcagcaggtagactgacagtggagtatctaatacagcctatggaagccagaagatagtgggatgacatttttggagtactagtagaaatgtcatatgaagaactctgtaggaatgtaacatacggtcccatatatgaagctcctgggtcaagtatacctgaacataattcagggatttgagggactttcttgtaacctgaggatcaagatgtcaaggaattaaaaacatgtataaaacattgttgtataaaaacccattaaaaagaatggaagacactatagtaaaatcattgtgggtttagttgttataacacattttaaaaatctttgatcccaatcaatatttataagaaagaagaaatatggaattatttcctgagtcaaggagcagggagagaatgaggaagaagaggaggaggaggagggggaggaggagacaataaacctacttcccaaagttaacaaacaaaaagtgggaagaggtcaaagactacaaggagtagaattaacgtcaattgtttctatgtttgagtctgaaaattttttgtcccttctccaccaacctatatattgatacacatataaatgctaaaggcatttttgaatttgaacagatcattttctttgtatggctgcctttaaaaaaaattcaacctggtcactcttcctcaacatttactgaggtctaagtgttcaatttagaacacatgctttaataactcagagacctgtcatttgtcacaaatcttgcctagagaaatactcattagcgaattaggcagaaagaggatgcaaaataaaaaggcacagtagtcccctgatatccatggaagactggttccaggacaccaccaaacccctccccgcaaataccaaaatccatggatgttcaagtttcttaacatatcatggcatagtatttgcatttaacctacacacatcctcttgtacacttgaaattatctttagattatttataatacttaatagaatgtaaatgctatgtaactagttgtgtatcatttaggaaatgatcacaagaaaaaaagtctacagatgttagtccagacacagccatcctttttttttttttcaaatatttttgatctgtggttcattgcatccacagatgtggaacccatggatactgtgggctaactgtattaataaaaaagtggaaacatcctaagtttcatgggtgtttaaattggtcagcaacttccttctgaagaagtatcagaatttgtgagcaatgttaatatttttgttttctcactaagagccacagttctgaatagaggtttttaaaaagccctagcaaggtttctttagcaatgaaactaacatttaactgtatcatcagcttcgtgttacatctctttcctgactgttgggtgagccctcctcggatgcttgcttctggctacacgcccctttacccttttctctgcactgttttcatctttataaagtcagagttggtgtctataggctctctactgccacattcaagacctgcctcgctcaatgtcaccttcaagatgcagaaatagggatttgggaaggggattgtgaaattttcgaagtcttccaaaatactttgagaaactatatttggaagcactttggggggagaggttggacaggaagggtcttcagagatcatcaaatttaactttctaaatcctaaggaggaaaccgagactccaggatgtgaagtcccttctctaccaaactagaatggatgcaggaggaatgtctgaggtgcaatccttatcctttagcaaaggtgtcctctgcgtcttctttaacccatctcttggacctccagaaagacagctgaggatggcaaggggagtctggaaccactggagtagcccccagcctcctccttggagggcccccatgaaggaggcccttcagtgacagagattgagagagagggagggcgaaaggaaggaaggggagccagaggtgggagtggaagaggcagcctcgcctggggctgattggctcccgaggccagggctctccaagcggtttataagagttggggctgccgggcgccctgcccgctcgcccgcgcgccccaggagccaaagccgggctccaagtcggcgccccacgtcgaggctccgccgcagcctccggagttggccgcagacaagaaggggagggagcgggagagggaggagagctccgaagcgagagggccgagcgccatgcgccgcgccagcagagactacaccaagtacctgcgtggctcggaggagatgggcggcggccccggagccccgcacgagggccccctgcacgccccgccgccgcctgcgccgcaccagccccctgccgcctcccgctccatgttcgtggccctcctggggctggggctgggccaggttgtctgcagcgtcgccctgttcttctatttcagagcgcaggtgagtggccaccttcccaggggatcgcggctgagagcgcccatctccttcccccgcacttggaaactgagtctggcggcagggctgggccacccagagcttgcatattccggaagggaaagtgactccagaagggagagaggaagtgttgagtttggggacaacctggcgcagggctgtcgggcgcaccctgctctctctccgcccacgcaccccagcttctcggtgctctgggggcggactcccctggccggacgatgggtttgaatctcaccccgtcccttcgctgggaaacaacactggcctctcaccttttctggtagtgattgcatactttttctccctgtcatttctcacttgaagttaagaatcaacttctgttcacgtaggaaaaaagatgagcgccttcacttgggcatctacctttcccttcccgcccaccacccggcgggtttcggttcctgcgcctggctgctctgcaggtgtgctggggccacggtgctggagggctgcgcggagcgggaggtcgcggtgctcgtgcccaggtcgcccaatgggtgggcagaatgacacggcgcgaccagagaggcgcgggctcgggatgggggctctgcggctgtggcgctgtcctgtgggggtgaaggaagagggacagccccacgtgcctgctagggatgtgggcggaggaaggaagcgaggtgagtgtgatggcacagtgttactacagtctagcaaataaccaaccttcggaaagatgaagaggttttttgcacgacggctaggaactgcagagagatagtaggaaggaaggggtaaatttgtaatattatgctttctggtggtttatgctcttgtgttttcttggaaattgcagtgcagttggttggattcattcaaatattcttgtctggtgctgtgaactctttctcagaggaagtggggggctgactgtgcatttttttttatgggaaaagaaagttgggtttggactacattcgttttcagattcaaaggtgattactaaaccaaacgggatgcatcaaaacatggcattgcttggattgtatggttttttgacatgtgccaatgtctcgaactccattacttttaatcataggctttttgttaagtattcattatccgctagtttgcattttctagaactagtgtgattacctacttaaagtagaaatgcaatgagccacacttcagaaaatctgcattaaatataatctactcattgagagttttgttgtttctaaaaagacaacttttgagtggtttgcttgcaacacagataacaaatctatatgaaagtgactaaacgtctttctttcattggagtgtgttgcaataagaatggcttacccattttctcatccagcattttgttaataacccccatttagtgcttgtgcatggagtgccagcgttgtgcgtggcaccgtcacctgcgatggaatgagttaagaatcatttattcaacagacagtgtccacttactatgggcatggagccagatagcagagtggcctaataaaaccattaaaattcttagtcaaacaaaagagcaacaatcagaaaagggatcaaagatgcagtagttctccactgtttatcttttctaacaccttcgggatatggcattttcattgccataatagtgaagagagtgtccaatgttgaacgagcagtaggaaatgaaggagttctaggaaccatgaacagcttggcttggcaggagctgtggaaatcggtggcatggctgtgtaggaaagagtgacctgctgggctcttgttagagttgttcagcttttccctaggaattctcggtggtccccgtgggtgaggagtcagggctttcagtgatctcccatcatcctttagcagtcttgatgctgtatggatgatagtgaaacattcagaaccccttttcaaagtaaacgtgtgagttagtaagtctagccagaaaatattcctttgaagaagttaatgtcatcagacttctgggtacggttttcttaaataccatgaaaattcggttcctttgacttgtgcaaaataatttagctattattctgaacccaattttgtattgcattttaaaaaggctatctccttcagtaaagaaaaaatattaggaacaatgtgttcatatgaatataccactagatcgggatgcattttactggatattgtgtctacaattgttacccaaaggagtcctaatcattttgagatacattctgaaatatttacagataaaactgctttggtgtctggaatttgtttcaaaataatttctggttgcttacagatgaaaaaagatttgccatacattggtaatagctgaagcgctgatgcgtgcctaggggttcactctgtaattctttccccttttatgtgtgttagagatcttctttcaaagtcttagctaagagaatagtctccatttgacttgccgctgatttaacattttcacttatatcggctcttttggattggaacttggtaccaaataaatcagtagttttttgattcccactaaagttgtgaatcaactatctgaggtttctaaatgcatttgaatgagaacaaactatctagtaacatgtttgtagtttacagttaaaaatgacgaattagttttattgtttttgtttaaaggtggagaaaagaaggtatgcaagtcctcaaggaaaagcagtttgagtttttaaatgcatttaaaagaatgcccagaatagtgtaaaaattacggtgacggttaaaaagttttgttttcttaaatgtttgaatagataaaattgaatcagcctcctaaatgtttgcagattgcatgtgcctagatgtaaaaaatacatatctactagatccggtgtagcttggcttttcccccaccaccctgccaaagagaaaatagtgtgtggcttctgctatatatttaccacatagtattcatactttggtttacaaagaaaaaaaataaaaaccctttcaaaaagttgctctgtgtgtgtgtgtgcatgtgtatgtgtctttaacatccatataaccatattcaaagcttagggtttagctataaagataaacttttcagaaaactgaagatgttttgcccttttaacttcttccctcgatcccccaatatgcacaaaccaacctccctggttgtttgttacccaggacagcagtcactactgaaaatctgatgtagaggtgtgcactgcctgtttgaaaacacagataacgaagtagcacaaacgtcaagcatcctgcctcatttaaccctacaaatgattaagtttcaaggaagttaaaaaaaatgagacagtgtatttcgtaggcacattatctgacaaatgcattttaacagtccattttaagtcagatattcaagatttacttaatgttttcagacgtgtctaagtacaatgaattcattggttactcagtttactgtgacttttggttgaatttctgtgttcctcaatgaagtgtaagttccatgaagacagggactgcttgctttgcacaccaccttattcatagcatctagcccagtgcctggcatgtctaatttactgcaaagtcttttctaatgatttgcaacactacagatatgcccatttctgattgtaatatgcaaattatcagattagtggctaaaatagtatcatttttcaatcatgcaatcctccaaccagactaatgtgtgctagtaggtaggttgttgggtaggcgatacattcgttcagtcagttcgtgggcatttgctgagggtccagcatcagtctggctccctccctgctctgcagttccttcagcttagaggccctcatttacctgtgtgtgtggctggccttgcaccctgaacctctcctcctccgttttctcctagtctccattttcaggaaaggagagctgcaagggcattggaatgagaaagacatgtggttgtaggttaaaaataaatttctaatgtgtgatccttgagtaaacaaaataaatgagtatattaaaagcaattattccatgcattcttgatttcttttgggaaaaaacagtggatggggttttatacatattttagctataatgctgccttccaaaacagtggttctcaactgcacattgaaagtatttgggaagaggttcaatgattggacacttcccttagggatgttgatgaaattggccagtgaggggtggggtaggaatgagatggtatctgggtgtgggcatttttttaagagaaaggggacaaaatctttgcattgtacttatttgcatcaaatcagtaaccattattaactgtttcagtatctttgtactaattgatgttacttgtgaaacaattttaaaattggtgtcagggaactttggaatcgtttcaatagcagaaaatctatattttaaagcatgacttctcaaactttaatgtgtataagaatcacctgggatctagttaaaatgcatattctcaggcagtatgccaaggtaaagcctgaaattctacatttctagcaagccctcagggagcccacgatgctactcattggactaccctgagtatcaagaatatagggttcgggtgcagtggctcatgcctgtaatcccagcactttgggaggccaaggagggaggattgcttaagcccaagagttcaagacaagcctgggcaacacagcgagaccccatctctaccaagaaaaaaaaaggaagaaattagccaattagccaagcatggtggcctgcacctgtagtcccagctacatggaaggctaaggaaggaggattgcttgagcccagggatttcaaggctgaagtgagctatgattatgccactgcactccagcctgggtgggggtgacaaagcaagaccctgtcttcaaaaaaaaaaaaaaaaggaaaagaaaaagagaaagaaaaataataaaggggactgctgcttctcttagacagctcttagcttgtcagcaggactccagcttaacctagggtccccaggcatttccccactaaggccacattattcctttggctcagcagttttctggtggtgcgtcagttcaggcctttgcatgattcttctttcctgaggtctaaacccagtgacccttcatatcagttgcctggacttttctggtcttgtgggatacacaccggcataagtaagcccttttttttttttttttttttttgcaaagtgtctgattgaaaactttccttgtataaaaattcacatattatgacttgtattaattattctaaagaatataggaaaaatacagattgtacacagttttgcttcacggtggtatctcttccatgatgattataggtagtccttatatgtgcaagactggaataataaaatttgtattagtgagtgtacatttgttaaaaggctgtcatttcattttgagaatctcagatatggataggctctttttagtttatttctaatggttggttaataaactaacacatcattctgattaatttttaaaagagagaaagagacttgtcattaatttgactgagctttgtaatctcacgtagcttttctttttcgcttagtttgtacatgctaataagaaaatgcaggtgaagtaccttgaatatttaacaaacaaagaggacaagttaaattctcattattaaaacagatgatagctaattattgttaccctttacttcacagttgaaaccaccacaaaggcttggaaggagcaggcagacaattttaaagagtagtgattaaagatattctaatgctggacacctattcttaacaggcaatcagctaattactcaatgggtatattttgggtgggacaattccttacattacaggaatcttagcatccctccagcacacgtctgtaatatctgttcatgcagcctccccaccctaacgtgatgacaccaaatatcacctgcatccattcccaaacacccgctgacaggtataccattccagcttgagaaacactgatgagagggtcaacaaaaaagacagatgacacgtctgacttcaagttttgtttggaggtaaaaaagtggatttttctctcccttctttggctgattaaggaaaaaaggccaggccaacatggtggttaaagatgatgttgatttcgcctgttttatataggtttcatgctctgaatttcaaagtgggcctcataatcccatctagcatgttgcatatagttgatttaaagacaaaaagcttcctctgccttcagtgaccacatgtgatttccttggtgcccctcccctctatgaacactttcatgttgttagacaagtttgacaatttcccccatgaatcacgcacatacacttctgtcattgttaaaagcccatcgcaggactaactgtgccttgtcctgtggatgatagtcagttactcgttcaaatgaattagaagtcaacgttttcaccatcttgaggttcattgtattaactattcattgttggggacataaagactcttgcaagtatgaattttttgttcttaagtcacactgtattaaatagcaggatgactagtgataagcactctaacgtccttactgtttctcctcctcagatggatcctaatagaatatcagaagatggcactcactgcatttatagaattttgagactccatgaaaatgcagattttcaagacacaactctggagagtcaagatacaaaattaatacctgattcatgtaggagaattaaacaggcctttcaaggagctgtgcaaaaggtaagtccacatcgaggctgataagtcaagggcccttgctgactctaccaatactgaaaattaaaactggctaagtgctgttgactctgctctttttattctaataatttgtaaaagagctacagggaatgctttaaagagattagcagaattattttgaagttggtagtgattgattatggcaatcagggacgttcatgcaaatattcttttctttcttttcttttttcttttaaagaggagggatttaaattcacacttaaattcacaccttaagactaaggtggctgtggcctgtctgtgagtcagtatgctagtttgaattccctgacctaaaaaccatccgctcagttcacaggactttctggtagctgtttcctttctgtttggcttcgtaatggcagggccccttattccacatctgttgatccagggctctgatgagaagcagttgtaactcttggtcctttgctgtcatctgtggtgaagtaggcagagcaggaaacaatgtgagatggagattctgtgtccgtgttctcattttctgggagagctgagtgacaagagaagagttagggacagagaagaccaatgacttctcttacaccgacagccccagttgggaaacactgtaataactgccagttttactttcctggacaaagccacttgagaattctgcagcccaagaattattttactcactgactccaccaaaacccaggtagaacacaaacagtgaccccagtgcaaaacctgtgtgtacgttatatacctgcatgcatgcatccacttctacatcccagcctctgtgttgcaactccctgggtctctggtcattccagagtaactcttgaagttctcaaagcccttacctctaaatttaattctaatgtagtttattttttaaaaatccacatatagtaatataattatttaaaaagaggacatgtgtcagaggtagaggtaggaagatgtagctgttttgtaaagccagctaacaaaggtgaacgtctgtaataccatcagaggtagaggaaggaagatgtagctgttttataaagccagctaatgaaggtaaacgtctgtaacaccctgatagttgagatttgctgtattttatcgaatctaagttaccaattttcagcctactttgttatttcatgcatcactaagaaagaagaaactgttgattaaaaaaattaaacatgatcatcataggttctagaggttctagttgtatcttaattccagagatatcaaaacgttaaaaagttgtgcattatggaatgcatgaagtacctattagtttaatgtgtctataagaaaacacattgcttatgaaaattactttttcattatcattagtgtgtaggtgtttggcttcacgcagaatagatgtatatgtttaaattcagtgatccttaatgttacagtgtaatttttgagcaacagcaacagcaattctgttaatctattcatttttattgttctgttttatatttcattttcattcgtttgcttattgtcccacttgtgaagcttatctcttaaatactgagtaatctgtctttaaacaacctattcacatgcactaggggcaatctgctagttcaaaatggcatttcatattaaggtaattctggttgggcaaaagattgtgccctaatgttctgtttagattgactcatgttgtaactcctcaaaatgatgagataaactttttatttcattggtgtgctggttcttaaaagttaccctttgagttccttatggaagaataagtatggaaaatcagccaagttaattctgaaaataaataatattacgaacaaggacaggcacggtggctcacacttgtaatcccagcactttgggaggccgaggtgggaggatcacgtgagtccaggagtttgagaacatgctgatcaacatagtgagaccttcatctctacaaaaagtaaaaaaaattagctgggcatggcaacctgtgctgtagttccaactgctcaggagactgaggtgggaggactgcttgggcctgggaggtggacgctgcagtgagctgcggttgcaccagtgcactccagcctggcagcctgggtgacatagcaagaccctgctaaaaaaaaaaaaaaaaaaaaagaaaggaagaaaggaaggaaggaaaaagattattaacattatttatgagactgcaagagtggttcaataccaacgggttaaaggaaaaaaatatattatcatcttatagatcctgaaaagtgattgacaaaattttgcactatttctgatgtttaaaatccattagaaaacagaactggatggattcttgatgttattacgaatgtaataactttttatgtttttacataaatgtaaaattttaaataacattttacatttagttttaactaaaagttacctaatgattaaacataagagcatgtttcttaaagtcaggaacatgaccaagatgcccactgtccctacgttatttagcgttgttctgaaggtgccagctaatgtaattacacaagagaatgaaataagaaaatatatatagagaaaagagggcagaatttgcatgtgatataattatatacttaggaaaattcaaaagaagctgaaatgctacaagcaggataaaataaatcagtttgtaaaaattaataagtaataatcactagctgtccttatttcaaataactagaaaacatgagtgaaagatttcactcataatttttaaatgctctaaaaataaacataacaagaaatgtacaaggcttataggaataaaactagaaacctctacagaggcatttaaaatacaattggataatgtaaagacataactatgcacagtcataatttttgaggtataacttgggccaaggacagcagacaaatccatggaagagaacaagcggcttactgtgtgtctctctgtgagtgaatgtatgtgtgtatataatttaatataatacaacattactttaaataagtgaacatattctgaattcttaaaaagcatattgttcatccttttttaaaagttatagtaatttctcttgtcctaagtaaaaataaatcccagattgagagagtacttggtagccaattgttgctcactggcagtagtgtcccttaacacttagtgtggcttcactgaacttttctgccacctcctgcctcatcagaacattatcccacttcgtttgcgatttctaagtgactccttaggtagtatggaaaagcaatttgtatgtaaaggtgttagtgagcaataatggcagaattttcagtattttaggatccttttggagacatgatgcctcattccaaatgagtaacactaataatgagcgattcactacttggcaaaccataaggagaaaattggtggtcaggcaagaataatcaactgcgcttattaagggcatgtagtcttaattatactgataggttattatgactcacaggatgagtagaactttatttcatcaatttcacatttgcttttgttttgttataggatcttagcctttttgcataggtaataatatcagacacaagtaatcctttttaaagaattataaattaaagctgttataccaatgtgtgtttggaggtagaagatgccatttcttccccttagacaggatctttaggaaagagacaagtcttatttataccttatcattagaatcaatcagtgttcattaagtgcacgtaatgtgctaggcaccttgccatgtctttccctatgcccaaggatttacccttctcttactctattcagataattgtttgccaaatgtgttatcctttgatgaggattatcggttaatgtgacattctacacatcttgccaaaataatcagatttctcatttctcttgccaatgctaaaaataggatggatgcattaggcattcttaagtaagtttgtaccttagttttatttctaatgtagatattgagtgaacccttaaaacaaaattacatgtgtggctgcaatcattattgggagatcaacccctccagtggtaacagataccagacataagcacaatatcacattatatgtgtgcgaaaagtggtgtttacccaacatgtctttggtcagacatgtaatgctgtttttttccccatttttgtttgtggctgggttttcttggcttcccccaccccctttagcacagaactctgaaagcctctaagtgatccaaccctaccaaccacaatttataaagtctatcataacagtctatgacaataaagaaaacactagtacaaatatggtgtctgatttataaagtgattcttgtttccagttttggcagcctccctgcttctgccagccggggggtgaggaaggagtgaactcagatccaaacgaggactcccaaaatggcagagaggacactcagcccatagaccccctggccagactgggtggaaagccatctgtttatgcacttactatacattctaagcacttgagctgtgactgcacttgactttagtgtgctggcttgttaatttcacattgggtacctgtttgcagataccttcctgaaacttacttgcaaaggcatttgaaagaataatgtgcaggagaaaggtcaataaacaaattgcacaaatcacattcttctccaaaatgggatgttcagtgcattaaagatgatcccctgggatgtgggaaagaagcatagggactttctgtatatgtattttttaatattagcttttaaaagctgtgctttagtaaatattttggaatgtacaaatatacgagagtgattttatttaatatttaaataaatacatatgtacatttcagagcatgaaaaattttttccctgatggagctgcacagtcagccatttttgaagatcatggagtgaagctgcaagctccatcaggacaagggccacagccatttcgcgcacatctgaatatatcacacttagtttattctcaggaatgaatggagaaaagcatgaacaaatgatcaatgacttattgaactctgtaaactaatattttacatcaacgaactcataaagccattcagaatgttacaagccttgttcttatttatacgatgctgtcttaccagtcctacaattgataattaggaatattatggcctgaggcagtaatgcttcagtacaataataacacaggtttatttttgttagaagttacccccagctggccctctcacatcagtcacattttcatcaggcttctttgttctgcataacctgactgctatgtagaggtgggcttataatgtgaactaaaaacatgattctggctccatatatgagttaaattttataaaactctctaacttccctccaaaatatgaaaagccaatggtattgtaatgactgctgataagttatcttgttgtcatatcctcaacaaaccattccctggagtataagcctttgagtctctaaagacttaactggagaacaggaagtaagaccagggagccataattattaaacaattcattcttacctgaaattcttttttattccctgggaatcaggtacctatttggcctcatcttcagaattcataatgtagaattcagaattcacaatatcctctgatattaagattaatatacccaaagatttgtagcactttgatcctcaatgaagtatttgctgttatttggtatagtctgagctgggtaacaaacagacccatccattcagtgaactaactaagaaactttttccctctcacataacaatccagacgtgagtcatccaggaccagtagggatgctcctctgtcctcagcatgaaccttccatctctgtttctaagttggcttctccatttgctgttatttctagataggggaagggtaaaagaaaactgaagacagtacctggaagtggagacatcacttccagtagcatcatatcggctggaagttactcataaaccacatcttgctgcaagggagactggacaaggtagtctctagctgagcagccatttgtccacaaagcttgaggaagggagttgcctataactaataggcaaaaaggagtggaaggagatgaggggacaatgagcagtctctgacattcactaaaccccatttaggtaggaaggaggactcaccatatataagcaagagttaactctgagaacacataagtctattaaaaattttaatggtcaagattgtattttcaaaaggtcaaaatactttgggattatttagattgcaagagagtgagagaaatttgaaagtagattcaacagcattcatctttttgaggaagtttcaaaggtctgtttagagattgcatctgtgattgtggaataaaccttgattgtcacctgcaccgcttttgctaggttttgtagattaaaaagagcattaattaaaaactagaaagttcaccagattaagtgattgtgttttctacatatgggaaacagatccccttggattgcaatctccattattataaggagctcattcctatttttgaactaatgtaaataagaaatcaatgaaatttaaatagattgtaactgcttgtgaaactgtaatcattgaagttgttatatgccactatttctcatttgcctattagttaaaaaaaggagaggagggattaaaccccattcattgcctctttccctttgtatacaagagtatgtgtccgaagaaagtttctcataaacccacaagggtacttggtttttggagcactcatgttcccaagtcacgatgttagtcatgtagtggttttccaataggatttcatctctgtttgccataatagttttggaaactgcaattcaaccccaatcacatttagcgtttataaaagctgtctttatgggaaagctgaagtaagacccacagagttttcctacaaaaccaaggccatctattggctttagctcaacaataagttattggcttgtactcaatttcaggggagacccagggaagaaggtaggaagcaggagggtttgcaagaggaaaataaccggtgagttatgtcagaggtgggcttttctttgtgttacaagtaccccaggatggaagaaaagatattctgcatgacatctttaaagaaacagagagctggaaggacatgcttgaaagaggagccttcattatgtggcctgggatcttgggctaaccttccagaagtggatgaaactgagggtccttggttggagagcatgacagcaagggatagattggattgttctaccagcagcggcaggagaggtacagcctgtgtaattgaagagcgggatgtgccttagagcagtgtttccaaacctcctggatcttaagactcagttggggcccttgttttaaaaagagaagagaaaagtcctccagatctatcagtggggactctgatttggcagttcaggggtggactctgtgatttcttcaaagcatcctaggaagaggtgagagccactggtggacagggaagccatggtgaatgaagtgactatatttgagaaggagtgtgaagcctgtgtggtatgaaagaggtgggtcccggaaattgtcaagagctgtctgtttctgagatgaccagacaacaaatgcttgctcaaacttttggaagttcagggtgttggggagttccattctcacttagcttctgcatcactaggctgctactcctgtcctcagtctttgcccttcaagaacactaggtagcggcggcggtggtggtggtggtaccagtaaaaataatcatcataatgataaaccctaaggctcatattcatcaaaaagtttgaaagcactcagaactcttctcttcagtgcctgtggctgcttttcatttgatctagtttttcatggtgaatgacaataccattatctccaccaccccaaactggaagtcagaagatggtcttatccttttattcacccactcttcacctctcccccatcctgtgaattctaccgccttacaaaaccttcaagtattgtctctactctgctcactgtgtggtcacatgaacagaggtcatcatcctctcttgcctgcatccttgcatctggccaccccctcctggtctcactgccactggcccatccttcccatagctgagggacttcgaaaatgcacatctgaacaggtcatttcttttcctgcttaaagcatccttcagtagatcgctgtggttgtcaggatgaagtctgagctgctgaacatgtaacaaaaagtcctctgtattctggaaagcctcgttccagcccctgcctcttcaggcttgttaccttgaatgctccatgtcatcgcctccatcgcaacttgtactccacggcctcaccacactatggtgctgaactctcccgacctggccataccctttcgcctctctgcctctctgctgtaatcagcaagtgcagagagggcaaagggcatgtctgtcctgcgaacagtgtcctcagaaacccacaggactcctgactcctagcctccatcagtaaactttgttgaatggatgaatggatgaatggatgaatgaatgatgagtctttgtgcatagtcctttgtatgccactccatgcccttctttgtgtagtcggttttctaattgtcttttaaaatccaactcaggcattacttcctggaggaggagcccacagatgcccgcccacccacctgtgggggtaggtgcccctcctgggcccacacggggcttcttgtaacagcagtaaccacacggacctggggtgaactggctcacttgaatgtgagcttcccaaggacagggtctgtgggatgtttcctttctacatttccagccccagtggcaagcacatagttggtgctcagtgaaagtttaaagaacaagtttaatgaatatgtgagtgacctgtgccctatgtgtgcacacttggtgtgctcaggtggcgagttgtttaatattgccagaagctagccagccatgtgatcaatccataggattcttaaggggctggaggtcactcgcaagctcagtgttttcctgcttctttgagaggagagctcttttcctctttggagcgtgaacacgttagggaccttggggttaggggtgctccttcactggtagccttggcccttttcttcctggcctcatggatctaaagcagctggcctggtatctctgaccccctttgcgtctcattcttagggagaagtctgtgagagcaaagtcttttccagaagagatgaggatttgtcaatgtagaaagcactgccaatggaaggtggcattatttttcaagtggcagaggaaaacagagacatggtaaatagcacaattagcccaagatgccacactgcagttactctgccaaacttttagatgacactttttaaaccagtagtatagtataagacatttgaaaatcgggctctttatgaagactaacattgctgtcataagactactttatgaaaacccaaggggacctttatctgtagcagaagctttctcatttaaaccatgaaggttaaacaataaaaactaattttctattcccagcatacccatcgcactcccaggaaaagcatcagtctgctttatgaaaacaaggacatgctattctttagctctttggtaggtagaggacatgaactgtttgcaaaaacgagtctcttccaattagcagacttcttttggaagaaatgatccaccagtgactgtatttggggtttggggaggaggccaactcacatcttggtaaagtttttcactgagaattttcactgatgggcatgggatggtggccgctgattcagtaggagctggagcaattaggaggctgagtgcagtggtagtggtggtgcggagtgtgtagaattcatgttgacaagagtttggctttgggagaatttgattagtcagtacttttatattaaaaataaagaattatagggatcagaatgttaagttacaaatttaaggtgaggatggcttttaccttcgggatgagtggggtctataccctacctaccttcgctcctcctatctgcctgctgggccactggaccccttgcccacctcatgatttttcccctctcctctggggagggtgaggacctgccctctcacctcccccagtgctcctgtcctctcccttcctggtgtcttatagggctctgctctacggaacctaggctgagaagggcaatccaccatgatcttttataacatgtattcaggcaacagagaactcaatgaatcctgctcttaaagttctttgctttgggtgtttttgcactatgggctcttcataaggaaccaggggtcaccagctccatccaggtgcatatatgtgttcccccacatcctgtggattgcaaggtcagtgtgagctttaggggagggaggaaagcgagaggctggggcagcgatactaaagcctatctcattagctattgcacaacacccagtggccactctttctgtgccttgttagccaagaatgccgtggaaataagagcgttgcaattaaggatgagctattgatgaaacactggctaaggcagctttccaagggagcagtgtgtgcaaaagtctgcatgtacaggagggcagagttcttgcaggtggaactaagagtaatttcatgaggctggaacctatggcatcccagagcctccttccaggtgatgaggtttgggagtacaggggaagaatattaggggatttcggagtggtaaccagactaagtgaaaaactaatgtttttctctgtactctcataacctgtctgacaccaaatatgtggcgtttgccctcacacaaagcagttctccaactcttcaggcactaattggatgttctgcaattcaattatgatactaactattgggaggtaacacagccccaacaggttaaaggctcagccccacaagactgtcccacttcagatgccattcacaagtgctaggttgttgcctgtatttctgaccaaccagctacaaatcgggggttcccatgacctcctactcaggttcggtaatattcttgaatggctcacagaactcaggaaagcacttgacttactatgaccagcttattataaaggatacaatcaggatccacccaatggaagagatgcttagggccaggtatggggatggagagggtcgtggagcctccttgcctctcagggcatgccactccctcagcacctggcatgttcacctgctaggaaggcagtggttaccctggctcaagcccactgttgagagtttttatggaggcttcattacatagacatagtttattaaatcattggccattggtggttgatgtcaaccgggaggtcaggaagtcaaggggtgtgatatggtttggctctgtgtctccacccaaatcttacctccaattgtaattcccataatccccaagtgtcaagggtgggaccaggtagaggtaattggatcatggggggtggttcccccatgctgttctcatggtagtgaatctcatgagatctgatggttttataagcatctggcatttcccctgcttgcactcactccgtcctgccaccctgtgatgaaggtgcctgcttctcctttgccttccaccaagactgtaggtttcctgaggcttccccagccatgcggaaccgtaagccaattaaacctctttcatttataaattacccagtcttggccagttctttatagcagtgtgaaaacagactaatacaggctgggactgaaagatccaatcttctaatcacatgaccggtccctctggaaaccagatcccattctccaagggtcacatcattagcataaactcaggtaaggttggaaggggctgattttgaataacaaaggatgcttctgtgacacctgtcacgcgggaaattccaaaggctttaggagctcagtgctaggaacctgggatgaagacgaattgcatatttcttattatattacaatattacacaggcccagttatgcagggccttctaagccctggtaaggaacgtggacttgaacctgaagtctggaagcagcccccagaggattttaagaagggacatgtactttaggatgcactctaacctcagtggatcactttgaggagggcaggagacaggaagaggaggtaggaagctattatgctagtcctaatgagaaatgatgaaaacttgaaggaaggcagtggtacccaggttggagaggagggaatggatttcccagctatttacaaggtggaaatctgcaggacttctctgcaggaattggaaactggctattcattttcagaaataacccatgtgtggcattcatgtgctaactcggctgatgaatgcactattcttgtaactaggttggagaagaattacatgaagggtatcattaagatgttaaaatgaatgcattacatatgttaacaagtgtatgaaccctgtattatatctggcaaacggggtgttaaatccttgttcaaccagccagatgtctctgcagctgctgctggtattgcagagggaggcagccacctgagaccccagctataagctggtgccagtgatttccaaagcatctggctgtacaaattccttcttctgtgctctgattgacaggtaccacatggatcacacaattcacatcacaatgcacaggtgagattttcagtctgataagcccagactccagcaacttgaccttttcagaatatctttgcagctgagaatgttctcagttggagctgaaatctatttattattattattattaatttattttttttgagatggagtctcattctgttgcccaggctggagtgcagtggtgtgatctcggctcactgtaacctctgcctcccgggctcaagcgatctcgtgccttagcctcccgagtacctgggattactggcaactgccaccatgcccagataattttgaaaatatttttagtagagacgaggttttgctgtattggccaggctggtcttgaactcctggcctgaggttgatccacttgcctcagcctccgaaagtgctgggattacaggtgtgagccactgcaccaggcctatttatattactttgtaagttgaaaaaaaaaacactgtagtaaaacaatcttaaaaacaacttaataacattctctcctgaattggaatgttatcaaagtcttgtttggggcagttattcagctgaatttacaaagaggggcgtatcctttgctgtaaatgtttaaattgcctgaagcaaaattcccataactacttaaaggagttgaaaatactcctaagtgtttatacttattcttacacagtaccatctctcctgagtggccctagtttactgagattgagccagctctgagacatctccctcctccttaagtttggcaaatatcctaaaacgtttgaaaagatgtttaaaagatctgaaggaagctggtctcaatggaccagagacaaagtctgcacagccaggctcctgggaattgcacttcttggatgttgagttcaggagaggcagtactagagaccacagttacacaatcacattgatcttttgtgtactttgtttcctggagaagaaattgtgtaatcccagcatttttttatgagttaaatagaagttgaaatttaaaaaaaaaaatcacattggttgttttcctgtctgtttaaatgtactctgacagcaaagatgaaaagttaatgcagtctaaatagaaaaataccacaatgagaagattttaaaaaaatattgtgaaatatcctcatctctattgtttttagacgttggggtttcaaatctgcaaaggctgactgcggcgttgtcaggattgtcaatgttggacagcgtccactaggtggcagtatctcagaaggtttcttttatccttgaatgggcagagatttctttggttgctctctttggtagttcggtttcctttttttgtcttgttttgaagggttaaatgaagctatcataatttacttatctaaaattgcacttatctaaaaatgcataaattcattgcaaggcctacttgttacagcgtgaccataaatgagtttattcattcatgtgaattttcttggtaacttattattaatgatcctagcgtgtaacagatgatgaatatgccgtatcctgagaaggtagatcacaaatcctcctgggaagctggacatgggtgctcattagccaagagaagaaaataggggcgtcctttgcccagcttcctcagcctggtaactgtttctggcttctgctccaggctgttcgctgagaggtttgttgaagttacctgcacttctctacgcaaatctacaggcattctgatggcgtaggtaacatgtggttgtgttggatgtttattcagagtgttaactaactggtttttgttaatttacagctggcttaaaataagataaaatgtacatacattttttaaaagatctctttcatgtgaataatttgttcagaagaaaggagtcgggatattcttttgtagtattttcccaaaattagattatcagaactttctgaattcaaagaaaccggcagtgccgtctgaatgataagattttggaataaagaactatagaaattttaaaacactctaattaatctgacagatgtagaggactaatgtggatgaaaagaaatgtaaatgcaaagcttagaaaataaatggaattgtcaattggggtgaagtttgggttcgtcttcagaaggactcctataatcctgaaaatgaaaaatattagggggctatcaaaaggtctgtgtttggcatgtgcatagcaaggtctctgatctttgagaagatggcaacatggaatggctccagctttgtggagtggactcgatagggtcatgtttggagatgcaatgtcccttatccatgtcctgcaggtcttagtcttgggggttcatcagccaagccataaacatgggttggccagttctcagccagttgttttctgaagcccctgggaattctgagatcatattttctgatgtcccggctcctttttgtcagatcccaggatccccagcagccagatgccagtcaaggtgagccaccttttcagagttactgcttcagggagggagtcacgctagggattcctgggtgggctagtggtattttgtcccagctttcaggagtgtattttatgacgatggcttgtaaaaggatatgggcatacagatccagagaccaaagttcaagtctcagctttattaggtgaagccttattctctctctgcctccatttctcagtctgaaaaatgaggttagtagtagttatagttttccaggctctgattctaacaaaagtcaaatatggtaacagggaaaatactttgctgtctacaaatgtaagaggttattaaattttcaatacgtggaatatatatgcaagtcatgagactatagtaaacccttaactaaattgagatgtcaccaaacaactattcatgggaacacttaattagtaacaatgcttctcaatacctgctacatattcttatcatctgggagcatctttaaaaaactacccagtcactatcagactaattgggttcattatcctggctgaggttggggtcagggtatgggtatcttctaaactgcctaggtgtctctgctgcgcagccaggtccctcactggaatgcatcaagtactgcctacaaaacttcagttacaatctcaaggccagaagacaccctaaaagtctagtcttagaagaatgttatttttatgattgatatctgtgcacataaataacaatggttttagagctcaaaaagctggggtgcagatacagatattgggaatactttctttgtaccttgaggtacatgtctatagacagtcatgcgctctctttttgactctgaaacttacctataaggtttctgaggggaattgcaatccttcaacacccaaaaggtataaaatgagagcagcattacctcttgggtctctagctagagttttaattcatcctgggtcatgaagccttttgttcttttttttttttttttttttttaaagcagacattgaaagtgcatctgagaggtgctgctggttactgaattttcctgaaacaaaatgggtccgtagcaactctgacctagaagtttctgattaaatgggaaagaaaagttcatagttcattcccgggtagaagaggacaaactttccctgtccgttgcatcggtggcttgagtctgctgcttctttggcctggatatcaagctcccagaaaatctccagtctgtgcctctgtgaatctttgaggatgtgaaagggattgtcattctcagatgaggccccaggccagcaacaccagctcactggtgctgaatgcaaattctcaggccccaccccaaatctactggatcagaaactctggggctggtcccagcagcctgttttaacacgccctccaggaggtggtggtgcaatgcatacatgctcaagtttgaggaccactgagctaggacaaaggcacttttcttgtttttctttttctttcttttattttcttttttttagacggggtcttgctctgtcacctaggctggagtgcagtggcacgtcacagctcacttcagcctctacctcctgggctcaagcaatcctcctgcctcagcctcctgaagagcacaggtggatgtcgccacacccagctaattttaaaaaattaatttttatagagatgaggtctccttatgttgcccaagctggtctcaaactcctaggctcaagtgatcctcccaccttgacctcttaaagtactaggattacaagcatgagccatcatgcctggcctggctttcttgattataagtgtgtttgtatagaaaatcacaaaacaggcatttgtaggtatatgctagacttagttctgcttccttctccccttccccatctctcctctgatggaaaggcagatcagagctagagggaaaatgaggggtagcgttcaatctcagaattactctgtcaccaaggttcctcttccaatcttttaagagccagtaatcaagtaaagatatactgtgtatatataaccatataaagatatacacaatgtttagagatacgctgcatatccagctttgctggcaccaaagtgaagaagagatgaacagaggaaggtctattccctaaggccacccatccacctgcctgacaagaactgggaaataagaaactgctatcaaggcatgtccctgttacatgtcagacccctccacacactcccacacttccgcagcacttggcacctgctgcagcaagaaaaatgcccaaaagccaactaaacaagcagtagcatttgaaggataaggggcccaatggctgggaaactgctgatgtgagaaagaccgcacagttacactcacatttgcagcaggtagtagagcgccatgagcagcttaataatgaaattttcctatagccttaagggagaaaataaaaacctgcagaaagaaagaaagaaaaagatgcactgtgttatctataagtctgttgtgaaggcaggggagacaaaactaggaaattccagaaattaggcaccattgagaacccggaggtcttgaggaaatcttggaagactggaggttgacatgagtggggaagaaaacgaggcctgggaagggccactcaacccaaaaggggctaccatgtgcctaaatacccgccctgcacacggcactcccagagctgtgcagtgtagtgccccgggtctaggcaacagcagaaagtggctttgagtgagtcctagggtttctttctaagagtcagccgcactgtgactagaacttcagaacaggtcagtgaagacagctgtgctatctcctccaacggtcattaaaaacaacgtagattcttatctctctctcagaagtttggaagcagaaagaagaataaatgttatctccagaatccttccagctaataacagttgaaattatgttattgcctctatctatctatctatctatctatctatctatctatctatctatcatctatctatctatctatctatctatctatctatctatctgtctatctcaaagccctcctctctagacacttaaagaacttaagctgcatggcctatctttcaaacaccgtggggagaatggttagcatgaatagttattccagtaacaggggaaattaggaatctctccagagtggttttttttcagtatccttataatagatatctcttttgttttttgtttttgtttttgttttgagatggagtctaactctgtcacccaggctggattacagtggtgcgatctcagctcactacaacctcccccgcaacctcccggttcaagcgattcgcctgcctcagcctcttgagtagctgggattataggtacccacaaccacacctggctaatttttgtatttttagtagatacggggttccactgtgttggcccagctgatcttgaactcctgacctcaagtgatccgcccatgccagcctcccaaagtgctgggatgatgggtatataatagacatctaaatttaccaggcactctgctaagtgcctacacacattatctcctttagtcttcacaagcaccctgtgatggggtgctgttaatatcctccgtttatgcaggaacttgaaccaaggtgaaagcctgagctttcatcccctccaccttactcttgccctaagatgtgacattttagtgtcagctaatgtctggatacaggtgggcatgtggttacctatttcatcctttattctcagggttcaaattgagatatgcaattacctatactctttatgttttttcttttttctggcttgtgcttctaatcctctatttgtggccatattttaagttaattgttggtactctaaaggctcttagacttccatatagtgctttaagtacactgtaactttaaagtaaaaaattaaccactgggagctaagcatcgttctctttcctgtgggctgagctttagtattataacagaaattcactaatgaaatagacatgaaaagagccttccagaagatttaagagggtcatatattctgtgtagttgttattttcctagttaacttcatctccatttgtgtacctgctacagatttttaattatgttcaattacgccatggtttataatctacatcgtcttttacttcctcttaccgtccaaagtattttgtttgaagttgggtatgatctcaaacacatcaacaccaattcttttgggggaacttccattgatagccacctaatacatataggaatttcactgccaatgttactatggcacctttggaaggaaaagagggttaatttgttgcatatgtaacagccctgaattcttattgctttacagaaagaatgattttataaataaaattatttttcctttttatttcaggaattacaacatatcgttggatcacagcacatcagagcagagaaaggtaagcatggatccatacatctgtatgaaatcccacagggtcactactattttggctataataatatggtttctctcatctccagcgatggtggatggctcatggttagatctggccaagaggagcaagcttgaagctcagccttttgctcatctcactattaatgccaccgacatcccatctggtaagctctatctgcatccagcctgaaaaatattttaagagtcatttatcagcccatttcaatactgaaacctatttttagtctgtcactgaatttttgagagcccttacttcaaagccaaaggaaagaccattcatcctcaggtgatgattcacatcctggaaactgtgattctcaaaaatgtcagaatggacatcatcaccctattcattttcagatcatcagaatggatgcttattttaaatgactgccagctgaaagcctgtaacctggaaggacaatcctttgttatgctcatctgtactttcccaagctaaagttgacacagccctgctgctgacctcggaggtgaatgaattcatcaggtagtcacatactcagctatctcctgcagaggtccagggaggacactttagacccccgttaagatctttaagagacagtaaccctctagaaaatgagatctcctcccccttctccaagggcttatcattttctctgagtaaatgcttagcttgatggactagagacctgattatcttgaaaatgaagaaacccggagctctctgcctacagctactgtaatacaccagttattccatcatacaacccccactggttacttcaccatgggctagatagctatcaaaaagataacagaactttatgatacagtgacaattgaacattcttgttatcatcatgccactaatggaacacttgaagatcttaaagggggatcttcaggtgtcctccctggcactctactggagatggctgagtctgtgactacccgatgaactcttccacctgtcaatcaggtgttttccccttcctcaatacctctcatccttactgcaatcctgcaaggtagggattatcacgcaaattttgcagacagggaaactgaatgatacataggttgtcatttgttcccagtcatgatgatgataggattagaagtagaattcccgtcccgttgattgctaagtccgtgctttccatgctctctattatcacataagcaggccacaaggtacttgtggtcagttggcttggccagagggaaagaattcaaagcccttatgtttctcttttcctgtgagaagtagattcatgtgacgtctaataacaggggtgctaaaatctgactgcctgggtttgaggctccattgtcctggctctgtgaccttgtacaatttattgcaatcacatatgcttcagcttcatcatgtctaaaatggggatgttgatagcatctgcctcaaggggtagctatgaagatgaaatgaggtagactgctaacattcttgtgtggaagaacggccatagtaagcacttgggagtgtgatttgttatttttgagttcaattaaataattatacatattccacctttttcctacaaataatttaaggcaagtttttctcggagttaaagaaagaaagttcaagttttgctaagttatttggaaaactttgttacggcatggacaagggggaatttttcctgaccgaagacacagaaagggagaaaccaattctttggcttttagaggattttccaaatgacctctcctgtcccagacacttgcttcataaataatttgtctcactgtgtgtctatgcatgtcttgtggtggagctacactaattttctctgagtggaaaactgttttgcatgttagcaaaggcaatcaaataaatatggatgcatctgtattaatttctctgagtggaaaactattttgcatgttagcaaaggcagtcaaattaatactaatgcatcagctgtgtgtgctattaatgttccctacatttatcttttcagttcactttaaatggcatatgataaatattgcattagaccgtttgccaaagtctgtttggcaatagcaagcatgttttagttataaaactctctctgcaggcacctagcatcaaatcattgccaaaaacacaaggcaaaactcctggttattttctgacagttattgagtttgtgactgagtgagatgagttagtgtatacttctgtttaagaaaatagaatttgtggctctggctgggcccacaactccttgagtccatttattacccagttttggccagtactggaggtttcagaggaagtggctttaaatttgcatgttcattttggggctctgttttatacttacttacacaagtaaaatcagaatctgccttatatggactgataccacttgcattttcaaaatatcttagatgaaatgcgttgggaagtatttagtgaggtcagaatacatggctttctttaggaggatactcaggctaaatatttgcagagacctcttctgcggtacttagcagcagggactgaagtgtagggcaggggaggctgggaaagctggcaggctggagtcaggggttgtcagtgtgcctcagtgatgaaaatccaggtttccatgtgaggcctgctgtgtgatcactgcatatttttctcatgtttttacctggtattatctgcttctgagtcctctcttcacactgactggctctcctccttttcccccatacgtgccatgcatattccattctttgctcagtttccttcactgacaataccctcccttttctcagcccatccaagtctgacccaaggccccactgtcctctggcttctctgccccttcctgagctgagctctcctgcttgccatgaatttctgtagctgtctcttggcagttgcttgtaactgaatgtcaaccatgtgctatgcaacatgcagaagtgaaaatgcatattttatatgctcattttctattttctctactattagtggtgagtgccattaaggcacagttggttgatgtaattcttaattacgggcagactgcctgttcctaaaaacaccacgtagatattgtgtgactgatcaaaagcatgaaccagtgaatgtatgagtaagtcaatgcacaaaaatagagagatgtttagtaggaaataagggcacttcttccacatgacttacctaacaatgggaatggtaatcggtcaaggttcctctcttctcctgcctctctatttcatattctttccttgccttcctaggccatatcttgctctaacgccagctgatccatcccattgagagggtagacttctcttctgttaagagataactataagaaaaatcattgattgaacaacaaattgactgcaagagtgggataagaatgaaggcagcatgggataacttgagatgggaaacatcttgaatttcatggattttgtcaatggattagaggaattgcttttactagtgttcatgaaggtgtgatgatcatgctcactcacttggggccagatgatggtatttatatctggggtgctttaatctgggatgacctgaaataagacctccgatgaaaaagaagggtgtttattgtggtgagcccaggaggcaagagggcctgtgatgaccccgctgcagataggttgtggagttcaggaaatatcctgtttctggacagagggattggaaccattgaattcttggtcttctcatgatggattgccccaccgttggatggcccttgctgcagtttttctcccaagtggttgaaagaactgcctgtttggttcctacagcctagttttgaggctcccagatcatatcccaggctcccagttctttagagataaaattgtagaacattctctatcttgtgggcctctagagaaggatgtagatgttcaaggcccaccaaaccagactaggctgggaaggtaactagtgtgtgtttccttttttttgtttgttttgtttgtttgttttttgagacagagtcttgctctgtctcccaggctggagtgccgtagcgcgatcttggctcactgcaacctccacctcctggattcaagtaattctcctgcctcagtctcctgagtagctgggattacgggcgcctgccaccgcgcccagctaattttttgtatttttagtagagatggggtttcaccatgttgaccaggctggtctcgaactcccgacctcatgatccacccacctcagcctcccaaagtgctgggattacaggcgtgagccaccgtgcccagccatgtgtttctttctcgatgaggctctcataaggattcactctaatcagagagctgtcagttttgatggatctctggaatccactataagtcttcatctctgggctaatttatctccctcagcatctcagggcctgacctaagttgtggttgggtgtgacaggcagcagtgaacttcttgtggctgcaggaactctctcaactccagtctgagactcaactctgctttgttttgctgatttcaaactgctgaccaccttagtttagtataagtatttacaaaatcctctggaagaaaaatgtatttttgtactttccacagtattacaactttcccaccattagttaccagcttttccagttgaacaatagtgtccacatcaatacaaatctttgattaattgggtttatcacagaggtattgccaatttttaatgacccaggaaaatacaccaaaggacctgaaatatgaaaaggattggacacactgctggtttagaaggttctttagaaatttttactgctctgaagctgtagcaagaggaccaggtgtcacctcatttcaggggtgagtagggctaaatgagaattctggtcagtcaggagaagctttacagacctttggtcagaaggattgtgtgaagttgttaagctagggagtgcaatgctaagaatatgttctttttgagcttctctggagttagcttttcagttgtgcaagctaaggtgggagacacttgggctactggaggtgaagaaaatagattatgagaattgagtttagacgtctgacctttcagccaaagttactgtgacccagtttttcatctcctactttccctcttcatgagttaaaagagaaggttgagacttgtgacatgtggaaattgtcttcctatcctagtttcttgctttcctgtctcagttgcctttggcttatctcttccttcaacctggaatgacctttctgctcctgtctgtgtggctgaatcccatttctcttaagttctcaggcttagcagcaactccacaaaggcattctttacccttctgggtggaaagttgttcttgtctctccgtcctttgagctcccatgggagttactgaaccttgcctattgttactcatgccttacttctgctctgaacacatatcgtacttacccctggtgcactatagacgccttgagggcaggaaaaatgagtttttgtcttcgtagcctctactgtgcctaacagaatgcaccaagtacatctgaatgtattctccccttctagaaaagaaatgccaataagttattctccctttgaaataatgactgctatactattttttctccctaacctcatagaattgtgaagacgtccttctcatttaaggactgactttcaaatcttatgcctctcttctccacaggttcccataaagtgagtctgtcctcttggtaccatgatcggggttgggccaagatctccaacatgacttttagcaatggaaaactaatagttaatcaggatggcttttattacctgtatgccaacatttgctttcgacatcatgaaacttcaggagacctagctacagagtatcttcaactaatggtgtacgtcactaaaaccagcatcaaaatcccaagttctcataccctgatgaaaggaggaagcaccaagtattggtcagggaattctgaattccatttttattccataaacgttggtggattttttaagttacggtctggagaggaaatcagcatcgaggtctccaacccctccttactggatccggatcaggatgcaacatactttggggcttttaaagttcgagatatagattgagccccagtttttggagtgttatgtatttcctggatgtttggaaacattttttaaaacaagccaagaaagatgtatataggtgtgtgagactactaagaggcatggccccaacggtacacgactcagtatccatgctcttgaccttgtagagaacacgcgtatttacagccagtgggagatgttagactcatggtgtgttacacaatggtttttaaattttgtaatgaattcctagaattaaaccagattggagcaattacgggttgaccttatgagaaactgcatgtgggctatgggaggggttggtccctggtcatgtgccccttcgcagctgaagtggagagggtgtcatctagcgcaattgaaggatcatctgaaggggcaaattcttttgaattgttacatcatgctggaacctgcaaaaaatactttttctaatgaggagagaaaatatatgtatttttatataatatctaaagttatatttcagatgtaatgttttctttgcaaagtattgtaaattatatttgtgctatagtatttgattcaaaatatttaaaaatgtcttgctgttgacatatttaatgttttaaatgtacagacatatttaactggtgcactttgtaaattccctggggaaaacttgcagctaaggaggggaaaaaaatgttgtttcctaatatcaaatgcagtatatttcttcgttctttttaagttaatagattttttcagacttgtcaagcctgtgcaaaaaaattaaaatggatgccttgaataataagcaggatgttggccaccaggtgcctttcaaatttagaaactaattgactttagaaagctgacattgccaaaaaggatacataatgggccactgaaatctgtcaagagtagttatataattgttgaacaggtgtttttccacaagtgccgcaaattgtaccttttttgttttttcaaaatagaaaagttattagtggtttatcagcaaaaaagtccaattttaatttagtaaatgttatcttatactgtacaataaaaacattgcctttgaatgttaattttttggtacaaaaataaatttatatgaaaacctgccttgtgattttgtacttcaccttcatgtctcttttgctctgtgatcctattattttcaatatggtaatgtggcttctatctctttccaaaggttactgggagaaatgcagatttaattaaaaattagaagcagattcaattaaattaatgatccttggaatctgaaaaataatttgcaaggaatttgtatgcaaggatatatccagatagaaaatggagtcttcttcacttaaaaaagccaaaatttatattatgttgatattgtgagaaaaatatggtgctttgtataagttcataatgtcttaaagaataactgtgcatgttgtgcacacgtaccctagaacttaaagtataataaaaaaaatagtaagaaaatgcacgcacacaaaaaagaataactgacctggaggaacacctgacattttataccttactgtggtaaggaagaattaacagtgtcctggactcttgttctcatggaaatttatacaggaaagctgtctgacccaggttggttacttatgtgggagagatataagaaaataagcagcttgggaaggcactgtacaccataatctaaggcacttttcatttatggataaatgtttttagatggctgtgacaggatagaaggagagaagaaacagcagatgttacaaagaagaaattgtaaaattcaaacagcagagctacaatggtggaactcaatcattggccaaaatagacctactatttaaaaactgtcagtacgtctaaggtcaattggtataaaatatgacttctgtgtttcatgtcccaattgctgagccttagtttaaggaaaaaataattttgataggcaatcagagagtttctccactctccattggcactgtcttattatgtagagtgcctcattagctactgttgctctcataatactattctgttataggactaacaggttcatatgcccactgcacagtaacagtccaagtacactgagacagcaagatttgtggcagaggaagagtttaatgatctcagggcaccaagtgagaggatggaaggagactcagattcatctcccccgaggagttctgggctgaggtttttaaggggattagggagagcgaggggttagaaaattggggtcattgagtggctggggtaagagggatgaaatcctcaggatgtggaagctgcattccttggtgagggagcttctcatggggtcctcttcagatcagctggtgtcagtagttttgctgatatgcaggacctgaaagaatgtctcaaagggaaaacttaacattttgtgatgttcaagctgttatctatggagcatttaaagcgaactataatcttagagtctacatgattctaagacaataggcaaatagctatgaggaaggggtcggagagcaagctgacctagtgatggatgctgagtgtgttgcaagcttgctttatttttgttttcccccctctttgcttccctgataaatgttataaagtttatagggacagtttcaaatctgtcatttccaaaggtgaatgacattcatccatttgtttgttccatattatttcttgagtaccatctatgtgctaggcactgtgccaggcatgtggatgctatggcactctccctgcccttgaggagtttccattctagttgggagccagcctagcaagggtgtgtgtggtcagccctagggtgtggacatacacagcaggctgtgggagcagagaggaggctatggaacccatcttgggagccacagaaagtctgaaaatgatatcagactggataggaagtggggttgaaaaaagctttgaaagtggatatagaatatccgttaccatttttaacttagaggtaactgaatgtgcagtctctcaaagatgaactaaaaatccaaggtccaggaatgaaaaaaaaaacaccccaggatctagtgaggtaagacatggtggcaccagccaaactggagaactaacatggtagagggcctgcaaagccaagggacagcctgtattgaagaccccaggccgggcgcggtggctaacgcctgtagtcccagcactttgggatgctgaggtggctgaatcaggaggtcaggagtttcagaccagcctggccaacatggtgaaaccccatctctactaaaaatacaaaacgttagctgggtgtagtggcaggcgcctataatcccagctacttgggaggctgaggcaggagaattgcttgaacccaggaggcagaaattgcagagagccgagattgcaccactgcactccagcccgggcgacagaatgagactctgtctcaaaaaaaaaaaaaaaaaaaagaagacctcaataatggagcctacctgtaatgtgaattttatgtacattagcatcatagcaggtcagagatgttttagagctttgctggaatgaatctatgacttaatgaaaagtgagtataaattggactatgccttgaaggaggcaatggtagcaagtggatatgccaggaggtatggaaaagacttttctagtcatgctcaaggcttgccaggctgagttgtagggtctaaaatgcaggatgcaaaataccctactttcctcttcacatgctacttttttacttctgtttttcttctcactcatcccttttacccttttgtgtgtgtttgaactcttcccttttttcttttcctgttccccccaatgcctggctcttgcctcagatgacaatttcatttctgtggtgggcctcggggaataaggaggctgctgcatctaatggagatggaaccaggtcatgtcaacactcagtgacagctaagtgtgttgaggtgtgacaaaatcatgtcaggaaaccaacacatatgatggcaaactcaattgtttgctcattttaatgacttcatttcaatcttattcctaacacatgccaaatctgaaggaaggaaagagtgtcaaagttgaagccatctgtcttcttgaattgacttgcaactccaccagaccatgcacccttgcacctttcaaagcgccatgtgtgcaccaatttttgtttagtgtacctgttttcccctctttgcctatttccttttctctattcatcttcattaggccatcctagaaaaaaatatctggagcagatgatctatttccccagtgactctgggggggaagctgagcacctcatgtatatcctttccctctgggtctgattattggtttggcttgagctagtgccatcaggttatacttgtacattttgggagcataaccttgactcaaattgcacttctacgtttagcctggccaaacatgggcttgcttcacttttggctttgttaatcgattcttcagcttccttgctatgaaattgaaatatgtttcccagtagctgcatttataaatgctaattagttattgattcacattattatgatttagccttgtgtcactttctacaataaaaagtgtatacacagtgagtgttagatttcagctataaagcagaaatctatccttttgattaataacacttctatgatacttctactcttctattcctgtaatttaaaatgtttatttcctaatcatctaccatcacctcccctctcctctggtgactgatttcctttgcaggggcttgtcattattgcaccttgaccagtgctctggctgtttctagtggcagtctcttgatattatcagatgtggacaagttataacaacattattcatattgctactggctttcaatgtctgtaaagaaaccatgtagagtcttctgttttgaaaattcttagacgtgtgtcttccagttggcaaaggagtgagctagaagttactccattagcagcacccaggggatcagaggtggtttcagaggcaagaagtttttctaaaaaggttgatagttacttcagtctgcctaaagagggtcctagaatcatgggatgtcactctgttgggcaaatgccaatttcttccctttcctatggattctgcagacacttcgttttctcagaagtgtgatctcagcaacctcaggttggtggaacaaaacgcctcatgagatgtgaacatcttttgaaagaaagattgcagatttaggtgtcagccagacccaggcctggagtctgatctccactgcctggtaccctgggcaggtggccatcatttagattcagtttcctgccttgtgaagcaggagtcaccctgcctgagctgagtcataaggattggcgcaaaacgggctcaacaaataggagccaccgtcaccatcctcctagcccatttgctatatccttgcacaaagtttacgctttttttctctagatgctgggcagggcccacattaagcaaattactgtgctctgcattgtggtaccagaatagatactgtattaattccctacagctgcctagataacaaatgaccacaaactggctggcctaaaacaacagaaatatattttctcacagttctggaggctagaagtccaaaatcaagctgtgagtgggaccatacccccctgaagactcttgggaggaatgcttccttgcttcttccaggtcatggtggttgctggcacccccgtgtgttcttttccttgcagctgcatcactccagcctctgcctctgtcttcacatggcttctctcctgtgtctcttcacatgattcttcctccctgtgtgtttttttgtgtttgtgtgttctctgtgtctccaaatctctctcttcttatgaggacaccagcgactggatttagggcccattcatcttaccttgattaagtctgcacctgttcagatggacataaattttgggggaacgctattcaacccagtatagatacaaggaacttagagttcaggggtgaaataaatatttaaaagccaagtcataaacaaactggaatgaaataaatgccacaatagaagcacaagcaatgaactattgaactcacctaactcagtgagggtttgctttcattgaaatatgagtgaaaccatattttgatgacatttgaatagctacaatgtgctgttgtgggctgcgtgttttcaagagattatttcggggttgggacaaggctcatatgcactcctatttacctccactccttagaagatcctccctacacacacacacacacacacacacacacacacacacacacacacacacatgcacacacaattcacccacgctacactaggacatccgggctctgcagatgactgctacctggatttatacttgtttcttccttctaatggcgaatgtgattttgctcaaggattagagtttaaccagtttgaaatagttcatctctttaataaatacggaataagatggagaaaacgttactccccggagctccagagtgcagaggaaggtggaccagctagatggagctttccccagggggatctgcagggctggagatttagcatggtgttctgcctgcatgccagggggccacacgacgatcatgtgggtgatggcaggaggcacagttgggctgagaggacagaaccatattggtgactctgaagtctttggtaaagtgaccagctttatgagtttgttgtggttgcattcctggtgggaacccagtggaaaggcagagtttgactggcgctacaagatacagaatggagcaggctacagaagcaggagcagagagaagcacaaggccatggcccgacctcaggtgtggagatgctggtgccttgaggcggggtccttgaaccttctctgggcagggaggccttcttttgttagttagtgtgctccggagatactgaatcatagtgtattggtataggctgggaagtccccttcctgcaagctggaggcccaggaaagccagtggtgtagttctagttcaaacccaaatgcctgggaactaggagagctgatggtgtaagtccaggtctgaatctgaaggcctgagaaccaggagtgctgatgtctaagggcaggagaaaatgaatatcccagttcaagttgagagagcaagttagctcttcctctattttgttctattcagactttcaatggattgggtgatgcccacccactctgtggaggatgggtcttctgcactcaggccactgattccaattctaatctcttccagaaagcccttcacagacacacccagaaatcacgttttgccagctatctgggcatccctcagcccagttaagttgacacctaaagttaactgtcatgctgcactgaggacacttgggttaggtataaagtggcttgttcaaatttagaaggaaagcatcttaaaccctaatagatgaaagaggaaaagtccgcacacaactctaggggaaacccaataatacaccaaactttaaaaaaatttctaaatgaagaattaagtcatgaaataggggataagaatttgtgtaagtttgcctaaatagacaaggttcagagagacattatctatagcagcaggggaaaaaaggacccccagagagcatcagatacatacagcaggtgcaggacaggtgcagcaccttccacttccctttgttctgcagaatcaccaacacaggtggcacttactccaaaaggcagatcttatcttgagttcaggcacaagtcaatagcacagaagcagtgatgagtgtctggtccataagaaagagataagtgtgcaacttgggggagagagtctgtcagttcaggtctaagggcaattaacatggaaacgattttagtgtgtggtcaagatctcaaaaacaggaattcagctctggaagaagactaacagaatccctagaagtgggtcagatcgcaggtggctgggggtacaggcagtgccccctttcaagacaccagggagctgtaggtgtgggaggaaactccaggtgcccatgatccccgggtagaatgggccagagaggaagataggctcccctgtagggtagattcagaaagcagctatgaaatctcatccctgaaactgtgaaagactgttaccttctgtattagtttgctagggctgctgtaactaataatgacaaacttggtgacctaaaacaacagaaatgtattcttgtgcagttctggagccagaacttctgaaatcaaggtatcggcagggtcaggctccctcttggaggatctgggaagaatccctctttgcctcttgcagcatctggtggctctaggagtttctgtggctacttcactctaatctctgcctctatcttcatgtggccttcttcccttctttctgtgtcttttctgtttttgcttttttttttttttgagatagggtctcactatgtcacccaggctggagtgcagtggcacagtctcggctcactgcagcctcctcctcccaggttcaagcgattctcattcaagcctcagccacccgagtagctgggattacaggcatgcaccactacgcctggctaatttttgtatttttagtagaggcgaggttttgcctgttgtccagcctggtcttgaactcctggcctcatgttatctgcccacctagacctcctaaagtcctgggattataggcatgagccactgcgcccagcctgtttttgcttcttataagggtgttacaataggtagctagtcagacatgagtagtgcaggagaacaacccccaaccaggaatgtcaggccaccattagatgatggtcaggtggttgtcaaactctctaaaataattggttgcggccggcaccagggaacagcagtctcccaatagatagaaacagctgaaactggtgatcagcagcttcccagtaagctctctaagagttgacctagtgggctcacacgtgagcactaagaggcaaaatggtggcgtttaataggcatgtgactttcctctaggaactctcaactggtaagggaatgactcatcaagtgagcatgcgtacagctttagtaaacacactgcacatgcagcccctcccaagtgctacttccctctgttctacaaaatcaccaacacaggtggcacatactccaaaaggcgtatcttatcctgagttcaggcacaagtcaatagcatagaagcagtgaggagtgtctggtccatgggaaagagataagtgtgtaacttgagggtgagattctgttggttcaggcgtaatggcaattaacatggaaacgattttcgtgtatggtcaaggtctcagaaacagggattcagccctggaagaagactagcagaatccctcgaagtgggtcagatctcaggtggctgggggtacaggtagtgccactgcacatgtggacagcgcaccccaagaatcaagggagaaagaatgcaagatcccagaagtatgccaaggtataaaaccccaagtcaaatgtcaaactgcgcatttgatctctcaagttgcccacttggccctcctccaagtatactttccttcctttctctcctgctctaaagctttttttttttttgagatggagtctcgctccgtcacccaggctggagtgcagtggcgcatctcggcaagctccgcctcccgggttcacgccattctcctgcctcagcctcccaggtagctgggactacaggcgcccaacactacccagctaattttttgtatttttttagtagggacggggtaaagctttttaataaactttcattcctgctctaaaacttgccttggtctctccttatgctttatgcccctcagtcaaattcttcctgaggaggcaagaattgagattgctgcagacctgtacagattcaccactggtaacaagggcactagtcattggattgaggttctgccctgttaatccaggaggttctcatttaaagatccttaacttaattacatctgcaatgacccttttcttaaataaggccatcttcacaggttctaggcttt

SEQ ID NO: 65 - DNA, 2226 bp, Homo sapiens
ctcgacccacgcgtccgcgcgccccaggagccaaagccgggctccaagtcggcgccccacgtcgaggctccgccgcagcctccggagttggccgcagacaagaaggggagggagcgggagagggaggagagctccgaagcgagagggccgagcgccatgcgccgcgccagcagagactacaccaagtacctgcgtggctcggaggagatgggcggcggccccggagccccgcacgagggccccctgcacgccccgccgccgcctgcgccgcaccagccccccgccgcctcccgctccatgttcgtggccctcctggggctggggctgggccaggttgtctgcagcgtcgccctgttcttctatttcagagcgcagatggatcctaatagaatatcagaagatggcactcactgcatttatagaattttgagactccatgaaaatgcagattttcaagacacaactctggagagtcaagatacaaaattaatacctgattcatgtaggagaattaaacaggcctttcaaggagctgtgcaaaaggaattacaacatatcgttggatcacagcacatcagagcagagaaagcgatggtggatggctcatggttagatctggccaagaggagcaagcttgaagctcagccttttgctcatctcactattaatgccaccgacatcccatctggttcccataaagtgagtctgtcctcttggtaccatgatcggggttgggccaagatctccaacatgacttttagcaatggaaaactaatagttaatcaggatggcttttattacctgtatgccaacatttgctttcgacatcatgaaacttcaggagacctagctacagagtatcttcaactaatggtgtacgtcactaaaaccagcatcaaaatcccaagttctcataccctgatgaaaggaggaagcaccaagtattggtcagggaattctgaattccatttttattccataaacgttggtggattttttaagttacggtctggagaggaaatcagcatcgaggtctccaacccctccttactggatccggatcaggatgcaacatactttggggcttttaaagttcgagatatagattgagccccagtttttggagtgttatgtatttcctggatgtttggaaacattttttaaaacaagccaagaaagatgtatataggtgtgtgagactactaagaggcatggccccaacggtacacgactcagtatccatgctcttgaccttgtagagaacacgcgtatttacagccagtgggagatgttagactcatggtgtgttacacaatggtttttaaattttgtaatgaattcctagaattaaaccagattggagcaattacgggttgaccttatgagaaactgcatgtgggctatgggaggggttggtccctggtcatgtgccccttcgcagctgaagtggagagggtgtcatctagcgcaattgaaggatcatctgaaggggcaaattcttttgaattgttacatcatgctggaacctgcaaaaaatactttttctaatgaggagagaaaatatatgtatttttatataatatctaaagttatatttcagatgtaatgttttctttgcaaagtattgtaaattatatttgtgctatagtatttgattcaaaatatttaaaaatgtcttgctgttgacatatttaatgttttaaatgtacagacatatttaactggtgcactttgtaaattccctggggaaaacttgcagctaaggaggggaaaaaaatgttgtttcctaatatcaaatgcagtatatttcttcgttctttttaagttaatagattttttcagacttgtcaagcctgtgcaaaaaaattaaaatggatgccttgaataataagcaggatgttggccaccaggtgcctttcaaatttagaaactaattgactttagaaagctgacattgccaaaaaggatacataatgggccactgaaatctgtcaagagtagttatataattgttgaacaggtgtttttccacaagtgccgcaaattgtacctttttttttttttcaaaatagaaaagttattagtggtttatcagcaaaaaagtccaattttaatttagtaaatgttatcttatactgtacaataaaaacattgcctttgaatgttaattttttggtacaaaaataaatttatatgaaaacctgaaaaaaaaaacaaaaaaaaaaa

SEQ ID NO: 66 - DNA, 954 bp, Homo sapiens
atgcgccgcgccagcagagactacaccaagtacctgcgtggctcggaggagatgggcggcggccccggagccccgcacgagggccccctgcacgccccgccgccgcctgcgccgcaccagccccccgccgcctcccgctccatgttcgtggccctcctggggctggggctgggccaggttgtctgcagcgtcgccctgttcttctatttcagagcgcagatggatcctaatagaatatcagaagatggcactcactgcatttatagaattttgagactccatgaaaatgcagattttcaagacacaactctggagagtcaagatacaaaattaatacctgattcatgtaggagaattaaacaggcctttcaaggagctgtgcaaaaggaattacaacatatcgttggatcacagcacatcagagcagagaaagcgatggtggatggctcatggttagatctggccaagaggagcaagcttgaagctcagccttttgctcatctcactattaatgccaccgacatcccatctggttcccataaagtgagtctgtcctcttggtaccatgatcggggttgggccaagatctccaacatgacttttagcaatggaaaactaatagttaatcaggatggcttttattacctgtatgccaacatttgctttcgacatcatgaaacttcaggagacctagctacagagtatcttcaactaatggtgtacgtcactaaaaccagcatcaaaatcccaagttctcataccctgatgaaaggaggaagcaccaagtattggtcagggaattctgaattccatttttattccataaacgttggtggattttttaagttacggtctggagaggaaatcagcatcgaggtctccaacccctccttactggatccggatcaggatgcaacatactttggggcttttaaagttcgagatatagattga

SEQ ID NO: 67 - DNA, 67832 bp, Mus musculus
  misc_feature (26053)..(26112): "n" at positions 26053 through 26112 can be any base.
  misc_feature (28892)..(29324): "n" at positions 28892 through 29324 can be any base.
  misc_feature (30179)..(30757): "n" at positions 30179 through 30757 can be any base.
  misc_feature (32761)..(32780): "n" at positions 32761 through 32780 can be any base.
  misc_feature (43840)..(43859): "n" at positions 43840 through 43859 can be any base.
  misc_feature (57867)..(57886): "n" at positions 57867 through 57886 can be any base.
  misc_feature (60656)..(60675): "n" at positions 60656 through 60675 can be any base.
  misc_feature (61916)..(61935): "n" at positions 61916 through 61935 can be any base.
gtgagatgagcatacataagcgtctgcctgctcggctggttctgaggtccgaaggggctccactccggggcatgggtctccatggagctgtaccctgccgtgaccactttctatgcccgcaaagcttcctgccaccctctgctacaagcaggatggttttgcttgcttacccaaatgccatcccattttatactaatgagacccttttaattgttttatactttaacatgtctttgcatagtattttccatatatatgcttatgtaagtatatgtctctgtgtgtgtgtgtcctctagctggatagctgaatagaaggagactacccggcttctagatatttgtgaatctcccaaatgactgtttcctcatctttccaacataggagagttttgtggtcctgaggaagttttggaaaagcagccaacctgggaaggaggtgatgtgcttagcattttccaaaaagatacaaaagcaggcatggcctaaaataacacggaactagaaagaaagatatcctgtgagcctggcctctgccaatcactagcatgaatgaatgcatttatttctcagtaacggtgatctaagaagaacatcagatagtagctgctaccctcttgaatttgtggggcagtgctgatgggaagtcaagatgaaagagtcatacagacatcttagtgacaaggcctgcctcggtgggggagtggggaaatcacgaccgtgttcacctactctgtggtttacacgccatgcatggccttcagtgctgggcagtgagaagcctctgctttagtgtgagcagagggctgcattcccaaacaagcctgtttgttattgttgattcttctgaagacaggagatcctaatttggctgagttagtccaatcaggaagaccctttctgctttaacctttacaaaaaagtaatctcatgcaagccagtctttaaacaaagaaaatttagtagtgtgtgagtgtgtgtgtgcattgtgtgtgcactggtcaagaattttcttaattgccaatgatgcaggagggcccagaccactgtgggtagagccatccgttaggcaggtgagcctggaccttataagaaaagtagctcagcaagccagtgggcagtgtcccttgtggtcctgtttccaggctcctgcttaagtgtcagtcttgacttccctccatgatgatctatcaccaataaggttaaatgaattcatttctctccaagttgcttttgggcagagatttttcatagcaacaaaaagctaactaggcgagcatacgtgtgtgtgcactgcacttgcaaggagagtcatgtgcgcatgtgtgaaaggcagggtagctttgcagttggttttctcctttcctttcacctttatatgggttctgggaattgaacccagatctctaggtttgcacagcaaatgctttgagctgagccagcttgctgccccgtcatggtttttcttggtgcttgtctttctgctcccaccttacctgctgttctgatttctgttgagagctctcggtctgtttcagagaatggaggcttggcgtgattcatgaattgtgactaagctgataattgtgtaagctgataattcctacttttatcttctaacaacttatttcctgaatgcttaatccggtgcaggctgccttgttaagtattctacatgctgaaaagttataaaatgctcagaacaaaggacgggcactgggggctggtgagatggctcagtgagtaagagcacccgactgctcttccaaaggtccggagttcaaatcccagaaaccacatggtggctcacaaccatccgtatcgagatctgactccctcttctggagtgtctgaagatagctacagtgtacttacatataaccaataaataaatcttaaaaaaaaaaaagaatctttaaaataaaaaaaaaaaaggacgggcactattataaattgtgatccttttacaaataaggaaactgtggttgcgaaggggttaaataacagcttacagtccagtggcttttccgtgctgagcaacagcttcagacccagccctcagacccacccactgctattcctccttggtaaaactgccttacttctcattccttccagaagttgtcaaaaggagcgtagcagtgagatcctactttagctgcaaatgagagtccctgcacttccaaaaccaggttctcctaactcctatcacgcactggtgccaggattcaccctgccttgttgcggtctgtcagtcatctcagccttggagcctctgccttcccctctcagaagcaaattacttatcagctcagagctgctacttctcttggggcagccaggccaggggctttaggttggttgtgaagacactgaattaaacaaacttccctgaatcctcaagctgagagaccacaactgcctgaggtgaaccaggcctcaagtgaatttggagtaattcatttctctcttttccaaaatgacaaaacggcccgtgcgcatggactagacacatggagttttctcaggttgcataacaggctggcctcccgggccaaaaaagacacgcttggtttcacatatacctctgttcaagcttctagaacatcctcctttctgatttatgtgggtttggcactgacttccagcacttgaactaaaaatgtctgatttccacctcccttaggcagcggatgagctgcagagtcaaatccattgcagaagctgtagttccaagaagaaaagaaaagccgccttatgtaaacaaagccttttaatttgttggttttattaggcagcccatgtactgactttcttcaaggaaactatgggatgctactatttttaaggggagcaccttaagggttattctagtaaatggatgttttttggagcctatgaagtcctgaagaagcccaggttttaggggaaaggtgagagaaaggaccatggtaagtgacagtgggggcagggaggaagggacagggaattccaataaaaactgggtgcttacactgagctggaggctttaacagaaagttccagacagacacacaattggataggagagagagagagagagagagagagagagagagagggagggagagagagagagagagcacgccttactagcatcacagggcaccaacagttcttacacgtgcctgattttgtaaaaatatatttaaggttaaaagacaaattacatgaatccggaagcaaacttggatccccgggtttggctgcaagcgcctttacccattcaaccctcgtccttacctatgattacgttctttttcttccccatcttgtattattgggaagtgaacccctgtgtcactttgttcctatttcagtagatatttctagaaaacacttctaaaacataattctgatactgcgtttcagctaaaataacagtttctcccaagtatccagggtgcagtccggattcagtttccagtttgtttgtttttccctaagtgttacagttttgcttgcggggtggtgagttccaaatagttgaaccaggctccaaacaaacattgtgtcaggttactaaatctcacagccctccactgctgtgcggcttccacatcttccatccctgcccccaccttctccccacccaccctctgcacccctctgtcccctctacccctctgccccttcagtttatttgttgaagacattgcgtcatcttccatattgattacatgcctgtaatgtgttataatgtgaattgaaatcaaaggattgaagagattctggtgttccttttgggtccagcattcttcccacgtgatggtgtatccatccatcagacagcatgtgagtcacctggctgttttcatttagtgatgctggcccccttgaggatcagtgcatagacccacttattcattaggggttggaaagcaggtgttacagtaggcattgtctccgaatggaaaacaaattgtgtcttttttcttctgaattgattatcctacccagaagtctatttgggttaggaaagacaagttatctcattgtgttttcccattttctacacaacagttggatcacaggcactatccaaggaataagaaccaggttttgatttggtaactctatggtctcagtgatatgaaggcatttactcttgttctggtccactgtggcttaggtgatggatgttcatggtccgatccagggagagaggaagcttgagtcagggtctcctctggatctgttgcacatacagctacagccccagtatcttttttgtttgtttgtttatttgtttttgttctttgggttttgttttgttttggtttggtttttggtttttcgagacagggtttctctgtgtagccctggctatcctggaactcactctgtagaccaagctggcctcgaactcagaaatccgcctgcctctgcctcccgagtgctgggatttaaaggcgtgcgtcttccatatcctccatccctgcccccaccttctccccatccaccctctgcacccctctgtcccctctacccctctgcccctttcagtttatttgttgaagacattgcatcatcttccatattgattacatgcccagctcagccccagtatcttaaagagtcagcttccttgcgatgccaggaaagttctcaaccttcctggacattttctgccccaggcctggactcacaaattcagttccttaataggaagtcatagttgcagactgcgactgagcactgaaggtgcgtgttgcttatgggttgggatttgtttctaggtcttttttggtgggcagaaatacatacttgaatgtatatgcttctatctgtacatataaatatcatatttgtatctttctatatgtgtatttgtgtcagtgtggactttgtaatgtgttttaattttaatataaacacatatgtgcatgcatgcatcttgcgctcactcaactggccaggaagaaccacgctgcaacaggatccttctgcacacgtttattcagtcctgtttcttcttgtttatatctctcccgaaccctgggcctctcactcttttatactctcagttcccatccacgcacagcaggccacgtcacctcaccaggtacgcagcttcagctaatcagggcagcaggggcatatctccatcaaaatggattcaccagtatcctggtgcacctgtgcagctctcaagatgtttgtggcttataggaggaagtcaggtgcaagtcatacgacttagctacagtccctggcacctttgggactgctgccacacccgctcctcacatatgcatatttattaacatataagttcttctggatacttcttatccatatttgtgctagtttcatgtatattgctatagtaaaatacctggacaaagagcaacccaaggaaaaagggtttattttagcttacaactccaggctgcaatctgtctccttggagaagacatagcaacaggaccccaagacagctagtcacattgtacactcagaagcaaaaagaaatgaatacatacacactccccttatatagtttaagactccctgactaagaaatggtgctacccacagtgagctgggtcctccaacgttagtcagctcagttaagacaatcccccatcgatatgactacaggtcaacccagtgtagacagtcgctctctgagactgctcacaggtgatctcatgttgtatcaagcccatactcgaagctaaccacaataccttttcctgctgtatttgggtcttaatgattctcttcagtcgtaaccgtgtatctcctttcagccatgtcaagactgcctttgtcgtacccaaggagctaaagggatctgcaaccctataggtggaacaacattatgaactaaccagtaccccggagctcttgactctagctgcatatgtatcaaaagatggcctagtcggccatcactggaaagagaggcccattggacacacaaactgtatatgccccagtacaggggaacgccagggccaaaaagaatgggaatgggtgggtagggaagtgggggggagggtatgggggacttttgggatagcattggaaatgtaattgaggaaaatatgtaataaaaaatattaaaaaaaaaaaaagaatcaaccaaaaaaaaaaaaaaaaaaaaagactgcctttgtctcaacaccacccggaacacatctcataatcactcttttcctcataatacattcaaacatcacagtaatacaccaatgtggcattgaaaagagagtgagcttgtgtttttctaaactttctttccccttactttattttagtcattctcaagctgtatcccagttgtatctaccatctgattaccgaattagagactggagagatggtagatccatcagagggtaggagtgcttgccacccgagcaccggtggaaaagcctagaatcccagtgctgcgggaggcagagacaggagacgctgaagtcttttctttttggtttttgtttgtttgattgatttttgttatcagcttagccctggattcagtgagaaaccctgtctcaaggaagtaaataaagtgacaggagaataggagatcctccaatgtcccccttggctgtcacaggcacttggcacacacatgtgcatgtatgtgcacacactaatacagtatacacacacacacatcccaagcatagaatcacttagaacatttccttttgacgtgactataccaacaatttgttgctatacacactcatttctttctttcctattatttttaagggtttgcattttaaatttaatgcgtattttatagtaatgtaaaatctggaatgctagaccgtttctctggccctgaaggcctcacctttcttctttccccttcctcaaagctcagctgtctttatatagcctgcccttacagttttgtttcaataagtttgtttgtgtgtgtgcacgcatcctcctctcagatgaatgggttcgtgtggttcgcatgggctagctgctgctttgtcttacggttgcctgggcttcgctgaggagggctgcagcagctccatggtcatggatgtttgcacttctcaggccgctgcaattacacacttcacacccagccaacagtgtgatcgacagcctgctctccgcaacctggccaatggcatggtggtcatagcagttggatcagcaaatagcagtctggatttcttactgcgacgaaacagtatgcttttaaccgatgccatcttggtcttaggggtggagccccagcagatatggattaagctgtgtgtgtgtgattcttggtgaaaacagagccagaacccattaatactatgcttctaaatactgactgtccactcgtctatggagcagagtccccatggctgataggatatgcaagcaggtgaatgctagctgtgcccggcatcaagaaaggtttattattattattattattattattattattgtctgacataatgaagggaaccgttgggctttgtagtcatagatcatataccctataaattattatccctccctcaagtagacttagtagaaatgagagagacgctagagagatgactaagaagtcaagagcacatattacttttgcagaggacccgagtttagttcccacatctggaggctcacagctgcctataattcctgctccagaggatctgatactctcttctgggcttcaccagcacctgcacacatgtgcacctacctacacacaggcacacacgcatacacataatttgtaagatataaatccaaggatattaatgtgaagaagaggaggaggaggaggaggtggtggcagaggagaggctttggtgtggcctggcagtcatgccactgtagacctgagcaccacgcttagaatttgagtccggatgagaagaaaggcggaggggaaggtcactgctgagttccaggtgtccttcctggaggctggctgggccactggcagggtacatgcccagaaggtgcgtttgaaactcactggactgtgaatttagtcagctgctctgtaccagcccagcccccatctgccctgccagacttggacctgaaggaaatgcctggttgaggtgtgatcttgggtatatacactacagctctttgcagcccctgtggcctggaattggacacagtttttcagggcgcagtccctggcattgagagattccagccctttaaccacacttccgtgtggggctaggctagcactcctctacatgctcttattcatgtagcaaaggtttggcttccttgtccctgatctttctgtaagccttgggggtttgtggtggttatcgttcacctctgctgtcttcgtcatggccgactcctctggctttgtttctttgggattgaaatttttgatctctttaagtgcaacatggggttaatggagtttcccttttctttctttaaaggtttgggggtttttttgttttttttatgttagtgcagaagagggcaccagattccctggagctgcatacacaggtggatttgagccaacttgggtgctaggaaccgaactcaggccttctggacgagcagcaagaatcctggtccgctgagctctctctcaagacccaagctccacttttcttaccctccactaaatgtattgaggatttttcttcatgctcttaagttctaagtaattaccacctgtgtctgaaatcactgtggataagttccgcgtgctcgtgagttttcagagacttcgggggttccagtttgtatgcttgagttcttatctcattgcactgtggtaactcacggtattggtctttgtttcacttgagggatgcagtgtgaggtcagtcgctgcgtaaagaggcaggcctacaaattgctgtgcaacccaaactggcctcaagttctggatcctcctgtctcagcctcccaaatgctagcatgacaggcatctgccactatgcctggtttaagatatcattttcggaggcgacttatgggaacacgagttataccctaagtcatgcgttagaagcttttgatcagttttcacctgtaaatttgtgttaaaaaaaaaaaaagaagaagaatcctctgctcacagggtgctatattcttaaagtagcagttagcttgggttggttagctgccctggttgccaggcagcaaagcagcaaggagttgagttaacatccaatcagcttcatcctgcctgggtccaagatgaaaatacctactgaggcctggttactttggtgtggtccataaaatgttcccaggccacgggaagacatggcagcttcttcattgatgcaaacaaggctggtttatagaagttaactattatatagtccctgctctattagcctataaaacccaggcccaggtccccttgatcatcctggctgtttaatgatggatatttctcctttaccattatctaagaatggaattgatgaatgtccttaagaagaacaggagtcctggcccatgtccctgtgcccagtatcaatccaggtccttgcttgcttgaccatgtgtgtgtcacatgtctcattacttcccagagctgtgcttctccaccactcatgtgggggcatactctaacttgcatgaggctcagctgagttatcctcaaaatgtatatattatctaatttattatttttgtgtgtacatgatgtagtagtgtccggtacatgccatggtgggtgtgtgaaggtcagaggacgacttgtgagagttgggtctctcctttaccacgagggttccagggatcaaactcgggtcatctggcttggcagtgagtgcctttacccactgagccatctcactgaccgtgagactcagattttaaaggtgtaggtaggtagaagatattctaccgtgaggaagtggaatttgagagtgacctcagtgacccttgaccctttccacctccagaaggggcttggacaggatgaggacaaagaaattatttggaggtgtctaaaattctcccttcttctccatcagtgtgaaagacaggcgccgcagccatgaccacccacgtcactttggaagatgccctgtccaacgtggacctgctggaggaactgcccctcccagaccagcagccatgtatcgagcccccgccatcctccatcatgtaccaggtaatagaaatagcggggtcagtggagagacctggattccagaggtcctgtaaaaggacctgccctgaagtacagggaggaggggtctgtgtcgagaaggtgaaaggtcaggagctgatggagtcctcgtgcactctaggatcccggtggaaggaatagattaactaacaaatgtgtgccagaaccgcttccctgccctagggagtgtttgttgatctgttctgaccccgaattcctgctggcctgttcctgctattgcaccacccggattatggcatccctgatctcatgaattaaatatcgcagcttaggagcctctagagtctgcctgggtaattacttttccttcatgtgcgtgacaagagctcacataagcccgcatggcaacccgaggctcagggaagtgggtcacagttgtttgctttggccctagatcagatcttttgataaaccaccatcccattacatacagctatgactctggcaggcccagtaaggagcgtatccatgcagctagaggccccttggcccaagccccttgtctgggtgtgtcaggctgaatgtcatgttgagaataaatgtgttagtttggaaattggggcaacattgggcctttttgctaagtcttaaatggtgaactatgaataaatataattaattttttttcatttcattcaataattacatatatcagtcacatacttggagattcatttcctaaatttgacttataagtagcttttaacagagatcacaatttcaactatataagcatattttaattttagtgatatgtagagagattttcattataaacaaaatggaaaagtgtaacatagaaatttcttatcccagcatacccttctcagtgttcatgaacattttgttaagtatatatgataaatagttattctttttactaaaatagaaattcattttacatgcatatatatatatacttctaattcatctttttcttaacatttattgtggaaccagctgtggtgactcacagctgtaatcccagcattcaggagactgaaggaagagggttgctgtgagtctggaccagcctgagctacagagaggacttctgtctcaaaaaaaaaaaaaatcacagggagaaaatcttctcctgtggccattactcgggcatcagtgcagtaaaaccaccttatggttaggcggctcgtggtcccttccagcctgttgtacacactgacatctatttcggcttttgctgggtgtttccatcttcccaggctgttgttgtaaaaagtgcatccgtggcctgactcgtgcattgacacctgtgcaccctcaggcacgcatgtctcagtgactgcataggcgccctgcacaccttgacttttagcagctgtttggacttgcttagttagctggaagtatggtttccttgtgcttagatagtttgtttgtttgtttgttttttaattcatgatgacatgcatataaagtcagtgcatttatcccatgaataaataggcaaagtctatcagtaaagccttattaactggaatctaaaagtgccaatttggaattaaatggttacttctgaggcttggttgcgtgaaaccagttaccgatgagaagcaggtactgcctgtctgcccttagctgaccagggggtaatatttaaagccaccgggcagtaggtttccacagaaagcttgcgggtttttgttggcagctgtttgttccctagacacccagccagccttgatgtgttttccaacaaccaaatgtccctcctgtcctctacctccacaggctaactttgacacgaacttcgaggacaggaatgcatttgtcacgggcattgcaaggtacattgagcaggcaacggtccactccagcatggtaagtctccatgacccacatgtgcagctgccccgcagaagcaggaggaaccatgggcagcttcccacaccagacctgtgcttagctcccccgtatgctctgccatagtcaggggacctttttccatcctgaaaaaaaagttcctcctaaaaatgacagtgatgtggctttgcaagatattatttattgacgcaaggaagccgctggcctaaatcattcataaatggaactagttgttttccattcctcttagggtctgaccctaaaagggcagaattctcttcttcccttttatcctcatagacatttgtagagttctagactcctcatctgtgggcccctgcaccatttccctggacctttctcactgtgcgggatgtgttctacaaacccaactcatttgttatgcattgtgtgcctgctgtgagctgattttagagttagtgtggggccagtctcagttctcggtgaatcaagtgcgaaagagacaaggcaaccaaacgccttttctatgcaggcatttcatggtcattgtctcatttaatgctcacacagaccctgtgaggtaggtcattggcagccccaatatctcagctggccaacattgaagcctctcaactgttaagaaattgactcgggggtctcactgctgaatggtggttagttctaaacttaggactctggtgacaaagcttggcctttgaaatatttattgcaggcaaatataaaactgtataaatgttccacattgtgataaaggtttgaaggtcagcttttcaaggggccttgagaaggccagaggaagctaggtgggggaagccactttttagtacagcctcgtaaggaggtaatgatagcatatgttgtacacactgctctttgaaatgtaggcagggcaatctgctgtgtgatagcatcagagcctcataataaccctggggcttgcaaagggatcattatacctattgtagagatgagaagactgaggtctggagaaattaataagcgggttgctcatggtcctacagctagtaagtccttgcatgaacctgggaacggtcctgacctctttctgtggttctctccatcccatggaaggttgaagcagtcagagatgagatggggagggggctaggtgaccatcagcatgagcaaagacagaattttcagactgcccaaaattggggtgtgtctatgtgtggtactgtacgtagcattgatggagatgaggtctagacatggagatcattttgccgtagcaaaataccatgagtaaacggcttaaacaatgggtgtttgctttccacggccctggaggatgcaattcctggaccagctgtcgacagggctgctttctcctgatgtttccctggctactcaggctcattcctcccaaactcctgggtgtcagatgtctctgtgtgttacccaagtttcctctctttataaggatgacagattgagtgagagtctgccctcatgatctcctctgagcttcagtcacctttcaaatgggcccacctagaaacagagtcacagtctcaagcctgtaacagagacgactttcattcatttcctcaaagtgcagaaaggaggctggagacgaagctcagctgtttgagtgcctgtctagaacacacaaagccctggcttgtatgaaccaaatctccagcaccaaataaactgggtatagtctggcaaatgcttgtaatctcaactgtggggaggtggaggcaggaggatcaaaagttcaggatcactttctcagctacataggaagcttgaggcaagcttggaatagagaccctatcactaaagggagccgaactcaggttcagccatgcttgatctgtaattactcttggaatgagctataaagaggaatgaatggaacagatacactggacgagagtctcaaaatgattgttactggaagcatgaaagggtgggggcgaggatttcagggaacagctgtaatgatcgtatacacgagagaaaccgaaggtcaactccagctgccataatgattctttggggtcggggaagcagaaccagactgaggtctctctgagataccaggtcacaggctcaggcaggcaaatctaaaggaccggctggctctaaacgtgattctgtttgttatctgctgctgctgtggcaaattgcataaactcactgcttagtaggtagattgcttacctggcattcacaaagcccgaagtttggcccctaacacccacatacaccaggcatagtgggaaatgttgtaaccctagcacctgagaagtagagacaggaagatcagaagttcaaggtcatccacagcgtcagaaatatatctctatctctctaaatatacacacacatatatgtatatatacaatatactatattatacatataatttacatatataaaagatggccaataactcaaggttcccaaggccacatccagagctctttccaccacgccatcttgacctctgtattctgggcttgttatgtaacaactatggctgaactgtctagagggcagagtgcacatcttggttctcagttctgtttctggcacagagcctgggatctaaagatgcttgctgcagcctttttttttttttaactgaatgaaattatgcgtgctgagggcactcggggtggggggtgggggctgagaatagccacgtgttccttacattactgccagttcctcttttagacacgtgtgcccaaactgaagagaaagcaggcagcccatgggttgctctcggttgtttccctcagggacagcatgttactgacttcttaattaagaatggaagctgttgctgttgagcagattcacaataagtagcaaactccaagttaaattggattctgcctttaaaatgtattataaagtgaatatgataaatagatttaaattttaaagttcatttttccctaaatatattttcaaggagagaaagcataatgctaattcttgtctcctaatattctttggagtatgctttccataactgaaaactgcttaaaatatatatgtctatatttttaatcatcttcacaatgttatacaactgtcaccaccatctaatgtcattgccccatacagacaccctagaatttttagcagtcaacccaggtcctctccccacgtgtttccatcaactacaatctgtccgtaaggctgtacctcttgtgggtattttgtccaaaggaatcggagaatatgtggcctttcttctggctttcactgaagttcttattagatcagctattctaagatataaggtgcccgtgacttacctgggaactttgctggaatataggttcgtattcaggggctcagacatccttatcagcaagcgcccaggtgatgctgctcttgcctgccatggcccacatcctgggtggtcccgatgagagcctggagaagtccatggccctagtgttttatgtccctgatgactgctttgccgtttcagaatgaaatgctggaggagggccacgactatgcagtcatgctgtacacctggcgcagctgctcccgggccatcccgcaggtgagaccatccttgcccttcagagaggcctcactgcttctgcagtgctcctccaacctgaacccaaaccagagggctgaggtccccaggtggcgggaagcaaatctgggcctctgacccaaagtgcttcccatagtgctgctgacaaggtccacgcccagggtcttaacagtttccctcccggcacatatagggcacagtattttatttcaaaggcagtcgatgtctcttgtcacccaggctgtcacaaaggatctaaagtagcaagcgtgacattgtctcacttcatctaaaccctgtgcttcagatggttctgggtctttttattggcatgaccatattttataaattcatatcgtttccacaaaaccgtattgttctcattttttacactgtcttggacttgttgaaaatacagatgattttattatcattgacatttttgcataattagtggattccgttgtaacaaagtcagcaaactatatgcacatcaagtaaacagaggagcccttctctgttccttttagccctcatatttaggggcaactattattaaattttttgtacttttcacattttctgagcctggttttgtttttcttaaacagttgattgtcttaatttttatttatttatttatttatttatttattctctctcacgggaaggtatatatgtatcgtggcatgcatgcgtcagtcagaggataatctaaagaaactggttttcccccattcagacagtcaggcttgaaagcaagtgccttttcccacagaactgtcatctgggcagccttggaattttgtttttctggagaaagagaccaaactggagctatggctcagtggtaaagcatagaggatgagtgttaaacatactcaaggtcttggtgcccgggggcctggattccttcccagcagtattagatagatagatagatagatggatagatggatagatggatagatagataggtaaaattaaatataatatgtgtcaaattatacttaactgttctgtggcctttttgcctcttaggtgtggtgataccttttcatagtcactacagagatccaccttagcccttctaatgtttgtaatggtatatgtgtacgaatatatatggttgtatcactttgtccattgaatgacccactggcagttatctagccattgataatcataaaacattatccttgtccagtgtatgtggtactcacgtgtaatctcagcacctagaaggaggaggcaggaggaactttagtttcaagccagcatgggctacataatgattcactaaagaaaaaaaatgcattggctcactctcacacccagccagcctattagcaggcgtggcacatgtgtgttcacagaacatatggcatgtgatactaaggtacatgctgactaaaagcaccagacagaggaaatgggtccctggatgactcagcttaggttacccatcattaacttggatatggctggggagactggttcatggtcgtgtgcatcgggataagaggagagcacatgcatggacatacgaatgtagccaactgtaaaggcgggcacaggccggcagagaaaggagcagggccccatgttgggatcagctggcccctttaccacagccagtctccagggagcacttgtggggcctgtcagtcttctacagctccctcttgctacagtgaccctaaccattttcacccacgacacgatgccacatgtgctccactggtgagccatgctcctgaggtggcagctgggagcccagatgatgaagccgcctttcgatttcacaggtgaagtgcaatgagcagcccaatcgggtcgagatctacgagaagacggtggaggtgctggagccagaggtcaccaagctcatgaagttcatgtactttcaggtgagtggggtgtgggcgggtccacagcagaaggctcaggtgagtggtgtgtgggcgggtccacagcagaaggctcacgaagtcccccacccttccacatctagactttggtgccatgtcattttgtttctgtccagctagtatttttgagagccacctacacccctgtgggtgagccaagccaacaggtgtccccgcctccacagaggatgtgtcctagtgagtttgtgtatgcttggagtgcagagtgacgaaaatacacactagtttttaggacaaggtaaaggcctgagtaaaatacaatttacaacagttgtaggttgcagagtatttacgagtagttgccgctttagggacaatggcatggagctacgaactgggtgacaagaggtcctgcaaagccccaaggcctggagggatcagtgtgttcaagaaatgaaggacagtgagctataaaacagtgaaagcaaggaagaggcccaaggggaggcttggggtgggaggacggggacccatgagatgggcactgtgagcctggagctttggattgggtgatgtgggttgacctgagcttttaggaaatctggccactaggtaggaaatgcttgggagatggaggtgggaagaggctgggatggaggagtgcagaggagcaggagaccagtcgggagctctggaagagtcatttttagaggaggaagaacagggagagggccaagggccttcacagtgagggagataacgtgtaaggacagaaggcgtgggcagccagtcacttcctggggactcactggcaactgtgagggtggtagagaacacctcaaagctggtctgtaccccacacacagcatatacaacccacacccttacatatgtcccatgcatagagcattgacactggccaggctctactgtgtctaggccagagctaggactatactggggaagtgcctcagcctgggtcaggagcaatgctaggtcaaaacccagcactgctgtttcctaactgtgtgtgactcattttatacacatgtgtacacacacatacacgtgcacattcacacatacacggatacaggcacccgcacacaccagtacagggaaatgaagcctgcctctcagggtggtggaaaagataaactcggtctctctataggagcacgggagggccctatgacagcttaaagtgtttcacagctgttgttactgtcatagatggcctgacttcccagagcctaaagtctcttttgggaagcagatccaagagagataaatgaagagcttcccctaaagaggtgcacatggaagaaaggaaggctgggatgattcactgccatgtgcctcgcactgtggccactggctaagcatagaaacagtagcagttaacagtgaaactccccagcaacatgaggctcactctaagcactcagcagccaccgcggccatccacattagttactctaatgccaaataaagcatcaccaggaatctcaaggaagggcaggcgtactaggctcacagtttaaaggtacagtccatcccagcggtataagcgtgttggcaggagcatgaggagtggtcaggttgtgcccaggtcaggaagtagggggaggtggaagctggtctcagctcactttctcctgttgactcagtctgggctccaaggacatggggtcatgccataccacatatacattcaggggaagccttccccgttcagttagacctttccagaaacatacttcctggacacacccagggtatgtttccatcaagttgaaagttgagagtaatcattacaccattgtgagcattgttggtggcgaacaattccatcatggcagaaagcctaactggactggctgtggcctgctggtccttgatgagacgagctggcagttgggcaaggtaggccttggagtggaagggagctcacatctgcacacagatcctcttttccacacgcttccctccctgtgttcattcctcttccaactcctcctcctcctcttccttcttctcctcctcctcttccttcttctcctcttcctctttctcttcttcttcctccccctctattgttcgatatccctccattactacttttgcttcttcttgcttttgaactactctcctcccccatgcccaacacacacacacacacacacacacacacacacacacacgtgacagattttttttgacatcgtatttaccaggtagagtgacagcccagcatgctctagtgtcttcacagagttgggtattcatcatgtaatctgttctagaatgttttcacccctccgaaaaaaatctcctgaaccatcacctcatactacccaacaccctctcccttcagccttaggcaaccactaaatgactttttatctccgtggatttcctgtttggacatttccctacaaatgaagttatacaggacatgatgtttcatgcctggcctcttgcagccggcagggtgtgtttgattgtcgtctgtactgtagcaggtgacagaacctaattggttggttggttggttggttggttggttggttgatttaatgacggaatgccatgtcactgtgcacacacatacaccgtatttcattcatccatttaccaggtgataggtgagggtgtttttcccttcgggtctgttagggataaaaactggacacctgcaagagcttctctatcattgcaggctctttgtttctcttgggttgtgagctggttagggtttggtcaactagacaggagctggagtcatatggagaaaattgattgactgatgagaattctctattgactgacctgtaggcaagtctgtgcaggcatttgcttgaatgattggtgtgggagaacccaattcactgtgggctgttccggggcatgtggtcctagattaaataagaagcagactgctcaatctgtggaccctccgtggtctctgcttcagttcctgcctctgtgttcttgtctgagttcctgtcccaacttccttcagggtagactgcaagctgtgaaatgtaagaaatcttttcttccccaagttgctttgagtcacagtgttgtttaatcacagcagtagacagcaaacgaggaaaagcaggtccctgtgagtggagtgctgggtcacttagtgaatgcaccctaggtgtgcaagtttcctgactgcccctgcagtctgctgtcagctccgcattattattgaggccacaatacaggctatactacacacacatgcgccctcatgagagcctctaagagccacagcccctacagtattgacttggctcttctgtatgcttactccagctgaggccagcctcatgcttccttaggcctcccacagcttcagggcctttgcaggatggctcatgcttccttccttcccttgtcccggtccttctccttctctttcaaattatttccctacaaggtcatttcttggtgacttcagtctttctccctagaggaacagttttgtgagcccttcccaacctccatcccttcttcatttcctgccatatcaagtatgaaattctgctgcaaagaatttattttgttttctatgaatcaattggcatatatgatccttaggacagttttggttttttccttcttgttttgatttctgcttgacctcagcccttacagtggtttcgtggttatatagtatagtatagtatagtatagtatagtatagtagtgtatatagagtatagtagtatatatagtatataggatggatagatagatagatagatagatagatagatagatagatagatagtaggtgctcactaatcagttgcttattgaatgcaccactgtctctcctggcatttcacacactggggccatggcgctttttagcaaatgtgttttagactaattcataaagtaaactcacttggaacaggttctagcacgctgtcacgattagctttagaaacggggacatctcagagaaagactgcctggcacagcagatgagtccttacactgttcctctgtctccagcgcaaggccatcgagcgcttctgtagcgaggtgaagcggctgtgtcacgctgagcgcaggaaggactttgtctctgaggcctacctgctgacgctgggcaagttcatcaacatgttcgcggtcttggacgagctaaagaacatgaagtgcagtgtcaagaatgaccactctgcctacaagaggtcagaagccctccctgctccctggactcttttcactgtcttattccctagtaatagaatagccttcctcaaaccaagctgttgtgacagggtgatctgaggaaggcatttccgagctggggcttcagaagagttattgctggccaggcttgatgtcccaagatggcatctggtcctcacctcccccatctaggggggcagagcaatttctgccatacctacctcatggcaggaagattatcataaggcattgcatggtcgttttctgtgagaaacagaagccagtgtttatgtcccagatctgcaaagtcaggcatacattaccccagttaccccagtggccgcatttggctggatctcttaccagctctccccccggacctgcctctccatggtctcctttctcagataggcccctgcaatggcttcctgccagcccatagcaaaaccccagctttccagaaaaaagttcctccttcctcatgcattcagaaagtcccagccaagattgctatcaatccagcttgctaatccctctgtcagacactgagtcaggtggaggtgatctgagtggatgacagaattaggggaccatgtcatcgttgaaaaaaagggctggagttgggaggtggttgttcatctccaggagccaggatgtagccacccaatgacagggagcactacaaaatatcagctccccagggagttgggtaaggctcagatgagcacctatgtctgtctatacctcctggaagggttgctcatatgactggcacactattcctatcccgccatacttcccttggatttcaagtcagctacagaaaggaagagggcagatgttaaacctgggttgcccaatagttagagcccatctcaaggtcaactcaagatatcacagatggccaccagcacagcatccttccccatatacggcccgccacttccatcaggaccacagccagcatctgtgtcctaaaccaggcaggcgtgttgttcccgttctcacgagttattgtgacgtgagctgtgtcaggctgggttaagttgggacacagttgagcccagcctgtgttctccgtttccctccctccatctgtcatcccatgttgccgtgcaatgctgtgcgtaagaatgttgagggaaagacacaaatcttttctactcggaaagctacggcaggagaatcatcggctaggcctagcagcacaggactgaaatccttggtagctttcatcagttcaagtgagttcgaggccagcctaataaacttagcagaaaccctatctcaaaaatgaaaaatagtaacaaggttgggaacatagctcagagatcaatatgcacagcatgaacaataccctgggtccagtccccagtgctacaaaccaacccaaaaataggatgctgagattttcctgtaatgaacagagcacatgaaaagaaaaaatgaagcttcctgcctgtgattcagttcttctgggctcactgtgcagttcccctggagctcaaggacactgcccccactccctgtctcatcatccctccctggtttccgttaaataccctgagataccagtgggctttttttgtttgtggtttcatgccctttaatacccagcagctgtcaggagggcgtaaatggcctgagagaaaggactgccaaacacattttccattgaccttgggaacacctgcagtgttcagagccagtgacattagcacggtgtctcttgttggctgaggcgtgggaacagattccccggcaccctgttattgcttccttctctgtgtttcagagcagcacagttcctaaggaagatggcggacccccagtccatccaggaatctcagaacctgtccatgttcctggccaatcacaacaggatcacccaggtgagaacaaggcccatgtgggtcctgtctggcatcccacggaagcaatcctagggccctgaggctcagaggactccaaggaacgagacataagctcagtccacatttgtctccactgcccttcatgggagtaaagttacacccagtgacctccccccccaaccccttttagttctctggaagcttcccacacagggctgtgggtcccacatcagtttctaggttgagaacaagcctgaccataggtccattatcagacttcgggcaaagtcagagattcagtttactcatccataaagtgggcatattattttgagactattatgagaatgtatctcataagactagcttggaaagttaatgaagtggagacaaaaagccccccagaatgtgaccaagagcctgggaagggcacagttacctccaccagtttgccaggttgtatccactcggcctctcctcttgcatttgtggctgtcatagctggacctatctctctgacagttcagtaacaacaagagtgtctgcaggacccaggccaacacaagagggattgtgatgctgctcccaagacatcccaaaggcctggccgtagtagggccttctttgtcactagagaaggatatggagtctcaggcccctgctctctgtagagagttcccccagtgctatccaagagtatcctgcaggcctcgtttgcctccatggggagaaagggacagagagaaaccaaccttccgtaactgttgatgctcctggatcctaccaggaaagagatacctacctattgtcactccctccctgggtgggtcttctccctgcctttgtctgaagaaacctcatagagacccttgaaacaattactgcagggcctatctgtaaagctgggctgcccaagagtacataactcagcccttagaactggctgtctgccattaggctcctgtgtgagaggtgaacagggacaaccagctaatgcctagcatccaaggggagtcaggtgtcagcccctgctggcaggaacgctccctcctcctgggacctcagtaggtagggatcaaagtgctcacttattcagcccagctctgggccttctgggtggtgcaggaagatgtttgctccgcctgaccagtgggtggcgctgttgtttagtgtcttcaccagcaactggaagtgatcccgggctatgaggagctgctggcagacattgtcaacatctgtgttgattactatgagaataagatgtacctgacgcccagtgaaaagcacatgttgctcaaggtaagacttcccctcctgacacagcttcctgccaggcgtgcgtgcgtgcgtgagtgtataggtgtgtgcatacgagtgtgggtgtctttaaaggccagaagtgtcagataacctagacctagagttatgggcgattgtgagctgcccagcatgggtgctgggaaccaaatctgagtcctctacaagtgcagtaactgctcttaaccaccgagacatcgctccagccaaatcttttttttctgacgtgctgtctctcactgggatccagggctcacccattaggcctggagagccgaccagcaagctcagagattggcttgcctctccctctccatcataggggttacacacgtgctccaccatgccaggttttacatgggtgctagagaatgaactccggtcttagacttgtgcctcaagcacacgtgactgactgggccattagcccacaatgttggagactggacgtgatattgggcttctttgagggcatgccatggtggaactatttcgtgtccccaaatagaaacaccagtattcagtcatggggcctctaaagagctaatccaattctgttccaagaggcctatctttaaataactaggaggttacatttcaacctctttttatttattaatttatgcatttctttttttgagacattctctctgtagcccaggctggccttggattctcagtaccccatcctcagcctcccaaacgtttgggttacaagtgtaggctaccacatccatcaggtttcaccctcttaaagtcatggccctgtgactttggggcttaaatgcttgccagagttcagggaaacgaaacatattgaaaccatagcccagggcagcatggcttttgtgactcgctcactccagcttccttgggctgtcagaaaccagcaaaggctgccccagctttaaccgcctttcctccctagtccaaacatgggtggtacagcagttatgcccaagtctcatgctccgcaggctgccttacgatactccatctcaaagcaggtttagatgacttcaggttctgggccttcctctcttatcagccttgaatgtctgcatagacctgctcctccccacccccacacaccaccatcaccaacacacacacacacacacacacacacacacacacacacacacacacgnnnnnnnnnnnnnnnnnnnnnnnnnnnnnnnnnnnnnnnnnnnnnnnnnnnnnnnnnnnntccctgcggctgctcttttacctaaagtgactagcaggtgggctgacagtatcagggagtatcagcatcttcgggtggagatctgctctttaacaatggccttcacattgttgcttttctggagaactttgtggtcacttatcattattccagtgcctgcctctcaacacctctgggaaacaacaaggtcctttctctctcggaggatctataaatccacacttggatggagatcctaggctaagccctttgcagatcgtctcaacaacatgtgtgtgtgtgtctgtggttccagcaagctctctagccagcctctctatgtctctgattcctcatctttagaatcgaggccacccttcttaaaccctaaccacagccgctgccccagagtaactgctgtaataatatactaaattcctcgttgaaattaggcacgtgttttctgttttaatttggaaatgtgtgtgattttgaaatagcacgtgtgtctctacaagatgccagtgaatttgtgcacgctcacatgcgtgtgcacgcatgcatcacagcccccatgtttgttagctgctctggaggtgtgatgaggatgttacacgtggcccctttctcattctaggtgatgggctttggtctctatctgatggacggaaatgtcagtaacatttacaaactggatgccaagaagagaatcaaccttagcaaaattgataagttttttaaggttagtaattggtgctggggccaagcaggggcacagaattactggggcctagatccctggtggaaggaaaggatggcattggccagaaagctgtggagatggtcacaggcatctaaagattctcagggaaaaggaagataaagcgcaggccccagctgctctcactaaagcaaggttactgcccacatgtgagtgatgctcaacctcaggactcgctgggattccacgggaggccttgtaagtcttcttgcatgtccctttcccctttcctaaaatctttcctctaaaggcatagttgcatcctagaagtcaaaacctatgtgaattttcattacactctacagctcatggagacagaagaaaagagtagaatttttaaaaagatttcacttttatctgatgtataggggtgttgtgtctggggatgtgtctgcaccatgtatgcagtgcccacagagaccagaagagggcattggataccctggaattgtagttgcaggtggttgtgagcactatgtgggtacctagcatcaaaccctgcctcactgaaagagcagcgagtacttttaactgctgagcctcttctccagccctgaaacactggattctaagtggcttcatgtttgccctttaggcacgatagctcacagcattctgtttaagcgtaccctctcaagcacctctgagggctgaccattgggccccaaaactctctaagagaaactcgcaggtaaatgttaagcctttggtgtttgaacaaagagatgtccgtctggaactgaaccctcgttctgacatggctgtaatgttggatcctgcagatgtgagatctgccctaggggatagtgtgtcgtgacagatactaagtgaggcttaaggagatgtgtgagtcacagaggtcttgtggcttgatttcttagcttttctacagatctgcccagggtgaaaacaggccccatgttgggaaactgctatgtctgccttcaggcaggaggaaggaaggtagaaccaggcctggctccactgcctcctagtgcctttgagaaagtcatgaactagacctcccggagctgagggttctgatcctggcttttgctctatctggtctgatttcctgaagagactaagttccctatgtgtcaatctctgtgtgagtaccgagggagggaggcaggactgactcagtctagttatatatggattgagaccatggatggttgggtgactaggttttatagtacttagaattaagcccagggtctcacccatgagaattaaggcctctatcattaggtatatcccaactttttttttttaactttattttaaggcagagtctcactataatgcgcatgatgcctatgaacataagatcctcttgccttcgtgtcatgaatatctgggagtgcaggcctatgcagccaggctttgctgagatagtatttgtaaagctgctggttctgtacccactgcaggagagacagatgtagggagacagtagcctcccttcctcgtgtcctcggctgtctgcactttaggtatcaggtggacagtctcagatgccaccgcaggcaatagctcactgccattggctcctagtcatgtttggagcagcagaaatcttctgagctggtgaaaggaccctgtatgaggaagctagccatctggtcctttgtttcatctagtcacctatgtgaccctggatcagtcactttgctctctggtgtcaattgcttgaagtacacagttggtcggaggcagaggaaggggcctgtgtgctggttgggattcctctgggcgccaggaccccatggctaccccattaggaatccttcaagctaccggccccaggtgcacactgaagccttccaccccgacggtacagcagccccggcctgcgcgagccatctcacatgctctgtttgcttcctttgcagcagctgcaggtggtaccccttttcggcgacatgcagatagagctggccagatacattaagaccagtgctcactatgaagagaacaagtccaagtgagtgcctgccgtaatgtctcttggctnnnnnnnnnnnnnnnnnnnnnnnnnnnnnnnnnnnnnnnnnnnnnnnnnnnnnnnnnnnnnnnnnnnnnnnnnnnnnnnnnnnnnnnnnnnnnnnnnnnnnnnnnnnnnnnnnnnnnnnnnnnnnnnnnnnnnnnnnnnnnnnnnnnnnnnnnnnnnnnnnnnnnnnnnnnnnnnnnnnnnnnnnnnnnnnnnnnnnnnnnnnnnnnnnnnnnnnnnnnnnnnnnnnnnnnnnnnnnnnnnnnnnnnnnnnnnnnnnnnnnnnnnnnnnnnnnnnnnnnnnnnnnnnnnnnnnnnnnnnnnnnnnnnnnnnnnnnnnnnnnnnnnnnnnnnnnnnnnnnnnnnnnnnnnnnnnnnnnnnnnnnnnnnnnnnnnnnnnnnnnnnnnnnnnnnnnnnnnnnnnnnnnnnnnnnnnnnnnnnnnnnnnnnnnnnnnctgctcaggttttgtgactatgcagtaagtacgtggttaacggtgtggcttggatggttccagctgtgtcctgggttggtaacttgcccctatgtcatctaaataaaccatggttctagggaatctatgttaaggcctgggggaaagttagtggctctcaggggggtgttgggggtggggcgttttttccacggctccagcctttgtccctctgatctcagattcagatttccatctgtagtacctacaactaagagacaactaatggcctattcatgtgattggtccttgccactctctggccagtgtctttcttagtttcacagcgctgacaagtaaacccgaggtctttcccatgctgggcaagtacacttctactgaactatagcctctttttactttttatttggggtcattactcattaagtaaactcagtctgtagcctaggctaaccttgactttgtgatcctcttgctgcagcctgtcttaatagctgggattaaaaagatacccgcagagcctgggtaaggcacaaacacctatactcccagcagttggaagctggaggtaggaggatccggagctcaaggccagcctcagctatattagaaccctgtccccccaaaaactaagatacctgcaaaggggtccttgacctataaccgatatatatctggagccccagagatgaatccttgggaaaattcatgtctggcagtcttagagaaagaggctgggtgggcagatatcagcttctcagacagagtcagaagtttgagcaacagtgtccctctataaacagctcaaagtgaaaagctagaggcgtctaagccagaggaaggttcattcctcannnnnnnnnnnnnnnnnnnnnnnnnnnnnnnnnnnnnnnnnnnnnnnnnnnnnnnnnnnnnnnnnnnnnnnnnnnnnnnnnnnnnnnnnnnnnnnnnnnnnnnnnnnnnnnnnnnnnnnnnnnnnnnnnnnnnnnnnnnnnnnnnnnnnnnnnnnnnnnnnnnnnnnnnnnnnnnnnnnnnnnnnnnnnnnnnnnnnnnnnnnnnnnnnnnnnnnnnnnnnnnnnnnnnnnnnnnnnnnnnnnnnnnnnnnnnnnnnnnnnnnnnnnnnnnnnnnnnnnnnnnnnnnnnnnnnnnnnnnnnnnnnnnnnnnnnnnnnnnnnnnnnnnnnnnnnnnnnnnnnnnnnnnnnnnnnnnnnnnnnnnnnnnnnnnnnnnnnnnnnnnnnnnnnnnnnnnnnnnnnnnnnnnnnnnnnnnnnnnnnnnnnnnnnnnnnnnnnnnnnnnnnnnnnnnnnnnnnnnnnnnnnnnnnnnnnnnnnnnnnnnnnnnnnnnnnnnnnnnnnnnnnnnnnnnnnnnnnnnnnnnnnnnnnnnnnnnnnnnnnnnnnnnnnnnnnnnnnnnnnnnnnnnnnnnnnnnnnnnaggaaggaaggaaggaaggaaggaagtaaggaaggaaggaaggaaggaaggaaggaaggagtggtggggaagagcttccgaccacacctctcagaatgatagaaagccacccaccatgggtacatccatgctaccaggtccttgttgggaaagacagagaggttgcctcccttggctttgctcgactgtgattctgtccttttgtggccacagagaggctgtgatcttggctctcgccttctcacttacctggtgagtatcgtgcactggtgtccagaaacacctatggtaaaaatctggagaaggcagagacaggactcttctttctagccatggtgcctacagagcaggctctggggtgtaggcagccactttaccgtttggtttcacccagaggagccagctatgttgtctgaggaccaggagcagcctgtcccacgaaggtgcctggagccatgacccatgcacaaatcctgtggtttttctcctccccaggtggacatgcactcagagcagcatcagcccccagtacaacatctgtgagcagatggttcagatccgggatgatcacatccgcttcatctctgagctggctcgctacagcaacagcgaggtgagttctgtggctggtccagggtccgcagctgtacagagaggctgggcaagagagggcatcatggagtagggagaacgcgctgccagaggtaagaatgtgccttgttggaagtgtgggctcagagtcagactaggatggatgctcagtatctctgtgcctcaattctttcacctgcaaaaagggccataatgctagtaatgccggaggagggtgggcgtgggcagggagtcagtgatggagagagaaggtattgttaacagatgcagaggtaatcatataggaaagagagtttccttccggctttcttcttgggggtatttgtacttttagtaaatagccactatttaagaaaaatatgggtctaaaatagctaggtaggaggaactacttttaatgttctatcacacagtagagggcctgtgtttgatgataattatgatcctccataggaagaatgccatcaggggtgataggtacaccagggagcccgtctaatcatcacatgttgtaaacatgtattgcatgtctacactgtgtcccatagagatctgcagttgctgtgccaatcaaaaataattcagacgtttttttaaatggaggtaatgacagtgtttacattgaaaggttcactgagataattaatggggtgcctggcatatgtgtcgtgtctggaataaatgtcactaagtattcatcagctgcacaggactcatcccatgtcaccttcaatggctagagacagcgttctgaatactgctcctaacactgtttaaacacgcatagctgtgtcatatgatctttgcaaaaataatgtaaatggaatccgagaagggtaaaaaggccataaagggctgtggagatggctcagtgggtaaacattgccatgcaagcgtgaggacaatggagagaggatctccagagctaacacaaggccagtggtagcacgcgtctgcgacctcagagctcctacagcaacatagggtgctgtggaccagacagcccagtgaactatgttgctgcagtgtcaagcaacaaagagagcctgtaccacaggaaacagagtgtgaaaaccgacaccgcagtggtccgcatgtgcaagcaccataaagatctctcccaatactaaagattgggctttgagcttttgcttttttttaatagaccatatcaattatataatattaattcatagccttaagggaaaaattagataaacaaaaccaatcccatagaatcctaccatcccagaactaactttgattatcatgtgtctttgtgggcaccttcccagagatgcctttctcacagagacgtaatatgcgctgtttaatctgacataggtccctaatctgagcgtccatagtgtggaagaggccacgtttgctcannnnnnnnnnnnnnnnnnnnatttattagttcacaattccaggttagtagtctatcactttgaggcaatcacaaggtaagagcttgaggcggctgctcatgtcaggtccacagttaggcatggagagaaatgagtgcatgccctcttgcttctgctcagttcaatttcccactcaaacacaattcaggacctcctgtttagggaatggtgccacccactgtagacaggatcttctcacatccagttaacttacccatggacatacctacaggctgactcgatgtagacaatctctcattgagacatcaattctacattgtaccaagttggcaacgagagctaaacatcacaccataaatagttggtttcctgtgtatagggggtaatgacaaaatcatacactacagatacgacatttttttcaaaatatttctcatctaacattgcatgagttcattggctatagactacctcagacacctagggccaaaggaacacctttctatgtgcatatgtggtgcagttttttatgagtttcagtagtagcattgaacaaaacactataaactctgattttaaaaagtaatgagcctttgcccatagagaaaaatcaaaattcccatgagcctcttgccacagtgtttttatcggcagagagtgttgtttgatctccatttctgtctaaagataggtaattttggatgaatcattaagattaaatgagggttgcagccttgtgacttctgtttgaaggaagtgttctaaacatgtctgccatggctttcctgcagatagagcactacatggcacagtggttctcaactgtgggtcacaacccgtttgggatcaaatgatttttttcatggggtcgcctaagaccatcaggaaacatagatatttacatcacaattcatatcagtattaaaattacagttatagagtagcaacaaaaataattttatagttggtggtcaccacaacatgaggaactgtattaaggttgggaaccactggcataacacatcagccctgtttgaaactgttaattaaaagcacaaaactgtgggcatcttgacactgcttaagctgcagggaagatgtttgcttgcaacccaaaaagggagagggctctgctcagctgggagcatgcaggtgtctgctagggatggagatgttgctgcaagcattaatttgggaaattacaggaagtgatgatgcaaatttgcaaagatactgtccatcattgatgacaactttcatatattcatgtacacatacatacatatccatgtacatataccgtgtggctacatacatgtatatgatgtggaatgttacacatacagacatttgtgccagatctttttaattggggcattgtagtagtaggtgagctgtgacaccattttggtggtctgcgattagcactgtatgcggagttgactatgaagccaggattcctgtgacgtcacagtgctgggcgaaggtcattgcatgcatacatattcatgtttcatttccctgcaaagatgctatcctggcagttactggtgcgcacttcctactgtgaatacggtggagatagggttaaaccctttgctgaagggctaagtggggatctctatgacacttcctgtggccttcatcatgacacctatcaaagccgagtttacctagcaagggagcataacaaacacacagttcttgcagggaatcacaggaggactgcttatgagcctcaggcacatggcccatgaggtgagtgtgaagttctgtgtcccccaggtggtgacaggctcagggctggacagccagaagtcggatgaagagtaccgggagctttttgacctggccctgcgaggcctgcagcttctatccaagtggagtgcccatgtcatggaggtggtaagtgtcctgaggtgccaggcctcacactggcctgactcacaaggcatccatgggcatctgcctctagttggcactctgtctttcaacataaaaatccatataccatacttacccaactgaaacctgcatttaatatatttacagaagtatatgaccttaaattaatagtttcatcacttaaacaacaaaaatatcacatgtgggacccagcaccaacattaattggctcacaacctcttgtaaccccagcacagtagatagtttgcgtctggcttctgtgacacccacactcacgtgcacttccccacagacatatagaaacataaataatattaaaagtaaatctcataaatgaacccacatctggggctggagagatgactcagccgttaaggctaggctcacaaccaaaagcccacatctgtcaccctgcccgtttagccttcggtattctgactctatgcatcccagttttagagattcaccatatatagactcatagagctcgtgtggtgttttgtgtctggagtttcttacattgtgttttcagggtccagccccatcctgcacgagtcagtatgtttaccccacatcccattagtgctccctggtgttgctagactgctttgtttaccactcctcagttgatgggtgttggctgtttcttctccctccagtactcttggaagctggttcaccccacagacaagttctgcaacaaggactgcccgggcaccgcggaagagtacgagagagccacgcgctacaattataccagcgaggagaagtttgcctttgtggaggtgggtgtgggaataccttgctctccccacctactcccggacggctgctccccgtggtttctggagttattttgatccccaaactgtattatctttttaacttgctgccctttatctaatttttttttaccaatctaggttgttctctgtcaaaagctactaggaaatgatgagggatcgagctaatttgaaatgcccctaaggaagaacagctgctagttcctggggtagtaagagccgcttttagtaggagtgtggccattggttgcttccccgtgctccagtggatgacctcatggccatgggcagcgctgactgtactcactgagttaaaacatgataaatagatgaatacatgaatgtttatgaaaggaggatatgaaaccggaggggaagtccctgagggaggacggggggggggggggggggtaagcatagatatgatcaagacataatgtgtccgaatcagagtttctattgctgcgacgaaataccatgaccaaaaagcaagtagggaagaaatgggtttatttggcttatacttccatattgcttttctttattggaggaagtcaggacaggaactcaaaacagggcagaatcctggagacaagagctggtacagaagccatggtgggtgccgcttactggcttgctgcccctggcttgctcagcctgtttccttgtagagagagcccaggtccaccagctcggggatggccccacccacaatggactgggccctcccaaatcagtctctgagaaaagacctacagctggatctcagggaggcatttcctcaactgaggctccttcctctctgatgactctagcttgtgtcaagttgacacaaaccagccagtagtacataatgtatacatgtatgacattttctaagaataaattttaaaaatatatatggtgagggctggcaaggtggctcagtgggtgagagcactggctacacagccttggggacctgagttcagatcccagcaccagtcacagaacagatcaggatcctacccttaaccctggtgctgtggggatggacatagaagaatagctgggccacacactcggttctctttggctttgtttgttctgtggttggttttgttgacataggatctcattaagttgctcttgaactcacttgctaaccaaggcaggtcttgggactatagacttgttctgtcaagcctggctgaattttagctttctaccggagtactcacacaatacatgttccttcaatggccacaaaaagggggatttcacactctccaagtctccctgagagtctcgctgttttgtgctctcacaggtcttggcagtggccatcttgagaatgatcttggtcattctgatggccatatgggtgactatcattaaccctggcattctcatttcccagagtctaatgttaccaagtattttttcatgtacttattggccattcttctatcagtttgtataagctatttttgaagtctttgctcgtttttaaaggttgttttctgccttctcattattgaactgtgagaattctttccaaaatgtcaccacaaaaccctcaccatgtatgtgatggaaacagcttctcaacttcatgattttgcctcttttttccccttgacaatgccttttgaggaaagctcattttatattttgccagagtcgaatttattcatcttattattttacagtatgccaatgaggactctaagaaatccttacatggtctcaagtcgcaaagacttttccctctggtcttccagccttgcccactctgtatttggaattattctgagcccttctttattggtctcagtgttttaatgatggggttgtctgtgtgagacactgtgcatgtgagtgtcttaggaagccagagacatcggagagccttgagctggagtggtaagggcaatggtaagctgcccaacatgggtgtttggaattgaacttgggtctgtaaaagcagttagtgctcttaactgctgcaccaactccctactccctgtctggatgctttttaatttcacctctggccagaagcccagctctttgaatgcctctcttattagttctcttcacaataccttactgcagccaaacagtctactctttggcttctggggatgtcctcaccatctgacaaggtttcttaccctaattgctagaggtgtgcttgtttgtttgtttgtttgtttgttctgtttctttaatgcttttcagaaagaaacaagcctcacgtgtaagcatgccccccattccgccatttcttcctgttcaacagaaggcttccgtttctcatggacatgcatagcagggctttcttggccattgggccttctgtgcttcgggctggtgcatgcagtcagacacgtcactgtgtgggtgtgagagtgtggccactgtgtgaaggccgattcatcatgtccccaattcgtcacccatgtcccctctgtcctcacaagtcagggtgtcaccactcgagaccgactcaggaggcaagtttactgctggtaaagatggactagagagactgtgtctcctacctgagcccatcattcctatccccactgcgccgagtcagcatccccaccagccagtctcaagtggtaacacgacacacgctcccctcccctcctctgcacaggtagaaacagaggtgtcctcgggacagcttcaggagaagattccagtgtagagctcagatagctgtcagccacatgggggttgaaacagtgatctggtttggtctagttcatgtcagagagatctccaaaaggcacaggagtaccacccagaatgtggttcaaggaccagctgtgatttgtcatccatcagcagtgagattagagcatgggtcagggtgacagtgaccaacttcgtgaagcacagccatgcttttgtggcaggatactagtatcattttctaagtattacttatttctggttgacacgtggtggctataaatatacctgaggtccactgtgacatgtcagtgctttggatgcagtctgtaaaggtcagatcagctcatctgcacatctgtcactttgaattataattatgagcattcaaaaccctctctgagtgactgtttgaaatacgcagctacgtgtgtagtgcagcttccccaccggggcatagcacaggaaattgtctctcctacccaactgcacatgaactaccccgtctccatactgccactgtatccttccgggttttctctctcgctagcccgtgtgtgtgtgtgtgtgtgtgtgtgtgtgtgtgtatgtgtatggtgtatgcatgtatgtggggtatatgtgtatggtgtgtgtgtgtgtgtgtgtgtgtgtgtgtgtgtgtgtgtgtgtatgtgtatggtgtatgtgtgtatgtggagtatatgtgtatgatgtgtgatacatttatgtgcctgtggaggccagagctcaattccatgtgtcattcctcaggagctgtccaccttaggtatttttctccagttaggtgaggctacctgcattaagccccaagaatctaacttgtactgaattatgagcacagcaccgtactcagctttttacctgtgggttcgggagtttgaacttggttctcatacttgtagcacaaacacctcaccaaccgagccatctctccctccactccattttgggttttttggtttttttgtttgtttgtttttttgttttttggtttttttttaattctaagctttgtggtataatgcacctgatgtgatgtggtgaatgtcctccagttctgtccatgttgctgcacatggcatatttcttctttctggctgcatagccttgcattgtgtgcatctaccatggtttgtctctccactcactgtcaaggtccaccccagtagattctgtcctggctgttgtggctggtggtccagttatggttgggttcatttcttcaacctagtggtttcattgtcctcagtcacacccagaagtaagatggctgaatcatgtgatacctgtatttctagcatctcaggaaacaccgtcctgtttccatacggcagaagtaattggcatgaccacccacagtgcactggagttcccctttagcatgactacttaatcacgctaaagtagagctctgctctgtgtgcttttggtaccatttcttacctggcagatttagaggccctggcctcattctctggggtatctatctccagtaccctctctgggcaacatggcaaagcgtggtgagcagatggcttgctaagtgacagctaggctaacccttgccctgtgcccaccaggtgattgccatgatcaagggtttgcaggtgctcatgggaaggatggagagtgtcttcaaccaggccatccgcaacactatctacgcagccctgcaggatttcgcccaggtgacgctgcgggagccgttgcggcaagcagttcgaaagaaaaagaatgtccttatcaggtgggtccttggatggcctcactcgggaccctgcaggactgatgatggggcttgaaggagattgtaaaatggggtcgtggtatcctcagtcgttgagtgatggaatgagataatccatgtgtagacttcagcacacatcgtgtgtagcgagtaggctatgaatattaactggtactaaaatggagttagtgatgctaatgagatgttgctctagctcctcctgttctccctactcccaggtcctgttgtcttaccccctgcatagctcaaagctgagttcttaagtaatgaatggtcaccaaagccatggcagccacttgttaaaagcaccttaacactgttacagcatccgtgagtgagtgggtccaggaatgaatgagcatcccagacactcagcgctgtatgtaatgcaggaggtgctgacaccttgttagggctggaaacagccttgtagacacctaagtggaacctccgtttttccttccccagcgttctgcaagcaattcgaaagaccatctgtgactgggagggaggccgagagccccccaatgacccatgcttaagaggggagaaggaccccaaaggtggctttgacatcaaggtgccccgccgtgctgtgggtccatccagcacacaggtgagcggtttcccggcagcctggctcctctgactccaggccaatcggaccagcaagggcaacatgcttagccgtggggttagtgggatccttgtgaggaagggcggggcttagcagctgctctgggcttttcctgaagtcttgttttgatagaaaaagggaagaccactggcctaagattcaggagacctgggttctagtcctagacacctgtgtgaccttgggcatgttacacaatctctctgtgcctcagttgtctggtctgaccggtgctggtagcaccatatccacctacccagcgatctcctaggcctgtaaagttcgcatattacagtgcaggagagatctgacatggagtccacacacatcactctgtgtgttgtaagaacccagcccctggtaggaaacttggaagttctgccccgacctgctcaatgttccggggcaagtaccttaacccctctcggctctgattatcatcggagaacaaaaactttggatgagatttttaccaacacttaacttttctaatatttccatccattttccaaagacagcccacaggcttggcaagcctcctccccttagagaaaggctggttgtcagaaacactccgggttcccagccagagcttctgcagtaagatgctgtctgtgtttatccagagcagtcttaaaattacacagggtgggtagggtgagggaagaagggtgaaccacgaaattaaattctcactgctggtttaggaaaaggtatttcctgatctactttctgtcaaatttgaaaagagatgagtttgactgtaacccctgggggtcttgcaggctccagaagccccagtctggaagctcctccttacagggcctttcaagcctgtctctgctctgaagtaggccatctgaggccctttcttacccacccttctgtgtgtgtccgcgtctgggcagggctggggctgtgcaggggcaggtgagtgtttggcagggttatcaccccttagctctgcagtattcgatgaccaatgttcacagactgtcttctgcttgtgagacagcccaaagaagcctccgtagacagctctgaaacatttgagggtcagagagcttcctaactctgagtgccctggtgtggctgaatggctctcatgcattttgctaagttctaagaggttggtgcagacagaagaaggactgtggggagggggagaggctatagacagaggacagaagagagagggcatctcgtggacaatctgagagctgcaggttgatcaccaaaagctaagccccactccttgatgccactgggataggttgattgcacagacatttagttgactcctagacagcctcggagctggaagagtcctgagagataaactcacccctccccctatcacagatggagaaactgaggtccagaaaggggaagtgacttgtccaagtcacagggtgagtgccaggtagaggtgggacaagaaccccggtctcctgatacccaccccagggctccatcgcagccttcagaatgcaggaaatgtaggcatctcatagagctgggcagcacactgtcctggtagattaaatgccctgctaaattattacagttggctaaagcattgactctgttcagaataaaccctatttgctagtagttagaattagatgtgaatctagtcaccatggccccctttctttggggactcaaaggccatcatcattagcactgttctttgatggtcagagggaggaaatcggcaacagtggttatcccctccccacagaagggaccctgcctagggtagcctggcatgccgatctgtgactgccaggcccacggtgggtgagacgctaggtcgtccagaagcagcagagtgtagcgtgcttgttgggaggccggagtgtgtcacatgtggcccctgcagttgtggcagctttcccactgtatacaatacctctcgcttttctctctctctctttctctctctccctcctccctgtctctcctaccctcccattccctcttccttctctcctatctatgtcttaggcctgccagtggtccccgagggctttgtttcaccccactggtggcacacagggccgaagaggctgccgatccctggtataacaccgcctggttgggttggtttgggtgcctactgcgggaagcagcaggaacagactagcctggctcctcaaggccattcccagccctcagattcaaagacaaatggagagggggggaaaactagaatagcagaaagaacaaccctactgcacttgggccctttgcatgtagggcactctgtaagcaggcgttaagtgtctaatcagctcctttgtaagtatggatttctacccagaatctctggaagactgtgcaatgcattccaggccaccagagggcaccagcattcactggcaggttcaaaaccgcaggatcagaaacaaagtggttggggggggggggggacctgttttgagctttgtccattgctaactcctcccggtgttagaactgaaagagattgggttgagaacttatctggtccaattcttcctgcgagaaaaggcaactggagcccagagtggaggctttgttgtctaaggtcacacagcaagtcaatggcagtgcctggctttgaacctggctcttttgattcctggttcagtgccccatccatgctgttaccatggtcatctgggaaatcagagagtgacatggatgcccaacacccttggctaagcagggccggcaggaggacccttcactacctgccattgtctggtcacctagggggtgccgtgggtcctaggcagagagctttgcaaagctggtcagtctccctctcgggagacgaggggaggggtggggagctcaaagatggaatgcttgcctggcatgggctgggtcccagaacagcagggggatgggggaagaagaggtttccgtagttctaaagtctctgcctaaatcagtgcttccttaagataggtctctttacaagcagaaaaaagccacaaggaaggtggggaggaaggcaagttctcccttgacatggggagccaccctgaccctctcctttctttttcaagctgtacatggtgcgcaccatgcttgagtcactcatcgcagacaagagcggctccaagaagacgctcagaagcagcctggatggccctatcgtccttgccatagaggacttccacaagcagtccttctttttcacacacctgcttaacatcagcggtgagnnnnnnnnnnnnnnnnnnnncagtttgatctggctggaagctgtagatggagtcattttgctcccaaaggcaaaagaattattttaaagaaaaaaaaaaaaaaaaaagaaaaaagaaaagaaaaggtaaatgaaaagaaaacaagacaagacctttctgtcagcttgaggaggcaggaaaggccaggctctgttacactcattctgactcaaatgaatttggtagacatccattgctagttaggaatcacaccagagatacacgactatgagcccagcatgcactggctcagacgtttgttggtaagcagcagctataaactctgttgaattgtcttagagggtttcatttctgtgaggagataccatgaccatagcaactcttataaaggaaacatttaattggggctagcttacagttcagaggtctagcccattattgtcacagcaggaagactaggcacatgccctcatatcaaggcaacccaataggaggaaaagggccccaaaccaggcaaaagagtcaaagatcagagatagtccttgttcccactttttggagtcccacaggaacaccaaactacacaactataatatatattcaaaagacctaggccagacctatatagactccctgattattggttcagtctctgagctgttatgagccctggttagttgattctgtgggccgtgtttttgtggtgtccttaacccctccttcctcctcctcttccagaggatctccaaagtctgcctaatgtttggctgtgtatctctgcatctacttctatcagttgctggatgtagtctctgatgacagttattctaggctccaatctacgaatatagcagaatatcattacaaatcattttgttgaccttttttaaaaaaatgtttggttctatcctgggtctctgggctctccagcctctggttcctggccctccaggcagtgtcaggcgtgggctccctctcatggcatgagcctcaagttgggcagtcattggttggccacgcgcacagagtctgtgctacctttaccccagcatcttgcaggcaggacagattgtaggtctaaggttttgtggttgggttggtatccctcaactggaagccttacctggttacagatagcaggcccagactccatatgccccatcactaggagtctttgctagggtccccctcgtagattccaaggagttggaattacactattgcactaggtctctacctcaccctcaaagtgcacctccccccaattccagtcatctctcccaatactttctccttctatcccccaatctgattcctcctgttcccatccccactcacccccagttcacccatgaaatctattctttttccccctcccagagagagtcttgcatcccttcctttcctgatctctctacgttatttagcctctcagggtctctgggtcatatcatgattagcttttactttacagctattatctacttataagtggcaatgtaccatgtttttctttctgagtctgggttacctcactcaaagtgattttttttctagttctacccatttgcctaaaaagttcatggtgtcatttttttaacatctgagtaatactccattgtataactgtaccacattttgtttatccattgttgggttgagggtttatccattctaggttgtttccagtctctgactattgggaataaagctgatataaacatagttgagcaagtgtctttgtagtaggataaagagttctttgggaatatgcccaagagtaataatatagctgggtcctgaggtagatcaagtcccagttttctgagaaaccgccatattgattttcaaaatggctgtacaagtttgcacccccaccagcagtggaggagtgttccccttgctccatccatatccttgctgccaagagctgtcacctgtgttgttgattttaggcatgctgacaggtgtaagatggaatctcaaagtcgctttgatttgcatttctatgggggccattttcattcaaactaccatgggtactcattgctccaagctggggaagcttccaggctgcactttagtcccatgccctcctctccctcagaggttgtatggagcaggacagagagaaataggaacccagtgacatggaagtctcaatgtacctgtttaaaaaaaaaaaaaaaaaaaggagtagaggcatctcggttagggaatgacctaagctgggctttctagacctcccaacagtaagggagccagaattaccacacacaggagataagggagccacacttccttgaaagtaagcattgccaggcggtggtggcacacgcctttaatcctagcacttgggaggcagaggcaggcggatttctgagttcaaggccagcctggtctacaaagtgagttccaggacagccaaggctacacagagaaaccctgtctgggggggtgggggggtgggggagggaagaaacaaaaaaacaaaagaaaagaaagtgaacattgataagcgtgttctaaaagcactgtgtgatataaaatcacactttagggatcgctgtagggattttgtagagatttagtagaaatggtaggacggcaaatggtataaaaacttaccagcccttcccacgtaacttgctctgtctcagaagctgacagatgccattccctgtaatcggtactaagctggcttcatgcacaaggcagcaggatccgggaagggctgtatacctagcagtgacagccaataggtagcaaacactgcgatgtgtgagcgctctctgttaagtcaaggctctccctgtgcttccagaggctcttcagcagtgctgtgacctctcccagctctggttccgagaattcttcctggagttgaccatgggccggcgaatccagttcccgattgagatgtccatgccctggattctaacggaccatattctggaaaccaaagaaccttccatgatggagtaagagatgggattgggccaaccaggaagttcctggggtggaatgggagggtggcttgcctctgagctctgtgctttacagaggaaactactgagtagagattaggcaaagtgttccactccaaggtcatttgcctcagccccacagattgacttagaaaggccctaaccccacctgcccttcctgactttgtctacctcttaacagctctgcttagaaaatcaccttgtctaggaaccaagaagtaatctcctaggccaaaatttttaagccagggggtccatcagcatcattgattctgatatctgtgtgcaaatttgaaagcaagttcttcctacttggaggcacggggaacacagagagggagggagcttgtcttcaactccaagccatctgcctcatcactcacacctctttttcccagccagtgtaatttgtcctccgtgactctgtgttccttcccaggtatgtcctctaccccttggatctgtacaacgacagcgcctactatgccctcaccaaattcaaaaagcagttcctgtatgacgagatcgaagccgaggcaagtggcatgcttcctccattcctgcagtctcccaagatgctgggcttatccaatacttaatgattatcagatgggggtagtgtgtcagaggcacttatccagggaacaaaattcatgattgctggggctgtcaaacataatactgtacagtagcctgctcctttctctcctcatcccttgtctgggctacaccatgaggggcttcaaggaccttcatgtatatatacacttcggcttgcaaatggtgccatctagaaccactccaaaggcaggtcacgatctccagaaaagaccatggggcctctggaggcatcaggaatatttggacaagaattcagagttggttctagaaagggaacatggggtttaaatgaacactcctaagttgaccctgtagactccttatctctagaaggtacattgagcatcaagaggttcagaggcccaagcaggaggcctcagttaccgggatatgaagccagcaccatgggttgaagccagcaccgtgcacagcacccactgtgggttctgctctatgtaatatagtgggtgtcagatacaagtacagaaacttttaaataaagggttcgtcttacaaagctgagggcttaataggaagaaatcaaagatggacctcctcctttggctctgcctcctgccctgctgatgccggagcctgatctctttcaagtcccacgttggccaccttctgctccccattcatggatagaagcgacgtctctggtgcttgatgtggggtgtgcccttgtcttcccacagacttcatagtctcctatgaatgccgtgagacaccgcagggcaagactttgtacattaaaaaaccagagggatttaaggaaagctggaagaaagggacgtttctgtctctaagagcatgctccaaattaactctacagagcaagaaaaatcaaatacaaggaggagacaagaaagtctttgggtccacaggctgctagaggtagtcacaacatcagagggtggcctttcatttgtgttccctgaccaaacagtggggagcaatggggagactggttcctgggctcctctgaagccattgagggcaaagggctgacttccgtgcctgtgaatggccacaggtgctttcttcttcttcccctttctgtcagggctgttatgttgccccagaatgcacgtcagtgaaccctgccctggtgccctccccgctgcccatctgtaattaatccagacaggacccgctgactgcctgcttttccccaccaggtaaacctgtgttttgatcagtttgtctacaagctggctgaccagatcttcgcctactacaaagccatggccggcaggtaaggggagtctaggcagtgagcagcgtcctttctttagcctcgcaccttgttcagcctttaaggaaaaatgaagcgatttccacgggctcaggcagtgagacatgttgtgaaggagaatagatggatggcatacaactacactacagttgcatagaagggcagaaactaagcaaaatgaaggacgttcatgaaggaagactgagattctgggactatgtggtagataggcctcggctagtcgaggctatcttaaggaaacagtgtccagggagttaagtaaaaggaggtgagggataggtccagagtgcaggcaaagggaacttcttgtctaagccggagtggggcaggtacaaaattaatagcttgcctgcctgcatcaggctggtgagaagcctgaggtacttcagtgcagtggccactagagggcgagctgttccacctggcatcgttgtaaacacttgatcctggggaggcatctgccaccacaaaatggtttcagaagcacaggggtggcttgacttgacttttaaccttaacgttttaaaaatgtaaatccatggagtgcgtatttaaggtgtgttgagttggagacatgtcaggtttatagacttgtcagtattactgaaagatactgatttaaccccacccccctcccctcatcctcaatggattcctgggttttcaaaccctgcaatggtcctagtcataaaggaaaatacatttatgtaaaagtattgcagttctcgctggaagttgaggtgggccagccagccatcccaaggtgatccccacccccaggggcttctcctccctacccccttggaagtgattggcttcatttgactttgacaaacttgacacatttcaaataggagtcgacgtgcactgcacataaaatgccacgaacatgggatcctaaccgataaacagaacgcacaaaggtacatccatctctaagaagtcacttaataggtgtgagcagatcaggtaggaagcggttaacgacgggggagagagcatttctaagagcattctgagcctgaatatgctgatacttttctgtgtaaacaaacatgggcatgtcacatcctggcgacgctccatacttagtttataaaatctcatcttaggagctagagagatggttcagtggttaagagatcttgatagtcttcagaggactcaagtttaattcccagtaaaagaaaggggaattgaagttcatctttaaagatatatgtccccagctgggttagcagcacacacctttaaccccagcactcggtaggcagaagcagacctgtgagtttgaggccaggccagcctggtctacagagctagttccaggacaaccagggctgttacaccgagaaaccctgtctcaatatatatacacatacatatacccatttgaaaaaaagctctcaacaactttccctgcaaagtgggtgctcttcaaaaggatggaaattgagagaaactggggaattcagagaaagaaagcactagaagggagagtaaccctggctgatccatctgaggtaaaacactgcctcgagtgggagccacctgtggcaccctcagtattcagcagccatattttaatgagggaaagaaatggctgacattttaacaatatgtttcatttcattcaacaaactgaagccactaacatatcagcgtggcatcagtgtaaatactattaaagacatctctgctttctcctagatctcctaaatctattacgcacatgacagcggatgccccctttgaggcgttcagtaggcaccatggttggtggctacagctttggactgtgccattttgaatgtccctttcccacttaaaacctttcaatggcttccagtccatgcagacgtcccaactctctacaagggtctgtggtctcacaagatcaggcctgtagactaacatgatgtaacctgttttggcaaactcttcttttctttaccccgattacgtcctgtttagtcgaacagaccacacttactgtgtgtgggataaatttacctcagccttacgttacctctgcccaaagaaaccacgtacaaatacttcccataatgcctacctccaaatgatttaggttattgctttccagtactagggatactctaccacctatgtctcaatatggaggacagaaataatacacgtgatttataggattggtgtgacattaaaaatagttgtatatgtatgcccttgtgggcgtgtgtgtacactcatgtgcgtgaatgtatgtgtgtgtatgtgtttgtacctgtgagtgtggtgtgtatatatgagtctatgtgtatgtgtacatgtctgtatgcatgtgtatgtgttgcctggtgaatgataaaagctatgcacatgtttcctattaaaaaccatttttccctagattgctcacatttatcagtgtctctttattggaaagtctgtaccttgaggacagacagcaaggaccttcgtttcccctacaccgaaaattttcactgggaaacactaagaatacactcagttgtttttgttatcaattaaggaaagagtatccaccctgggttgcccatcctttactgagaaactctctttcacatactgagcttctgcatccagaaagaagcttggggaacggtatctacagcgacctcaattctggttgagatatttaaggtcatgtgtcccaggaggaccggttgagaagtcatttgccaccctgtttaatgcacctctgtcccacgtctctcttccagtgtcctgctggataaacgttttagagctgagtgtaagaactatggggtgatcataccgtacccgccatccaaccgctacgagacactgctgaagcagagacatgtccaggtatggtgggagaaagccatgacggtgggaacagactctgtggagatagtgtggacttacgtatgtgcccgaagtgtctgcaccaggcatgacagcctcagagtcctacaaacagtactgagtgtccttgggtgcaagttctagacttcctggctcctctgcagctagcctgagaaggactgagcaattccagggcctgacatcctggagtggccttttcctcaccagcactgtcacacagaaacaggtagacccacccctgaagtaaatgagaagagctcaaccccatttaaatgtagcacttcaagctacacctggggtagaaactgtgttgtagaaattttttatcccaatccggagtttctatcccaccttggtcattcagttcccagataaaaggcacacagcttttattatttacaataagccttaaacagcacaagagctgggcagatatctactaagttattacttattatgttttatttgggctgctcttaactcccaacaggccagctctcagggccatgttttcatgactcacccaacacatggtggcttctttccctcctcccttcttttccctcttgtggttctctgccccaaccaggtctctccaaacctatctacctctaatctctagaccttctggtatagaatttaacattacgatctatagcagtggaccaaacctcaacaaaactggtttgtttttatccagtggttttccttaacatttgaccccagatgtagggaaaatgctgccgggaacaagaacacagatcctggttttaaaatgctaatcttagctagaaaggcatagcggtaccaccacagaccctaaacccgccctgcaggtggctggtcagcagaacagcctgtgtgctgttacatctgtgtggttgttgtgtggtcctaggtctctgtgaaggagcagagctgaggccaagaggatattgagctgagcaggaaagaatcaatattgaattctcaggacatccattgccagtgtctagtcgcaagagaggaaaaaacaaggctcactagatgagcaccagaagttgcagtgcagccagaattagccacaggatccccttatgggaccttagttggttagtaggaaatttatcctaagataaataatacctaagagtaatcatgcagtgcctagcaaagcatcgtgcacacagcaggtactccatatatggctattgctgtcttcatagcatctgcaatagtacctatgtggatcccagtggaaattatcttaagctatattttccaccctttaataagcctttcatatgcttgcttttaaaaaccactgccatgaaggcataaagtaggccatcgctaaagtggctacagctccctagggactgtgaacaggaagacacagaaggagcctcaaggctgaatctagggtgtcaacagaagcgttcatcagaggtcagagcttgccccaagcctctgcccacagcctgaatgagttgtatttgacctcagcgggttttatctaaatcagtggttctcaactttcctaatgctgtgaccctttagtaagtccctcatgttgtcatgacccccccaccataaaattatttgatcctattttataactgcatttttgctactagtatgaatcataatgtaaatacctgagatataaccgcaagggggttgcgacccacaggttgagagccatgcatgtaacaccttcgagtagtatagtgcaaaactctctccaggctagccagactcatggtgatgagcatttcattgtactgagggcatttttctctttgtcccacaagcatgcatgcccattacacatacaccatatatgcatataatatgccaaagataaaagattaaatagaattaccattgccaagagattatgtgatgctatctatattctacatacaggcattcccttgccacaataatgctttctataattttagttcagtttgctaccagtgcatcgtatttagttgtcagatatctgtgtagatattacgtaactttctcccacctctgcccttcagctgttggggagatcaattgacttgaacagactcatcacccagcggatctctgctgccatgtacaagtccttggaccaggccatcagccgctttgagagtgaagacctgacctccattgtggtaagaaacggagacccttgtaggctctgctcttggatgcctcagatggatgcccagttggaaatagttgttagctcttctggcctagtttaagagtagcaaggggtttcctttacatctgaccagagagactgggatgaaaggtcattaatggaatgggaataattttaccgttccttatggaccggcagccaggtaagcagagtggaggagagtctccagaagatcggaggtacccatcccccaggttgggccgtgtccttaggatataccaggtgggtcaagcaggcagagtcctaagaggctagaggaagcattacaaggtcacttgaagggcatgtgggaggtgagagcccagaagggttctacagtgggttgtttgttctgcttggtctctatcttgaaaggctggatggttttgagcactgccccgtgtcttcattttgtactatgccccttagagttttcagccagctctgttgcccggtcaggagtaaacctgcaccttccagaaaacagcagctggacttgctccctctcagtcttctttctaagaggtggcaggcatcaagtgcattgaactaggacaccagagtcctacagactcatcctcccagtctgtccctagctctgaccgtgactagctctgtcatcttgggcaagttatatatcttcaccaagcctgtttcctacctctaaagtgaaggacaccttagagtccacttcagagagtcattagaaggacatagtaagaactcatctggaaagaatttggaatgggtctttgtagttgataaatgcttaataagtgatagcttactttttcaagagaagaagggagcgagaaaggactagagggctgcagtgttctcctgggatacgggaatatctgcagcatctgtaagcaggacgtgaaccaaccactcacctgagtcttgcatcacttacaagaaactgtaaaatagctcacattcctgaaatcactcgcctgcctttagcttgggaaatagagttttgtacgcattaaaatgtcctcggtgcttatctctcaaggggtgggagtttgagtttcttctcttttgtttatctgtgtattctggcttcccactaatgagcatatctggaggggggggggcaggtatccacgacctctccccactccctggaagacactgagtgttctcttggctagaacacaatgaaaactcgaagtgtgagcccttgtttaatcagctgagacactgacccccacccagaacatcttctccccggggagcctagggaggaccccctggggagatgctctcctgtgggcaggcttggttcctgtggcctaggcggggcagcctctgcctcctggcagtggcagaaacgaactgaggaatgtgcctttcccatccaccttcaagactgctctaaaatgtgtgagtcaccgcgtgtgacttggggagccagtcacctcgtcgtgcaagtgtgccaagcagggagtcctgcagactggcagcccatgggctgtttggcttctggtgtactcgaaatcttgagtcaacttggaatctttggaagcattcaagaaagactgcaggagctgggacagcaccagactagcactcccagatggcagcaattgctgggcggactacagactcaggtcaacaggtccagctcccctagtcatccgcagagcccccacaagcccacctgactggcagcccactggcccctgctgtatttaattctcagatgcccgctggagtctctctgagctctcagaactgtggtcgctctggtggggctggcctctccttctcctccttcccgctctttggagactggttctttgaaattgcctacctggctgtcttattttcccattttgcttttgtgccccagttcccacatcagcagagttgagtaccagctccttttgtccacccttgcatcaactaacccacgttcatggaacttgaaatcatagaatcacagacctctttccccggctctcgttgtcttccccaaaacagggtaccgcgtgcagcgtgctaaaagggctcaatgatcttagaaatgagctcgttagcgttgccatcagtgttcgtttaccatattgcccgtcctcagcagatgggaacggagctgcagcagaaccagctcagccccgagagacagaagcagagagctctctatctctatccttcgttcacttctttggtgcagagactgactgccactctgtggttgaaacccaggttttagcattctttaggaacatctaggatctgccatccttagcccaccgtagcatggcaacagttgggataagtgtcaaagcaccaggcccagtgctgtgctaatgatagagtcccccacccgccacccatcccctaagactcccctttccaagccatctagttttccatctggggcctgcctggccccgttgctgttagcatttgcaattgcaacctgcactcccagcttacagctatgcaggatgagtttcagagtatccaagctgcagtgttggaagtatgagctgagtccttgaccccaccaaagtagacttgtcaggtgggggaggaggggcccgtggctgatgagacaggagccaaatctttgtgggtagtgacccactgagctccctgggaaagctggtcccgaccatgccagtgtggttttgaatgccatcccaagcacttgttcttgtgtgaccttgggcacatggccttctgatcgtctcccctcggtaacaggaagagcggcaccacggtgtaaaaactggcctcaccaaagcatggccagagtggccttcgatgccccaggacttgagctttttcccctcctacgtagattgtgattctttttggataataatgattgagaggttgcagagcagcatgaagggaacccaattagaagggtgtcattatcactttatttcccagcaaacacagcaccccactctgtgccgacccacaccctgagctcacccctgcctcaatgatcagagcctctgccacacacaggttcctggtcactggggtggagtgcagactataggggtctcagtgacaatgttgccaaaatctggaaatatcctacttcagctgactagttaaccctaagtaggcggtatctcctatatgacactttctgtaagacagagaaatgacctctaccgagatgcagtcacagtattacttaggacactcacactaggacaggcttttcccttaccaattaagaaatcagaaaaagacagccattgcagtacattgagctccatagagacagcgccagggcaagcgcgagccggacaggcactgggcgactctgtgcctctcggaggaaaatcaactaaacatgggcaaaggagatcctaagaagccaagaggcaaaatgtcctcatatgcattctttgtgcaaacttgccgggaggagcacaagaagaagcacccggatgcttctgtcaacttctcagagttctccaagaagtgctcagagaggtggaagaccatgtctgctaaagaaaaggggaaatgtgaagatatggcaaaggctgacaaggctcgttatgaaagggaaatgaaaacctacatcccccccccccaagaggagaccaaaaagaagttcaaggaccccaatgcacccaagaggcctccttcggccttcttcttgttctgttctgagtaccaccccaaaatcaaaggcgagcatcctggcttatgcgttggtgatgttgcaaagaaactaggagagctgtggaacaacactgcaggggatgacaagcagccctatgagaagaaagctgccaagctgaaggagaagtacgagaaggatattgctgcctacagggctaaaggaaaacctgatgcagcgaaagagggggtggtcaaggctgaaaagagcaagaaaaagaaggaaaaggaagatgaggaagaagatgaggaagaagaggaagatgaagaagaagatgatgatgaataagttggttctagcacagttttttttttcttgtctataaagcatttaacccccctgtacacaactcactccttttaaagaaaaaaattgaaatgtaaggctgtgtaagatnnnnnnnnnnnnnnnnnnnntacggtgggaaagagatgaagacactcacttgatccgtggaggaggcaagtcaccaactcccacagccagcccccacttccatatggtttggtttattctgatttccccgcctaagcttcctcctgtgtgattcccactgggttccagatgctctgctgtctagctgctccaggcttcctgcagacaaggggaaagatggtgagatttccctgggaaaacatgctgcctggtgctatcagaacaaaaaccaggctgcctgtgaactccaccctcattagtttgaataaaacccaggcgtttctgccttgtggggtttccaaacggcaggaaaaggagaaatcaaagagagccagctgtataggtcttaaaacactttctggtagggagccaagacttcgggtgagctcaagaaagtgaagcaggttcaatggtggctactacaagggtagggttgactgggtaagacggagtgcagctaccccctaccaaatattctcattgactctcctccctacaaatgccagtgtcatcactccattttatgctcgaggactcaaatgcaaaacacaatagaagcttggcaggttcatcactggcttttctcagttcttctggggggtccaggattcctccttgctccctgggccctcataactgcctcagtctaccagaaacgttacctcacccctccttgtctggagagattgaggacttctgttatccttccataactttcttctgctgtccaaggaaggagtatctccaacctctctgtccttagtcttattcagcgagaactttcaaccatttaatcaatacaattcacaaaagcaccatctatctctgtcttcagcaccatcatcatgcccaggccttggacactgggtagcatagcataaatgttcctcttgtgtctcatgactcagtttcccttagcctcttctactcacctctgatcaaaggcttgtcttgtacttgatagcaacagggaacctacctagaacagcagtaggcatcaaagagaagagcagagaggggtagatagctggtatagactatgggatgcaggaagcagagtctgtggagaagaagatggagaaaggatggacagaagcaaacaagaaaggaaaagattcaggtgtggaatcacatgccttttagtcctagcacttgggggccaaaggcaaggtgatgtccatagttggttataagccagccaaggcttcatagtgacaccctgcctcaaaaatagatagatagatagatagatagatagatagatagatagataggcaggcagatggatagatagatagatagatagatagatagatagatagataggcaggcaggcggatggatggatagatagatagatagatagatagatagatagatagatagataggtagataggtagaaaaaaacaagtaaataaataaatggggggaacatagtgagggcaacactgatgttcatatttctttctcttggggatacatctcagccaagaatacaagcaatagagagcaacaatctaggttgttagaaattagtaagagttttaaatcagaaaacatttttatatattttgataatattttttccactccctcagcacctcccagatcttccccacacctctctacccacccaacttcatgttctttctacaacaataactacaactagaaccaaaagccaaaacaagcaaacaataaaatgaaaactttcaagacaaaaagagaatccattttgcgatggcctcctgggaaggagacctaccctggagtgtgtttgatatccccagtgacactccatttaattttttctttaaaaatttaaagatgattttctctttgccaaaggctatcttgcaaatagtttcttggttaggggtggaaacccatgtccatctccccttctcagtgctgggatcccatctgacttgaacttgtgtgtgctgccacagtctctgtatgcgtgtcagttctactgtgtcttgaagacacaatttcccttggcattatccatcaacactggcctttattctaccaactcttctacatagatctctgagccttgaggttaagagcttcgaggacttcccatttaggactgaggactcatagtttctcaccctctgcacattgtcctggtcactgttttaattcccacctacaccaagaaaaagcttctctaataaggactgaggaaaggccctagtccatttggtatagcagtatgtcattaggagtcatttattgctatgttactttaacatacttaacagtattgggttttcctccaaggcccatgaccttcccagtcccaggttcttgaccacttttgcagtgacaggtatgggtttcatttcatagagtgagccttaaatccaatcaaaattagctagtcattcccttaatgtttatgccaatattacaccagtgcctcttccaggaaagtcactgttacagattgcagggcttgttgctgggtgatatttctcgtcatggtaacatgtagatacttaccagcatcatgaaggatggtcagtagggggtgaggcgtctagctgggcacaagcttatcttctttaggagtaagtgttgtcttcagcgacaaggcgttaccatcaggttgtggagagcgatcaatagccttggcagtagagtgtaatatttagtggggtccatgggtcctctttggccaaagactgaacaggtgtgaccattacttggcactagaggttttatttgtgggctaggnnnnnnnnnnnnnnnnnnnnaaaaagaaggaaaaggaagatgaggaagaagatgaggaagaagaggaagatgaagaagaagatgatgatgaataagttggttctagcacagttttttttttcttgtctataaagcatttaacccccctgtacacaactcactccttttaaagaaaaaaattgaaatgtaaggctgtgtaagatttgtttttaaactgtacagtgtctttttttgtatagttaacacactaccgaatgtgtctttagatagccctgtcctggtggtattttcaatagccactaaccttgcctggtacagtctgggggctgtaaattggcatggaaatttaaagcaggttcttgttggtgcacagcacaaattagttatatatggggacagtagtttgtttttttttttcttttggttttatttttgggttttatttttttcatcttcagttgtctctgatgcagcttatacgaagataattgttgttctgttaactgaataccactctgtaattgcaaaaaaaaaaaaattgcggctgttttgttgacattctgaatgcttctaagtaaatacaatttttttaattaaaaaaaaaaagaaatcagaaagatacaaacatgctttctacccaaagggctgcagatggggcttgcccacactcagcggtctctttcatggctgcatgtagcttctccaccctctcttgtgtgttgggctttttttttttttccttcctatttcaacagtgattctttgggctaataatgattgacaagctatagagcatcaagaagtgaacccaaccacaagtgctacccaagagtatcagaagaaaggaaaattgtcccatgcaactgaagggggtcctagtcctcatataggaggccaaagcttgcctcagaggggtctcctctaagtgttcagtgtgtatgtctgtatgtatttgtctgtgtgtgtctgtgtgtgtgtgtgtgtgtgtgtgtgtgtgtctgtgtgtgtgtgtgtgtgtgtgtgtgtctgtgtgtgtctgtgtgtgtgtgtgtgtgtgtgtgtgtgtgtctgtgtgtgtctgtgtgtgtgtgtgtgtgtgtgtgtgtgtgtgtgtgtgtgtgtgtgtgtgtatgttacctgaaactctttagcagctgtgggttctctctctctgtcaggagctggagtggctgctggagattaaccgactcacacaccgactccttctgtaagcacatgacgctagacagttcgatgccannnnnnnnnnnnnnnnnnnncattcttgtagggaaggtcacaggtgctttgctaaagagctgtcctttacaaaagagttttgatgtagccatgcctaaagctttgccgtgatcactgtcacaaggaaacttttccccaaagtcttactgtgtttaaatgtggtgtcagagtcccgaggtactgatccagggccagccaactgagctgagctgagcctgtattttattcccacctgaccgggattgttccctgttggctgtaatgcatgcagggaccctcacagcagctgtgaagataaagtggggacagaccataggctccctaggccatgctatggtaaccatgtgtgcacgaggcctgggagagtttgatgaaggacagtgttctgatcacactgtccatgtgtaaggacatggatacatacctgaccatgtgtgtacacaacaggcccctttgcagagtagaacttgcctcccggaaggaacacccagctccagggcaggctctgaggtatagataagacctaatcctttcctcacacagggccttatcacttgtattcacaaaccaagcgagaacagttggatggttgggtgaagatgtgtgcaagtgaagtcactgcgttccaggaacctgggtcagggtggtgtgaactaaatccatgcgggacgaatggaaagatatgggaagagtctacacacagatgtacctgaatctgtacattgaacaagatatgctcagcttcataaagatctgactttatagtacattttgagtcatggctacaaactattgcctggccacaactatacatcctatcttgttggcagccatgacaccagtacatgacctaagactggctatgagcagcccatgcactgggaatggtgccatctctttgagggggatcctgtgttccccgtttgtgtgtgtgtgttgtatgcatgtatgtatgtttgaatatgtatgggcatacaagtatgtgggtgtgcatgcatgtgcatgtggacacccacatggaagccccaagttgatgactggaaccatcctcagagctcttcccctttcattgagacagactttctcaatcaaccctagagcttgcctgttcggctaggttgacgagccagatttctctgtctctaagtctatcttccaccttctgaagctggaattataggggagcagctgcagccactgagcactgttacgtgagatcccaactgtggtcctcctgcttccatggcaacccatggccttcccagccccgcattcccatcttcagtgggtggtcagaggaaaactcaaagggcaatagtcatgatgtgaagatgatttaaaattcacaattctaatggaagtcagccatgttctcgagggtgctgtcatctatgacattttcatatccaagggcagagctaagtccttatgacagagatgtctggcttgcaaagctgagggattttttacctggccctttacaggaggagtttactaactcagcttctaaactaaactggaggtgacaaatggagccccagagaaggacatcttcagacccagcacaccctgactcttgtgtctcctgggccccaagtttccccatttttgagaagactgggaaagcatgcagtaatcaaaggggagggggtatcagaagagtctggctcctctgtagacagccatctaggacctgctgcaggtgtcggtgtggggggctcctgcagttgtctgtcccttggaggatgtcacagggctctgttaactgcttccctgtctcttttcttctagttttgtccgaactgccatccctttcacccaagaaccacaacgggataagcccgccaatgtccagccttattacctctatggatccaaggtaaacagccctgtcccatctcacccgtgacagacagagtgggaaaagacaaagggaaaggtgttcccagaatcaggaaagccacggggtatcttattcaagaggaacactgagagccaggcagaaaccactgcaagtccattcaactttattagttcacagctagcagggatggggtagaacattctggacagagggagctgggcaggagctgaggtgaggggtgagtaatgtgctgaggtgggtgggtaactggggacatggggagtctccttgtggcctcccagtttcttctatttcttggttgatttatcataacatcatcaggtgattctgggattctgggctctgtaagttccagagctttacagacagagcttaaaggccattgtaggtgtctagaactatttctgagaggaaggtctcctctacctcatgtgacttattttgtttcctcacatgtgcacatcttcattccaagtgattgtcgccactgggtccattctaattcctcggtccttctgcccattcactcaatggcatttcttatataccccttgtaggccagacatgggttaggttgtccatgctcggtgtccatcgggaatggagacatgacgtacacccacccacaccctcatttccacagttgtggagggaatagtttccaacaagtcccaccaaggtcacaatatgtacaatttaacccttacaataggggctcatgtagaaggaataaagaaacatgtctcccactggggatggggggggggggcgagagacaccagtgattttcttgctaatggaacaaaacccagccacctttgatcccatttttaaactcagcagagataagccgagatgactatggtggagtgagagctttagaagtgtggtgaaccccagagaggctctggctggggcacctactgtgtaggaggaggatgctagagaggatgggtgtcttctccagagaagtcaaactgtttaaggtaatttctcaaacctagagaggctcatcatccaggggtggtagcactcgcctgtcctagcactgagggtctgaggcagcaggactgctctgagttcaaggacagtctggtctacgtggcaagttccagttagccaagactgttatgggagactgtatccccatacacagaagaaaacaaaggaaggaggggagggagggagggaggagtggagatgtcttgcagacgtcatttcaagaggcttagagacatgggtcacaaactaaaaatctggtttcccttcccagttctctttcaaaccttagcttacataaaagaaagacatttgtattgatgttaatgctagtctcatttcttccaagtactgtgccagattcaggtctagctactttcactgtccatcacatagccatggttgattttaatactgaaacagagtcttccgttctttgctaggcctccaaatagacaatactgaaacaatgccttgtttgcccctgatgtaccttgagggtctgtgttgtccaacttggggaccgttgtcatgtgacatctatacagcactgacatgtgagaggacagaagtgggaggtctatagacaaattttcacaaataggaccaactatggagagcaatttaagctttggaaaacggggcatctccttactgttgctcactccctatagtgaggcagtatggccggttggttaccaatctctctagctaaggccaccacctctaaggcatcctggatggcttcagcctctggttcagctttggccctggcccctgagttctttcgtggcagttcctccagggggaacccctgcaggtcttcttccctctgaccaagagctggggtctcctcgggccatcttaccaacccattggcttcctccatttggccggctctgtaagaccaccgaggttcgtgacagcggaggcaccagaactggaggcagatgaaggccagcacagcagtgaagcaggccagcaggatggccatcagcacccaaagagaaatctgggggtccaccagggagcccccggcagccagcggactcttatccagggtgtggaacatggtacagtagtgactatacgggaaggcagccttcttgcagctgatacagaggaagtagagagtggaaggagcgaggtgttccaatgccacagaggtgatggttcgaggcaccttctcctcgtgatggaagttatagcgcaggtatccggagaagatactgttccagttgggcctgtacataatatggtaatagtcctccaagcagggctccgagggtgaccaggagatgatggctcctgtgtgagacacgttcccaacctcaatgttcatcccgggtctggaaccaaatcacagtgaagagtgacatcctccctcctacatcagcatttgacatcatcctagccgctgcagactgagcgcatgagatggccacagatactgacatcgttagagagacaaaagaaaatggacgtccggaggttaagctagtaagccagtggtggaatacaggtaggaatgaggactggctcatgacaaagctagcagccctcaggctcaagatgtacccacatcatcccggccacagcccatcctggctgagatccatcactgacagtgtcgttcccagcccttccaaacacaggcaacgtgaagagagctctgagggcctaccttatgcttctcagctcagtcctgacctcttgcctctgctgtgaatgctgtaatgttacctagaacattctgcccaatggcttttttttttttttttgacaagttacttttcccatgactagtagagattccctctggcgccccccagtggcgatctacctcaaagcttctgcaagtgttttgttttgtcaaagcccaaggtgcaagaaattagtttctcagatcaaggtcctcagctcccaggatagcttaacttctaattgccccataacttctaaaagtagcaatagtactatgacttttgtgactgtctaacccactagttcccaactttcctaatgctgtaaccctttaatacagtacttcatgtgatggtgaccctccaaccataaaattgcttttgttgctacttcataactgtaattttgctaccgtcatgacttgtaatgtaaatgtttgtgttttccaatggtcgtttggcccccaaaggggttgagaaccacagcaaatcggcagttgctggatccaggctgtgccaggtggcttctcccacaataacagactccattcccatcttattaatgagcggcctggagtatcagctcacaggaagagagagaacttacccacttagccactgtatttcaatgcagagcccctgagttcagtaatagattattattgttgattatttattattattattattattattattaaattattggtaaatgaggtaccctggttggctgtatggcagatgagccctgttcagattgtaagcctttcagctttggtaaaggagaggcatcaaggtttttgggttttctttcattctctccgattgagagaaagctttccttctgaatcccccctgatcaaaaatctagacaagcgttgccaggctctatatgttccggtctccctctgccttcttctccattccccatccccagccagaagtgcagatgctgcggaagattgaaatggcaagcgggcacgttcagcccaaagtgaatattaagccaaactgatttctgtttctgggcttgtgttgttaggctaggtgagccaggggaaaacgtaacagcgtgaagtaagttttcagtccttggtttccatctctaaagacagtgacatgcttgagaaagcagcttcctcctctccacgtggctgggaatttgcacccagtaaatgggaaatacaaaagatgaggcaggggtgtacagagcctcccagagatggctttcagaaggaaacggacttactctccctcgggtctcttgatgtatgcccacctccccacccagggacctacatacccaacaaacacacttccaacctccgta

SEQ ID NO: 68 - DNA, 4294 bp, Mus musculus
gaattccgttcctgtctcagtctccgctgctcctctccttcagtcgcactgcggggtgatgcccaaggcgcatcacttttcagaactggaccatgaacaacttcatcctcctggaagaacagctgatcaagaagtcccaacagaagagaaggacttctccctcgaattttaaagttcgtttctttgtcttaacgaaagccagcctggcctactttgaggaccgccacgggaagaagcgcacgttgaagggctccattgaactctccagaatcaagtgtgtggagattgtcaagagtgacattagcatcccgtgccactataaatacccttttcagactcttgtgtacttacaggtcgtgcatgacaactatctcctgtatgtgtttgctccagactgtgagagtcggcagcgctgggtgctgacccttaaagaagaaacgaggaataacaacagcctggtatccaagtatcaccctaatttctggatggatgggcggtggaggtgctgctcccagctggagaagcctgctgtaggctgtgctccctacgacccatccaagaatgcttcaaagaagcctcttcctcctactcctgaagacaacaggcggtcatttcaggaacctgaagaaaccctggtcattgccttgtacgactaccaaaccaacgaccctcaggagctcgcgctgcggtgtgatgaagagtactacctgctggacagctccgagatccactggtggagggttcaagacaaaaatgggcatgaaggatatgcaccaagcagttacctggtagaaaaatctccaaataaccttgaaacctatgagtggtacaataaaagcatcagccgcgacaaagctgaaaaacttcttttggacacaggtaaagaaggagctttcatggtccgagattccaggacgcccgggacatacacagtctctgttttcaccaaggccatcataagtgagaacccctgtataaaacattatcacatcaaagaaacaaatgacagccccaagcgctactacgtggctgagaagtatgtgtttgactccatccctctcctcatccagtatcaccagtacaatggaggaggtttggtcactcgactccgctatccagtttgctcctggagacaaaaagcccctgtcacagcagggctaagatatgggaagtgggtgatccaaccctcagagctaacgttcgtgcaggagattggcagcgggcagtttgggctggtgcatctcggctactggctcaacaaggacaaggtggccatcaagaccattcaggaaggggcgatgtcagaagaagactttatcgaggaggcggaagtcatgatgaaactctctcaccccaaactggtgcagctctatggggtgtgcctggagcaagcccccatctgcctggtgtttgagttcatggagcacggctgcctgtcggattaccttcgaagtcagcggggtctctttgctgcggagaccctgctgggcatgtgcctggatgtgtgtgagggcatggcctacctggaaaaagcttgtgtcatccacagagacctggcagccagaaactgtttggtgggagaaaaccaggtcatcaaggtgtccgactttgggatgacaagatttgtccttgatgatcaatataccagctccacgggcaccaaattcccagtgaagtgggcatccccagaggtgttctcctttagtcgctatagcagcaagtcagatgtgtggtcgtttggtgtactgatgtgggaagtcttcagtgaaggcaaaatcccatacgaaaaccgaagcaattccgaggtcgtggaagatatcagcactggctttcggttatacaagccccgcctggcctcctgtcatgtctaccagatcatgaatcattgctggaaagagaaaccagaagaccggccacccttctcccagctgttaagccagctggctgaaatcgcagaagctgggctttagcagggactcattgaccagacacagccataaatcctgagtgaaggaacaatgtcctttttccagagcattaaaagctgccaccagtccagaaacccccacaggtgcctggaccatggtgccagcacctatgcagccacaactgcagcatcatagaaaagggtggagggccagccactgagccaacagctgaaccacaactggagcagtatctgcgtgtcaccccatcccagcctcttgtcgtatgctgtactcaaagctccattgcccactctgggagcatcccctccccctcttagcaatccatggagaggcagacgtaggccacactcttctttattattactttaagaataattcaagtaacctttaatttggcccaacgagacaatgtgcccattttatggatggaagagcgggaaagcatcattctttttctaagaaatgcaagaggtgattaaaccagggtgttctactacttcaaggctgtcagccacagcttcctgcctcacatgaggcggagcggatgcttgtgccagaggccggatgccataaggtttcagagcacactgccacctctctttgatggggcacagagagctccaccgggtggatagggcagggtgacacattcagaccccacggcaggaccacaggatgtctgaggtcggtcaggaatgagagggcctctgatggtggaagtaaagagctgcaaaagaagcctttgggttgtccctgacccagcggccctgtttcacggtgagtcatgtgtgtgactggatctcctgttctgtgcaggatgctgaagcagtgactacagaacggtcatcattccagcctctcaggagcggcatccactcagcactgtcatgatccttgtgactttgagactttgggttctttcaagcctttacgggttcagcagtcttaaggttgccatgtaagctctcaagagcccagcaaaggaagaaggcgtttgctcttgcccaaactatcaggaaggaaagaggcaagcactgggcggtgcttccaaaatgcacagatgtctcctactgattggcactcgcacaggtgacatgtgtatatcctgcacacaggtcatcctggcgaatcacagttcataccaacccaaccacgaggtattattcatgtcttacagaaagtggacttggtcttttaaaagctggatagctgccccagtgacagaactgggaaggacggagattgagatgacacccgaatataactccagtgtagcctcttagctcttctcaatgctgcctcctactgggttgggccgctgagcgcataacacaggaaagtctgggttaatgggcaccccaccccacagccaagttgctcctactcagagcactggggggcccagtgggaccctccaaattgaaataggctgttctctttcttcaccctcacctggatctgagttcacaaccctggagccactcaaaattaaccctttcattctcccaacctaccagagtcacattgcctgaggccatttatactagagcttcaaaggtgctttcaactagtctcctgcagactgtttcctgtaattatcccttcaacctagagctggctctcttgtgagaaggaggattccctggtgccaggcacactggattttctgcggtgttcagacaaagcccctagaaaaatgatcagagtcacagatccctcttcctaagtcacgtggcatttaggctggcttgaggctcaaatgcatcacttccaactgtaatcactgtgtccagataaaactctgtcattcagaaaatgaacttcctcaactggtccacaatcatctctgtttattctcttttgggaaaccttaattaagagacgatttctgggacatccaatctggaagataaacactggaaccgagagaagtctgtggtgtggtttaggagactggcccccatacggtggtattggctctcttaacctcacatgcacgaaggctttgatggacgcgtgtgcactgcttactccagtgtcctgcttgggaagatgggattctcttctgctggtttctgtcttacatttttttgtaaatggtgccctgtgttcacagaaaggttttggtttgaaatgtattttgtaggccttgcaattcataatgtttggaactatgtatttatgcctagatcaggagagtatttattgcttgtcttcatgataaaaaatactgcaggtatgtcttaccctctgtgggggccacaagtcaatcattgcttatggaaaaaaatatatatataaagctacatgttttacaaaaaaaaaaaaaaaaaaaaaaggaattc

SEQ ID NO: 69 - DNA, 1878 bp, Mus musculus
atgaacaacttcatcctcctggaagaacagctgatcaagaagtcccaacagaagagaaggacttctccctcgaattttaaagttcgtttctttgtcttaacgaaagccagcctggcctactttgaggaccgccacgggaagaagcgcacgttgaagggctccattgaactctccagaatcaagtgtgtggagattgtcaagagtgacattagcatcccgtgccactataaatacccttttcagactcttgtgtacttacaggtcgtgcatgacaactatctcctgtatgtgtttgctccagactgtgagagtcggcagcgctgggtgctgacccttaaagaagaaacgaggaataacaacagcctggtatccaagtatcaccctaatttctggatggatgggcggtggaggtgctgctcccagctggagaagcctgctgtaggctgtgctccctacgacccatccaagaatgcttcaaagaagcctcttcctcctactcctgaagacaacaggcggtcatttcaggaacctgaagaaaccctggtcattgccttgtacgactaccaaaccaacgaccctcaggagctcgcgctgcggtgtgatgaagagtactacctgctggacagctccgagatccactggtggagggttcaagacaaaaatgggcatgaaggatatgcaccaagcagttacctggtagaaaaatctccaaataaccttgaaacctatgagtggtacaataaaagcatcagccgcgacaaagctgaaaaacttcttttggacacaggtaaagaaggagctttcatggtccgagattccaggacgcccgggacatacacagtctctgttttcaccaaggccatcataagtgagaacccctgtataaaacattatcacatcaaagaaacaaatgacagccccaagcgctactacgtggctgagaagtatgtgtttgactccatccctctcctcatccagtatcaccagtacaatggaggaggtttggtcactcgactccgctatccagtttgctcctggagacaaaaagcccctgtcacagcagggctaagatatgggaagtgggtgatccaaccctcagagctaacgttcgtgcaggagattggcagcgggcagtttgggctggtgcatctcggctactggctcaacaaggacaaggtggccatcaagaccattcaggaaggggcgatgtcagaagaagactttatcgaggaggcggaagtcatgatgaaactctctcaccccaaactggtgcagctctatggggtgtgcctggagcaagcccccatctgcctggtgtttgagttcatggagcacggctgcctgtcggattaccttcgaagtcagcggggtctctttgctgcggagaccctgctgggcatgtgcctggatgtgtgtgagggcatggcctacctggaaaaagcttgtgtcatccacagagacctggcagccagaaactgtttggtgggagaaaaccaggtcatcaaggtgtccgactttgggatgacaagatttgtccttgatgatcaatataccagctccacgggcaccaaattcccagtgaagtgggcatccccagaggtgttctcctttagtcgctatagcagcaagtcagatgtgtggtcgtttggtgtactgatgtgggaagtcttcagtgaaggcaaaatcccatacgaaaaccgaagcaattccgaggtcgtggaagatatcagcactggctttcggttatacaagccccgcctggcctcctgtcatgtctaccagatcatgaatcattgctggaaagagaaaccagaagaccggccacccttctcccagctgttaagccagctggctgaaatcgcagaagctgggctttag

SEQ ID NO: 70 - DNA, 92563 bp, Homo sapiens
gagtgagccactgtgattggcccagaagtgacctttgagcaaagacataaaggagatcagagaagaagccatgaagatgtctggggaaagagcttctcagtcagaggaagcagcaagggccaagaccctgatatgagagcatgcctggtatgtttaaggagctccaagcaagctacagtgatgaaagtagagtgaattaggaggagggtcgttggagatgaggctgagaggcaactggggtggtggtggatgagcagatcatgttggatagaccttgtagcgctctgagaggtctttggctttgctctgaatggtggatgatccaaaccataaatatagaagatgattctggtcaccatattaaaaagagattgtagaagtgcagggaagacagtagtagagacggggcaactcctgcaagagatgatttggggtaagacgtgtgtgatagcagtgagagtaatgagaagtgctcagccaccatgcatactttgaggcaactattaggtatgctgatttgaacaatttccaataaatattagcaagtaaaaaagcaagttgcttggcctgagatactgggcacacaaaaaagtatgtcgcaaaatagcatatgtggtacatcatatgttatttaatgagaaatttaaagtgtgcgtatgtgtgcgtatgagtgtgtgtgtgtgtgtgtgtgtgtgtgtttgaaaggaactggtagtaggagctaccttgggtcaacttgctctctcagggaagtagcaagatggagacttcatttctaggacattcccttcacagagtaagactttcatcagtcatggatagccttcttagggtgttgaaaatgttctaaaaattaaattgagagggctgtacaactctgtgaatatataccaaacattaccaaactatacactttcaatggatgaattttatggtcaatgaaacatatctcaataaagttattgaagataatagcaacacgtcagtcttgacttatagatccaatcccattgtcttccatcattctcttagataattaaataatccctgggcaggcatgttaaacaaggctttaatatgacatcagaagtacatattgcctgctttacttgatttttatttacaagttttgggtaatgtttcttgatgaggaatgtggtagagcatggataagctagaatccaaattttagagagcttacaatcagtagaacacacactgaaaaaacagaagaaaacaggagggcaagtaaatacacagtagagtgataacaaattggttgaatgaacggtgactctaataccctttaccattatattcaaaaccaacaataattgtttcttaagaagaaaaacaatcaaaatcacaattctaaggatagttttgcatacattttaagtgagcctaaggttgaagagctgtgaagagtgataacacaaaacagtatatacaaggcacagtatatgcagacatacaagattatagaaggctgaagtctaaacgtgcattgtgggaagtggtttcaagtcaataacttttattcttcatctatgattttgaaaagcaagggaagtagacagctatatatagccttttcaatgagtgtgcagcccaggggagcattgtgagctaggcaggatgtgagggtggggagatttccataccatacacagcatgtacaggctgggtaaatcccctggcctaaaatacaatccacagtgcttttatgtcaatgttgctcagcagaggtggcgtgggctgagctgcggtcagcctggggcacctaggacttcaggaagccaacctgatttctgccttatcttctggctctgaaaagactacagtcacctaactcttcccctgaggaccatatgcaaatcagcctgcctctctgccttgggttgaaaaggaaaatgaactggtatacatacaaaaaagaagtcagacaggggatcaaaataattttatttctcaacatgatgatccaactagcaccgcctgtcttccccctcctatctctcatcctgtcttgcttctttcctgctccctgctcagcatatttggccccactaccaagcggaatccttccctgctcacacaggcttaggacaacttcactgtctccactccctgttttgctctgtttacaaatcatgagatgtcctgcctccgtttacatattatttatttaatgttacattgaagaaacttgcagctaaattcacacacacagacacactcgcaccataataaaacacttaacattaaaaataaagatcaggctgggcgcggtcactgacacctgtaatcccagcactttgggaggcggagccgggtggatcacttgaggccaggagttcgagaccaacgagggcaacatggtgaaactccatctctaataaaaatacaaaaattagctgggtgtggtggtgcgcacctgtaatcccagctatctgggggccaaggcacgataatcacttgaacctgggaggcggaggttgcagtgagccgagatcacgccactgcactccagcctgggtgacagatcgagactctgtctcaaaaaaaaaagatcagaaactgtctacaggtagaaggaggtaactgatccagtagctgggataaaatgattattctaagtaaatattaaatttaactctgaaaaaatactggaagaatgtaaaataaatattaacattgattatttctgaaggatgagattagatgtaatttttatttatttgctggtctgctctttccaccaagaatatattttacttttgttaccagaaatatatatttcaaaaaattagctctaagtttactagccatttcagtcattattgtcttctacgaatcaaaccaatgatttttgacaaatgacatatttttcttttattttaaattggaaagtaaaaaatccttccattttatcatcttttaaattatgtaaattaaaaagcaaaacatttctttacctttccagttttatatgctggaattttgatatacaaacttcctgctatcaccatgtacatttaaacatacattaatataaacacaaaatatacctggaaaaggtatagaacaatatgtatggcttgtatgtaaaaacaaaacataaaaacatacaagccaaacatattgttctgcaccttttccatgttaacaatatatcctgaagttttttaggttgatacattatgaatatacattattggtttccataaccttgtagtgttccattgtaaggatgcaccatagattattttacttgtctctcattgatgcacagagaagtagtttccattacaaaaaaatactgcaatagccaggcgcggtggctcacccctgtaatcccagcacttcgggaggctgaggcaggcggatcacgaggtcatgagatcaaaaccatcctggctaaagcggtgaaaccccgtctctactaaaaatacaaaaaattagctgggcatgatggcacatgcctgtaatcccagctactcaggaggctgaggcaggagaatcacttgaatctgggaggcggaggttgcagtgagccacgatcacaccactgcactccagcctggcgacagagcaagactccgtctcaaaaaaagaaaaaaaaaaaacactgcaataaatatcttgtacagatacctctctgtgctcacgctatttttcccccttagaattgatagctctagcaaacgtaaggtgttgttgttgttgttgttttcagaagaaagaagttatgtaggtgccaaaatattctggatatgattcttaaatggatattaataaacctaattaagtttggatgggaaccacaaggaaattaaagggcttcaaagccacatccaaagaggacaattgaaggatgtctttggcctggacacaagagggccctggagttatccaaagggcaagtcctcggactagagaaggttggagttgtaggacttcaaaagataaagcaacaaagatgggttttaggtaacagtaagagagcaatcatttatctgatccagcagccattcccctacctctagtggcaacactctagtgttcctcagagaaccatccctcccccatctgtggatgggtaggtccatgtggctgggtagggctgactccaccccactcccagatccaggagtgtgtccaggcctggaaagggtcaaatgaatattccattgtcttggctctaatgattgaggtacctgcgagcatatcatgtgagctaggccaatgactcaaaattctgggacttttactagaactataaggaaagagatctagctccactggtaagatgttagcccagcagccattttgctgccatggaggacagcttgcccatgcatgaaaccagctcagaactaaagaatgaaaaccaaaacctctgatgtcgtcgttaaataccagcggacccagcagtgccaggttgaattgatttttcctttgttatagaaattgggttaaattaggttttttccaacccagtttcagttgcggccccaaagccctatattaatgtgataaagggaatgaagtacctccatccacacttgacgcattaagaggcaaaacagattctgccagtaatagcgttcgcccaccttcagcctttagaaaacaaggcatgaaaatgcaagagagagaatgttgggggctctgtgtttcctctcaccactagcccacaggggaaggtgggtgggtgcttatctaccagaagccaaccaaaagggactttaagagactcttcagggagcttggtgtgagtcccagagttttgcagctataaggactagtgtctaaatcccactggagaaacataatggtggaagtttgtggaagagctacttattcggtgtcagagggaaagggggctctacttggggcaaatggtatatccatcattggctgggacaggaggcccgagtcttccagtagaaccatgggagggaataagtggtatgtggttctgtttcttttttcttcatttgagacggggtctcattctgtcccccaggctggattgcagtggcatgatttcagcttactgcaacctccacctcccaggttcaagcaattctcctgcctcagcctcccaagtatctgggactacaggcgaatgctaccacacccaactaatttttgtatttttagtagagacaggatttcaccatgttggccaggctggtcttgaactcctgacctcaagtgatcagcccacctcagcctgctaaagtgctgggattacaggcatgagccaccttgcctggctcttttttctctttatttaatagaaatgagatttccctgtgttgcccaagctggtcttgaactcctgggtttaagggatcctcccacctcagtctcccaaagtgctgagattaccagcgtgagcccccatgcccagcctctgtggttcattttcaaggaaattttacccaagaggacaacctatgtcctgacaggacaaatgaatcccgacaggagctggaacagctaaagcccaagggctgagggttgggctccttggccaaggagagtggcaactcctacatcagggaaacagttgtcagaaccttcagctggaaaatctctgaaaacagcaaagcacatgaaacatgcaagaaaaagcagcaattgttcatccaccacatcccaaggacatcatccccagattactgctgcagcttcatgaacgttgcaccctttacccctcttcctcttttccctccagcctgagcttccgactcaggtgtgtcagaaaccaggcttgtgtgtgggaaaagagaggttaggacatggtggaaaagccaacatgcttcaaatcctgaagcaaacccatgcaaagttacggaaaagcatcaacttgaatacatgtttggagttttgattattaccttgaactgaactgggctttctttttcttttctttgtattgttgttgttgttgttgttttgagacagagttttgctcttgtcacccaggctggaatgcagtggttcaatcagctcactgcaacctccgcctcctgggtttaaagctattctcctgcctcagtatcccaagtagctgggactacagccacctgccaccatgcccagctaatttttgtattttcagtagagacggggtttcaccatgttggccaggctggtctcaaactcctgacctcaggtgatccacccgcctcggcctcccaaagtgctgagattacagacgtgagccaccgcgcccagcccctttttctttgcttaactttttattatggaaattttcaaacgtgcatcggtgcaaggagagtagaataatgatgtacccattagccagctttagcaattatcaagtcatggtcaaacagttttcatcccttcccctaccaatttctccccctccactggattatgatgaagcaaatcataaacattttattgttttatcaataagtcagtgtatgtttctatacaaaataaggactattttaacatgataatagtgccattattacatctttttttttttttttttttgagatggtgtcttgctctgttgctcaggctggagtgcagtggtaccatctcagctcactgcaacctccgccctccaggttcaagcgattctcctgcctcagtctcccaagtagctggaattacaggcacacagcacgacactccactgacttttgtatttttagtagagacaggatttcaccatgttggccaggctggtctcgaactcctgacctcacgtgatccgcccaccttagcctcccaaagtgctgggattataggtgtgagccaccacacccagcccattattacatcttaaaaaataacaagtttctcagtattatcaaacatctctttaacattcaaatttgtctaattgtctcataacgtctttatacagttgatttgcttaactcttaatccaaagtccaaacatgctcatatgtctcttaaagtctcttttaatctaagggttccccctttgatttatttgttgttttgttttgcttttgttttttgagacagagtctggctctgttacccaggctggagtacagtgctgcaatcccagctcactgcaacctccacccactgggctcaagtgatcctcccacttcagcctcccgagtaggcgggactacaggtgtgtgccaccatgcctggctaattttttgtagaaaaagggtttcaccatgttgttcaggctggtcttaagctcctgggctcaagcaatccacccccttgacctcccaaagtgctgggcttacaggcatgagccaccgtgccctgccctctatgacttatttgttactgatactgagtcatttgtccttagcatgttttgtattctggactcatccaattgcatctccacagtgtcatttgtcaggttcgtttatctcttgtatttcctgtaaactcgaatttatatctcgaagtttgattagatttgtgtttgattttgttttctcttggcaagactcccgagttgccagttttgtgtacttcctcttgcttcacctcaggagacatacaatgtctggttgtccttcttttaagattaatcagtgtgttacagtgttgtcagcttcatatgacagttatacattttcctattggctttttgcgtaataattttaacagccattgatgatcattgcctacatttattatttcattggcattgcaaaacgatagtattctgtcactccttcattgattagtttcttggaaaaaaagaacttcctcattaaatacttgatcactgaattgaaagataattcttcaagaaaagcaagcaatatgttttatttttttcctttgtttccagttttcagaaaaacaagttggttcttcagcatcctccaaaagtgatcaaaaggttgggatgcttttttcaattctcttttgaactcattgttttaacatttttgctgttcttcaattcatggcaattattattccttttgatactcaaattgttccatctttggcaagtgggaactccttgaatttggctcctatgaagtgaactttttaaaaccaaaacaaacaaagggactatttgtttttgtttatgttttccttaaagtgagaaaaaaatattgagcctcctaagtttgcatttaaaagttggcaaagatgagtctcagttagtgggtttgatggctctatgagaaagagaataaaattacttacgatgacactccatgtagactgagcaaacgaaagactcctaagtattgcaacagctactgatgatattttgttttcccggatgagaacactttgtgaagtctataactcttttcatctgaaccaagcaggtgtaaaatgtactttcctcagaggagtttgtagtctagtttgagaagatagcactgtattatctaggtttgctggtagtgacagaaacctcaaaataactgagacttagaaaatagatattaaaaaatgtaatccagggctggcatggaagatccatggtcaccagggtcccaggctctttctatcttatactccattgtcctcaacattcaatttccacctcatgatactagatagctgcttcagctccaactgttacctcaatattctagtcacaaggcaggaggaaaagggaaagaaaaggggatgacagatcccactaaggaaatttcctagaagttgtgcacacgacttctgctacattcagttgaccagaagacagtcatacaactacacctagctacaagggaggctaaaatttgtagtctttattcttgctggccagatgcccagataactgtcagggattctgttactctagtaagaaggagagagtagctatttgggaatagtagcaatccctacctcaagcccatactcagaaaaaaaaaatactatcttgtttgggcagtgtatttccacacatatgtcttaagaatctcagaatgggggaggtaatttaaaatataccagtaccgtaccctcctgggtgtcttgattatgctggggcatccagtatatgaaataaaattaggctgttgtctggtaatttacatttaaaaataaacattggagaatttcactcctatacagcaataattattatttcatttattatttatccctacccactacatgcaatatctgcttacactaaaatctcttgattattaacatagtagaggtaactgtcacacattatacttcaactatgtactaactctaaggtgacatgtatgactagcacctaccattcataagatgtatgggattcagtcctccaaaggaccctcacaaggaagctaaggatcagagaagtcatggcttgctcaaagagaaacagcatagtaagtgacagagctgggaatccaacacaagtttgtctgttttcaaagcccacatatactttgtttattatgccattctgaaggattcacttatttttcactcttccacaaaacgtcaggacagaaaggcagtcatctatatgtagcattgagaaatttctatgggctttaatttaaatcttaaaaactaataaacttcagcaacatatttcttcactttaatgtgtgagggttttgtgctcattacctcttttaattgtccaacccaatttggtgatgatccattcaacaaatttttcttgaacatctgttttatgtgtcaggtactgtgatggttgctgagtatatcatggtaagcaaaaccacacattgtccttactccttgtgctacatgatttaactgctggatggattaaaccaggaactataaagattaaactgtaatccttaccacaattttgagtttacagtttttcaaatatcatttcaagccattagcaaaggctgtatgtattttttacatatgcctcctcgttttgtgaattttgaaaggatgtggtttcggcctttgacatcagaggagaagctcagctatgttggctgaacgttgatagaaagataacgttgaaggcaagttgcccttgagcagctctctgaagatcaactgcctccacattgcattctttgccccaaaactctttcctttggttgtgctaagaggtgatgcccaaggtgcaccacctttcaagaactggatcatgaacaactttatcctcctggaagaacagctcatcaagaaatcccaacaaaagagaagaacttctccctcgaactttaaagtccgcttctttgtgttaaccaaagccagcctggcatactttgaagatcgtcatggggtatgtgagcagtttcatttgtcttttttcgcatagcattttatgtttggactgggctaatgcaaaaatatatacatagcataaaatagagcacaggaaacacaaacatgcttattgtaacaacataaaaagtacagtaaaagtaatcagaggagaatgcagagagcagtcaagaggtgaaatggtggtgctaggtgatttcagttctaaaaactgtaaatttaacattcatcagctttttccccctgcaaggttatgtttggtttttaaattatgaataacattttaggtagcaagtattatgattcgataaaacttgaactttctatgaaacatactaaatttaatgaaacatactaaatttaatgaaacatagattaatacaacactagcattcaatgggatgatctaccccagctttcttattttttagtggaagaaactggtgtttagaatggttaagttttgggttcagtgttaacgttttcatgaataactctgtttgtctcaatactcgtcgctagcctgatcttgaaataagatttcccaggcatttaattatctaaaagttgtaaggcacaatggcaaacctcttcatctcttgatagacttcttaggacaccagggttattaagaacaaagtttctgcagtgcagaccagcggttcttacccagaaggagtatggctgctttgctaggtcagtctatctctttatctaaaaatagtcttgtgcttcttaacatcactaataacaaaagcaacaggaataatcctaataatgtagtttggtagaaaaagcattggacaaagggtcaggagaccaaactctacttctcagtaggtgatccagtctgggcaaatgtctacctcctatttcaggttctttcttcataaaatgaaaaaactggaaataacaaccttcaagatccctttcttcttcaaaacttctttgctttatgcagtggctcttgtttagccctatgctgcaatttttcaaagcatgtttgatttcttactgtatggttatattatttttacatcattagtggggtaggacaaggattatcacttatattttactgaagggaaaataatattaggtgcctgatggtcacttagaaacaaaagtgctccagttctttgttggagtctgacttagtaggtggtggcatgagtttgggattctttggtgtgccagggtttaaagcacttcatgagatggagctccagaggaggtcaggctgggtatagagcctatggatgcctcactttttaaagttgcaggtgttgcatgtcttttgtgaattaaaaaaatacagaaaacaaaaaagttgcaggcgaaatagctctgcctctttagaagtgaaaagaattgcttgtcttattatcagactcttactgataacaatttaccagtcaatcagaaaacacatggaattacgtgcaagtcctctttgctaggtggccaggagcccagtttgtgaacttgggggatttatcatgtagagctaataaatcgcatggcattactcaatgcttttttgtgaatggaacatttaaagtttttgtttcatattgaaagaacagtcatgtacctttaaatatttttttcaaagtccattttgcagttttcaccagttcgtttttctgattcaacatagtatcatctcatttagttagtattaataattccttagcccaactgctatttgtgaactgattgtgaattcagctcaatattatttgtaagtaatcacaaaaccagatggccttaattcagaatattattggtcataatttgcatgtagacaaggttgtaaaatcaccctacttctttatctgagcattatggaaaatttcaagacaattacttcattctggggagccctaggctacagtttctaattcttccatgtgagatatagagaatacatgtccaaacatcaaatttcttgttttctaatgccttttttactcttataaataacattttaaaagtatttctttaattatttaattattatagaagtttattaattagaaatttatccaagttccctgaaaaaggtaatatatgtgaattattattgttcatgtcttaggtatactacatggtttcaggccaccaatttgcacacaaggctgcattaatattactcataagtaaataacattacacttatgggaagaacattttcatttttaaattaaaggcttcattttcaatctgtaaaatgggtgtgataatagtacccatttcataggaagatggcaaagactcagaggtataatgtctttaggctgaactttttgaaattatttggcagatcgaatatcagatattagaagtttcaaacaattcaacttaatatattaggtacttagcataggccctgtcatctggtaagcatctagtaaaaattaaccattatttgtatccctttcatgtctctacagaagctagcaggctgtcataacaattcattttcaaattatgggagatattcaaggattcttcaaagtcaagctaagatcagggtcctggattccttctattctgtggctaaatataagttttgtggggtagatatacatgcattatgagctgtttggccagttattgcccctcttagggtgtcgggtgtcagagcttctttttctcttttctcatgtgtaaaattatgattcttgcagttctcatattctatgaatttataacaccatatgaaaaataacccttctacatactcaagaacatattctgtaattctagaaatcaagtatgtttattctaacctaaaaaatcatgcctattgtcattataatactaattgattgaggttttactttaacatggttttagttctggtgttcgatgcctgtttttcctgttgagatgtgcaagtgttttcagaggggccaagaagcgccttcatcttgctggagcagtgggccagaaagaagcatagatttggcaggtggtagcttgcagacagacatgatttcagaggctctcctgtgcctgtcaatttttttccaagttgtccctgatgcctgaaattctatgacagaggacaatgagagataagggcacatggatgtcctggtaaatgcttaggaatccgagtacagggcttgttggagagccctgattcatagtgtttgccaattcctttggtgtaaatattcccatcatggcccattttaaactaccaatgtgatgtctgctggctcacagattcctgaaaacttaacaattagctacctcgggccagtacaagccgagtccagcacactgtcggcaagcctaagtacaaatgatccttggagaggtagccaccaactaaacagcatacttagttgcacgtgactgatatcggatccttttcagcggtaaagggaaaatggagagcctcaggcactttgagtaagcacaggatggaagaggcagcctaaatgggaataaagcatcatagattggtgtggctcacgtggccactttctagatgtgggatctcagaccagacacttgacctctttctgcctgtgtcctatttgtaaagtaaggaccccaacactacctacttcaagtgatgttgagtatttcatgagaaaagtatgttataagctttttaccaattgctacatggtaaggtgattattactcacaattttgcccaagcaccaccttggtcttctgaaagcccctctggagaactggaaaggttctcctattttgatgactctttgccccttagggatcaagtgtgctgtgctccttatgatgtgggaggcattatcatttacatggaacaagagaaacagtcaagatcaccattccagtaagcatctgggtgagggtctccactcctcatggccttttccctttagcctacagtcttatctagcaacagaaccatctcctgcttgcagcaagcatcctttctaaattaaagatggtaggtggggagatggtcccctttccttgcttttgaaagcattactgctagtgatcacaaacactgcttctggaatcagacagatctgggtcaaaaactagctcacatttgatctgtgtgattttgtataaattatataatgctgtgcaattctctaaaaagctatctttttttttttttttagacagagtcttgctgtgtcacccaggctggagcacagtggtgccaccttggttcactgcaacctctgcctcccaggttcaagtgattcctctgcctcagcctcttgagtagctggaactacgggtgcgcgccatcatgcttggctaatttttgtatttttttttagtagagacggggtttcaccatattggccagctggtctcgaactcctgacctcatggtctgcccacctcggcctcccaaagtgctgggattacagatgtgagccatcgcgcctggcctatgtttttaaaataattaagcaaggccagacacagagactcacgcctgcaatcccaacattttgggaggcctaggtgggcggatcacttgagcccaggaatttgaaaccagcctgggcaacatggtgagactccgtctccacaaaaaaaaaaaaaaagccagatgtggtgctgcatgcctgtagtcccagttacacaggagggtgaggtgggaggatcccttgagcccaggaggttgagactgcagtgagctgtgatcatgccactgtaatccagcctgggcaacaggctgattcctggtctcaaaaataaaataaaataattaaacattccttcatgatcttatttccttttaataagatggaggtcacctttattctcataagatagtaactaacatttactgagcacttactacatgtccaacactgtgcaaaaatgtgaattatttcacctaaccattataaccactctgtaagttaggaactgttattaccccaatttgtaggtcaagaaattgagacaaagagggtttaaacaacttgcctgatgtcccacgtctctagagtctacattactctctgataaatagtacttattaccatagttgttactcataggtaatcagggattccattgggttattacacagtatgcaatacattcttgctctgaagtccccagtgtaaaggacagtcctgaaaattggtaccccctgccaaatgggtcttctgcaatgaaatattttaggacctctacgttttccacaaatgccccaggacaaatccttgtctttattcacttcaagaagccccgctatgtgtcttaaaaaaaaaaaaaaagagagagagagaggcgggcacgatggcccatgcctgtaattccagcactttgggaggctggggcaggtggatcacctgagggcaggagttcacgagcagcctggctaatatggtaaaaccccatttctactaaaaacacaaaaagttagccaggcatggtggcagatgcctgtaatcccagctactcgggaggctgaagcaggagaattgcttgaacccaggaggcagaggttgcagagagccaagattgtgcgattgcactccagcctgggcaacaagagtgaaactccgtctcaaaaaaagagagagagagagagagagagagagagccttggcaagctttgcctcctaaagttctcctagaatctccccagattcccacaggatatctctcacctgggactgtcagcatatctatcacctgggactgctaccacctctcatgttgtccctgcacccgcttcacccctgcctgccacttcatcctccacatggcaaccagcaccagcttttcacatgtgactgtagtcaagtcctgatgaccttcatcagacgttgatgtgtccctacagcggctctccccattgccctaacgatggacaccagcagaatctaacacatggtctcgtctgtctcagctcatgtctcactttccctcatctctggaatccaaccacaccaggttttcttcaacgttaaagcctccgttttaagtgtcacttacttgggaaagccttccttgatgtccctagactaagtcatgtcctcctgtcctgttctaccacagcaccaggtgtcctttcttcacagcacatgctgaagttgtaactactcatttgttaatgtgatgatgtattaatgtaatttccccacctcaccctccattgaactatcagctttatgagagcaggcacccaagttgataaagatggccttgccagtgtctacaagagtgtctggcacacactattcactcatgcatcatttgtggagggaataaaaggagaaagggagaaaagaaaggagggagtaaggacataaggtatagattcagctggagaggttagagacacaaacgaagctcaaatagagaaggttcaatacccaaataatagagaccaaggcaagtgacataggacttcaaaagggagattactgggtgtagaaacaagtaacaaagactccctggaggtagtagtgtgtggcctatcgttgaacaaggaagaggaagattcagatattcaggtggttggaattttaagtgctgggtcagaaaggcacatgtaggaactagcaggagggccgggtcccagccctcaactctttttaggagaattaagcaactcttttctcctttttcctctgcctgtcttacccctccttccttgccttttacagctaaagcctccgtagataatattctttttttttttcttgacccagaaccttgctctgttgcccaggctggggtacagtggtgggatcacagctcactgtagcctcagcttcccaggctcaagtgatccttctgcctcaacctcctgagtttctgggactagaggcatgcaccatcatccttggctatttaaaaaaaaaatttatagagacagggtctcactatattgcccaggctgttctcaaattcctgggctcaagcaatcctcctgcctcagcctccaaaagtgctgggattacaggcatgagccaccatgcctcgccatgcagataatattcttaaaactacccaggcatttttacttgtgacattgagcagtcatgggctctcttctcttcattcccatgtcattcagttgccttccagctgggcttctgctggcatttgaagttttttacagtctgttatccacacaacacctagaatgaaccttaaaattttaaatcagatactactttctaccttaaaaccctccatggctatttagggtatttaaataaattctcaactatgcccttcaagacccttcatcctgtggtcccagcctgccttctttatttcacttcacaccacactccctttatgtgcttctgtcacatctgccttcttcctgaaccataagcactccaagctcaaggtctcagcagggcctttgtacagggccaggactagggtgagacaagtgagacacacacataaaatggcactcattctcaggatgcaggatctttgcattagctgtttccactgtctcaaacaccccagatttttgcaggagggtttgtttgtttgcttgtttgtctgaaacatggtcttgctctgttacccaggctagaatgcagtggcggaatcttgggtcactgcaacctctgcctttcagactcaagcgatcctctcgactagctgggactacagaagtgcatcaccacgcctggctaattctgttgttgatttatttcccatctcttcaaagcacatagataccttagtatctgcatttatttgttaggtttatggatctgcttccctgtttaatttctgtctgtccatctaatggaagggcagttccatgagagcagagatcttgactgtcttcttcatcacagtatcaccatcatctaaaacagttctgggcactggttagttgtagtaggtgatcagtaaatatccggggaatgaatgaaggtcacataactcatgttgcattcagaaaagcatctgaaagctaaaaatgtgggccttgtctagccacacagagacaagaaagggcccaagcaaagtactttgcaattgagacatgcacagtttgcatctgttttaatggagtgtcatcatgaattgatctttgcctgtgtaatgtgaggttaatgttttatggagataaccgttgtattgatattttcttttctcacaataaaattagatttgattcctactgttcagggactggtacacccattcatcagtttctgcagtagaaatagcccacagagaaatactataaacacgagagtttagattctgactcagtctgaaagaaagcagaagagctcagtttcaggctgggcacagtggcttatgcctgtaatcctcgcactttgggaggccaaggcgggcggattacctgaactcaggagtttgagacaagcctagccaacatggcgaaaccctatctctactaaaaatacaaaaaattagccaggcgtggtggcatatgcctgtaatctcagctacttgaaaggctgaagcaggagaattgcttgaacccaggaggcagaggttgcagtaggctgagatcgcaccactgcactccagcctgggcgacacagcaaggtgctgtcacaaaacagaaaaaaaggaaaagaagaagagctcagtttcttgaactacaagctccatgtaaaacaagacatgtaaatatcaaacgtggaaatcgtgtctacaaaaaactattttaaagctcttcgcaaatgttcatggaccaaatagtaaatcctcattccaccctcattttcttaacgaactaataatacattcctcccattcatcagtgaattatgaggcctactggaaaaagtagaccttccaggacataattttcatccagaggtcagtttgggtttggcttcatgacactcagaggcctcactaaaagtgatcctaaggagaaaacaggtctgtaatgccttcccatgcatataaaagtccccttttggatcaacagtcttctcagttccttgaaattcagtaaaagttttctgtattttaataaaataagagctagatacaggttcttatgtcttatgttgccatataattcctattaacctaaagttatttgtaagtaggcttctcattatatttttccttttctgatatttaaaaagtcacagaaattataactgtttgttataaaaattcaactatagggatttttccccccaaacttcatatattttgccatatctttattatgattattattggtttgtttgtttttattgactctgtatcaaggaaacgtttctgtgttggtacatttcaatttattcatttgttccgcaaacattttgtaaatagctgctctgtgccaggcaccacgctagatgtgaggaacgcagtggtaagtaatggaggcaggtgtcttaggttggtgcacaagtaactgaggtttttaattgaggtcaattacttgtgcaccaccctaatagcttgcattctaggggatgggacagacagcaagcaagtgtataactgcatagggcagatagagaatgtggtaggttctatggcaagaccaggcagccactctggctgaactgggaggtggggtggtcagagaaggaatttatagctaaactgaagtttgaggaaataactagttaaatgaagaaatgggaaagagcattctgggcagagggaacggcaagtacaaagaccctgaggaaggaaaaagcttggcttgcgtgaggaacagagatttgaacatgcagagttcaagagaggggcacaagacgaggggcagaagccaaactctgcaggcccttgtggatcatggcaaggagtttggatttgattccaactcccatgaaaagtttccaaggttgaagcagtgggtgtgagtccctccatctagaagtgaactgacagctatggggtcagcagattatacaatggccaagaatagaagccaggaagctgggtacagtctcctgcagtggtctcctgggccattgtgtagtgtcccatcctacgagttgttcttcagttgtcttatgtttttttatttatttatttatttattttatttttttatttttgagacggagtctcactctgtcacccaggctggagtgcagtggcacagtctcggctcactgcaacctccgcagtggtcttatgttttaacttttttgtggcatccttcttcctgggggtactttgtccagaatcatctcactccatgttttgatgggaaagtgcctggtgtataacctgcgtcaggatcaacactgagctcagatagacagtagcagcaaagactgaaaccaaattagaattgagttaaatcagctttgattaatctcaagacagagcaaggaatattctgatcctcatattgtcaaaaaaaattaatgaaccaagtacattcagaatgttttctataatttggtctgaagacatcaatttactatctgtgtcagcactggtcttttccctcatgcagatgtatcttttgcagagttataatcataatgcatgacaattttatattctacttttctatctattctttcatataaatgtatttccatatatctacaatgcctccaaagtaatcatttttcatatatatgattttttaatggttgagtcagttcattgcaagaacatgcttatctattttatatacgtggaggaataggtgaacttatctgttagctatggttcaacattcaggttgtttccaggtataatgaaaacaccaaaaaaaagcagtatacataatatagggctgtctcatttttaaaatcagcttcttaggatagagtgccccaaataggataattgtgtcacaggataagaacattttctggtcttgatcatttattgctacatcatcttccaaagagattgaagaagcagtgtgtgggccaccaaaagcggcaccatgtttgttttcagaaccattagagaagattatgtttctaaaaaggaactaatagaaacaaaagaatctcactgttgtgattttcaagtactccattttgaatgttttagtgagagagaggggaaaatacgtgatcttttatacataggtgagatggtttggtttaaagtcagtgtcacatgtatgtagatgaacccaccacctgcatagttggatttaaggggtgccaaaaggtctcctactctgcaaaacctgaatgcccgaactgactgtcacagagtaggggtggtctgaaaggttcccatgaatgagctctttgggttaggtcatgaaacaccttatcaaggagcaaatgaaatacaagaaggtgtcacaggagccacttttgactgttccgtagaagttagttttaattttagacagggcctatgacactgaaattctcaggctgtaattccagaaaagcggatgaggtgagcaaggaacaacagggcagcctaatagaaaagagatttggacccgggtcaccgggctaattctttactctctctgggatttagctttcttgtccataaaatcaaaggattcagctgatcaatgctttttcaaaatttaaaaaacattttaatataaaattatacaagccatcaccatccccacatataaaacagagagaagtggaagttctctgcttgaagcagggcagggaaactgcccagaaccctatgccccttggcctgtcccttactttcagggatcaacaagttatcttccaactctgtgacccttccccctggggtgtaaattgaatagtagaaatgaaaagacaaagccagtttagaaagtcaccttgaaacctcattgtcctcatctctaacattataaagttggactgaatgatttctaaagactcttccagttcaaaaacatggaaacttggctcacatttgtaataccaacactttgagaggttggcattacaggatctcttgacggcacgagtttgagaccagcctgggtaacatagtgagatcccatctccacaaaaacaaaaaataaaaaaattagctgggcatggttgtgcacacctatagtccagctatttgggaagctgagggaagaggattgcttaagcccaggagtttaaggttgcagtgagctatgattgcaccactgcactccagcctgggctacagagcgagaccctatctctctttgtttttaagtggaaattgtgtatctctgccaattatatcaggaattcacaaaaagtgatggagattagccaaacatggaaatctttccaggaagtaatacctttagggtgattaataactgtgtggctcatgagaaagcatgttgtcaaaatacaagcatgaccccaagaacgcaccctaaaaatgaagtcagacatttcatgtgtaaccaatacaaaatctgaaataataacagccaatatttaatgagttctcgctgtgtttcatagcatcaaggttaagtgttttatatgtcttatatcataaatattcacaataaccacattcattatgttatcctattgttatccccatgtcatttatgagaaggctgaggtttatagaaactaagtatctctatctaggttacacatataggacgaatattaaaagttggattaaatgttcttcaatggacattttcagatctaagcttgtttgggtctgataagtcttttaatagaagctgaaaaggcagagttggggcaaggatttgttggtgagtttctaacataatccaatagaggtgttgagtcgggaccagcaggcttgctccagattgcccagcagacttacccgaaagacagcagaaacatcatcaacagcaacaattttttttaaaaaaccacaatagttagcatcactacaagaagaggactgaacactttgttaagtattttctcatttcctccttacaattctttgaacaagataaaagtaaaattttgttttggtgaggaagcaatggagctacgaggacggtaagtaatttacccaaggaagcaaagtgaaaagtgtaaaggcaacagcatgccttaggacataaggattccctatactttgctcctacatacattagtgtgacctgtcctgatatctctgtggttacccaagtagaattacattttgcaagaaggtaattctacttaccttcacgactgcgagcatctcagccagtttctcgctgcgagtttgtgaattcgccagtctttggtgactttgcagagtgtgtttccattcacctgaactctatgggctgacaaacatgagttcctggacttgtaaacctgaggatctgttcctggggtggcctctgacaaggaaagatgctgtatccgcctcagcactatttaattttccagattaacaactaatagcagcattagccacttattgagccttttctgggaataacattctgggaaagctatatccaaagtggtaatacaaggagtaccaggaggaaagtattagcctagcgaagtgacccagaaagggagtttgagggagctaataccaaacctcacccttttccacaatccatgctgaggccatttccatgacaatgatccaatttggtgtttcccaaagtggggtactatcaggagcacacaagatggcacatggacaaatctggttttaacatgtctttaatagttatgtatctactataatttatgttagaaataagtgttttaaaatttatggtggtaatttaaagtttcctcctagaataaatttgtttatgtggaaaaaataagtcaattgaaagaatactattgagcagacaatactatttgagggaactagggtatggtagaaattgccaagctaagttggaaactgaagcctgggagcactgaatccttgggataacaacatgaatcataattcattataatttgcttttaagtagttccaagagtgaaatgtaataacctccactggacatttggagacgcagaggtgatccacagagtccagggcacttgaagatattgggttgctgcaaaagtaattgtggtttttgccattaatagatataagcacagaggagcagggaagatggtcaaaagagatcccaggcccccacgttctgccagagcacagtgagcaaatgagcctcctgccacaaactgaacccacatttctctcaatccaagaaaaggctgttctaattccaaacaagctcattgtaaacctcaataacatgaagttagtattgttcacgttgctttccaactgtgtttcagatttatataactggttcctaacacataattaactgctgttggaatgaatctttgtccccttgcctccgtgcctgctggacttcatatctgtgtattaatagtcacttttgtttggcgatcttgtgaaaaatgcagactaatttttaatccttaaagagataatacattcacataattttatttttattttttcagataatggcctttcgccatgtggcacatttcaataattttaaaaaaacagttgcaaaatgttatgcagtaacaaatctcccatctttgtcccaagtcacattgctgtcctacatcacagcaaccacgatagttaatttcttataagttcttccaataatactttatacatatacttgtaatactaataaacattcttcttttcttcctttttaaatagtagtaacatactctgcacacacttcttaacttttcttttagttggttaacaatgtatcctggagattgatccacactgatacacaaagatattcttcattctgtttatggttgcataatacttcattgtatgcatgaaaaatttcttttaatgaaggttggtctgtttccagtttttgttattatgcacaatgagaaatgaacagccttgtagatgtgtcattttccataaatacttttataacagtggttctcaaccaaaggtgattttgcccaccaggggacatttgacaaaacctggggaaatttttggttgttataagtggggaggagggtgccaccaacatctagtgggtagaagctgagggtgctgctaaatatcctacaattcacaggacagactcacaacaaaaaattattcagcccaaaatgtcaataatgctgaggctgagaagctccagtctgtagaaaacatttctagaagtggaattgctgagtcaaaggatatttgcatctgttattttgttgactatgagcaaattactctctacagaagttgtaccagtgaacattccccagggccacatgtgagaagcatgttttctcaaaacctcacaaacaccattatcttatgttttgatctttgctaatctgataggggtttaaaaaatagtacttaagtataatttatttgcatttctgttgttatagtgacattaagcatctttccatatgcttaaatatattccttttgttcattttcctataagtttattagtattttatttaatttgtaggagctctttaactaccagctaaacactttgggcagactagttttaacctacattttcattgtcaagagatttttatccacctgccaatttttctggaaatcttattccaaatcatttccattaaaagttttgtcatagggttcacaataatcactttctgctgcatacttggttttacttgctgttccttcaatcaattaacagatattaattgaacatcgcctcagtgcaagcagttatttcctgaaatgcaatgaagtttttatgcacttatgtattttggctactggtccttcagtgcttaaaaagaagacacaaaaaatacgttctttcaaactcatttaacatttcatatttcttattctgggaggaaggtctttgaaggaacattcacagctcagagatactgacagaaacaatacagaggatgccttgagaatctactttatgcttggaaaatatcacttagttcttgctcctaatttccacataagtccttttctctctgctcccttttgtaagaaaatctaaacacacatgttttcaacatgctaggatcatgttaccttgatctagtaagaatggggcttggacattattcctgagttatcatttcacttataagataaatatacccatataaaagcacactgaattactttattagaatctatgaagaaaaaggctatccctcaagaagaacatgagagagactgtcatgtacttgaacccccatggatacagatgagcaggtggcaggtgctctctagctgctgctcactgctaatggggttatgcggtttcaagggcgtgcatcatttcgcacacccagcatttgatgcataccccttattcctctcccataatcatctaagttgacactgtgatgtttttgaaacttctaactgtattaaaatattattttcatttctctgcttttcctcctgcttcacactctctgtaaaaacttcaaatatcataagaatatataactttgtgaaattctgccacagtggaacctacaacaaagaaccagtgttagcagcttggaatgtttttcttcttgtattatttctttggatattgcatatactaatacataatctcttcttccaaaaatgggatgatgctccatctgttgctttaaatctgctctttaacacttggtatatacttttgtccctctgtatagatgaactttattatctgttaatggttacagagtagtcattatgtatgatgacgaatttaaccatacacagatggatgtttaaccataactaatttaaccatttgtctattgatggatatttaagtttttccagtttattttagtgtaataaataatgcttctgtgaaaatcctttttattacatctttatatattttgaacaaatgtttccatagaataaatcagatcagggaaatgtatttattcattttagttaactgtttttaatattataaaagaaatacacattcatggcaaaatattcaaagagtacagaaggatacaaggtaaaaagaaaagctccttgggaggccaaggcgggtggattgcttgagaccaggagttcaaggccaatctggacaacagagcaagactctatctcttaagaaaaaaaaaaaaaggaaagaaagaaagctctcttcacactccctactcccaacccccaggaccacccacacaggtatctgctcttcatagtttcttatgagaaaacacattttaatagatgatcctaaattgccctctgaaaactgtatgtaagaataattctttttcttttcttttctttccttctttgttcctttccttctttccttttgaaaagtctcacttttttcatttgggtggccagggtgttactattttcaaatggcaggttttaaaggaagtgaaattgttttcctcatagcacatccagccacatggtaacccacagtgcgaaatgctgaggtggagaaagccagccaacggtgggccagtgatgagtaagaggtcttatggaaaagaagagagaaacgaaggcaggtgtgggatggatcagtttcctggctttaaggtggtccagggagccttgaaattaatggtcttagctccagactttcccagagctttagaatagagggaggttaggtctagctgaagatgggctggggagggaggaactaggaacagctcattgcaaattgctctggtgttttacaagatgctaatttttccatagagacagtaatgagcatatcttttttgttttgttttatcttgttttgtttgagacagtgtctcactctatcacccagagtgcagggacatgataatgactcactgcaacctcaaccccccaggctcaactgatcctcctgcctcagcctcctgagtggctggtactacgggcatgtgccaccacacctggctaacttttaaaatttttttgtagagacagggcctcactatgttacccagactgttgttgaactcctggcctcaggcgaccctccttctttggcctcccaaagtgttgggattataggcatgagccattgctactagcatttgctagtaggtttatgtaattttaaaaaattctcttaattaacttaatgattcagagactattcttatgtcgcttttgaaaaatgaggcaactgagaggttgagacacttgcctcaggttgcacagctgataaggaatgaggttaggatgcaaacctgagtctgccctacttgaaagctccagttctcccctactctgccttaccagaggagaaagctgaaaactgctatttttttagaaacgtggagatgtccttttcccatgggtagcagacacataacttctcatcgacacatttgctgggctagtccagcagcaaaagagccaatgttgttggagcaaagaggagtggctattctgaggaaccagggagtgtgttccacctttgcaatccagcataagcattgctcagtcaaatgggacagaaacaaagctctgcgagtccatggcttggtgaaatgggtcacacaattgattttccagcactgagttcagggaatgatagtcttctgtggaaagtcccagcaagtgctaagccaggaagcatagtagttaggttatcaggctctggagtcatagagtggagcttgtacgctgctcttctacgtattaagagggttggcctctgtgaacttcaattttctcatctataaaatggggagataatatgttgtaggatcgtgatgaaacaggatggaatgttgaatgcctggaatatagaaaatgttcaaaaatagtatcattttcatgttttttcctgcttctctctttgaaacttataatccaagctctatttcataaaaatattaacataaaaagccgccctgccccctcatctatctatcaagcaatgcacatttatgggaaacctgatgctgacccatttgtaaacaacctgtttctgggttggggttttgtacatagcagagcagctccttctctgtgagatctattgaaagtcagcccttaatacaagggtttgttaaaaaagagaaaaagaaaaagaaggaaagaaagagagaaaggaaagaagaaaggaaaggaaaggggaaaagagagagagaaatagtaacataaaaagaaaaaagatataaaagctgattgcacaagcttacccttgtgaagatttgtaagcatcagcatcttgaattgtgtctgacacgtgtcagatgcttgggatgaaacatcagactatgaggatggcatatctttgaacgtggccaagaaaagagacaagggtaagcaaggtcctgtgactttcgccccaagtaatgcagacagaataacaagtaagaatgagagcaggttgtacttggcctctccctttctctggtggcttttgtgtggtttccttggaaagttttaccctggcatttttcagaaatagcacagttgtttgggatgattataggcaatcaccctttcccagagactgaactgtgtcgggctcattgaccagccaccccccggggaccaactagggaggacatagctggtcctgctgtttaccaagtattggatcttgtgagatgccagaagaaccaacctcagggtctttggaaagactgaccaaccagtcaggatggattgtggtggtggatcccaagcactcatttgggaatgagagtgacgttgacggtggaacatgaaatccatcccaacagaagagcaagcctgagagcaagctcatctgacagcctgttaaggcacaggcacaaaggaggccatgtgagttggtaggagaactcctccttggaaatcttggagtctcgctgtccactaaggtaaccactagcacctgaagtctactggcataggggtctactgagcacctgaagtatggcaagtgcaaattgagatatgcacaaaatatacaatttcaaagacttaagtacaaaaaaaactcattaatttttgtgtggataacaatttttttaatatactacaaccaagtaagattttattttcacaaatgcaatgttggctcactatcctaaagtcaattaagataatatacaatattacttgaataaatgtcaaaaaagaacatttcaataaacaaagaaaaatatttgacaaatccaacactctttgtgataaaacccccagtacactaatagaaaaaaaattttgagtcttgcaaaaagtcatctatgaaaacctacaactaacattatacttaatggtgaaagactgagtgctttatctgtaagtctgggaacaagacataaatttccacttttttttttttttttttttatggagtcttgctctgtcacccaggctggagtacagtggcatgatcttggctcactgcaacctccacctcctgggttcaagggattctcctgcctcagcctcccgagcagctgggattacagatgcgtaccaccatgcctggctaatttttgtattttcttagagacaaaattttaccatgttggctaggctggtctcaaactcctgacctcaagtaatccacctgcctcaacctcccaaagtgctgggattacaggcatgagccactgtgcctggccaatttccacttttaacactctattcgacactgttctgcaagtactagccagataaattacactataaagtgaaatgaaattctccagattgagaaaaaaaagtagaactctttttcattgcacaccacataattttccacaaaaaaaaaaaaaaaaaaattgtaaggaacttcctaaaaacccactaggactattaaacaaattcatccatgtcaaaagatacaagatcaacatacaaattaatttttttaacttttattttaggttcagaggtacatgtgcaggttttcatataggtaaattgcatgttgcaggggtttggtgtacagattatttcatcacccaggtaataagcatagtacccagtaggtagattttcaattcccaccctccaccctcgagtaggtgccggtatctgtggtgcccttctttatacccatatgtgctcactttttagcccccacttacgagaacatgcagcatttggtttttagttcctgtgttagttcacttgggctaatggcctccaactctacccatgtcgctgcaaaggacacaatctcatacttttctatggctgcataattctccatggtgtatgtttaccacattttcttttcttttcttttctttttgagacagagtcttactctgtcacccaggctggaatgcagtggcacgatctcagctcactgaaacctctgcctcccgagttcaagcaattcttgtgcctcagccacccaagtgcctgagattacaggtgtgcaccatcatgcccagctaatttttatatttttagtagagatggggtttcaccatgttgcccaggctagtctcgaactcctggcctcaagtgatctgctgccttggactcccaaaatgctgggattacagatgtgagccaccacgcctggcctcacattttctttattcattcttttgttaatgggcatttaggttaattctatatctttgctattgtgattagtgctgtgatgaacatatgtgtatatgcgtctttatggtagaatagtgtatattcctctgggtatatacccaagaatgggattgctgggtcaaatggtaattctgttttaagttctgtcagaaatcacctaacaatttgaaatgataatattttagatattgggttaaacaaaatttattgttaaaattattacttgttatgttttgcatttttgaatgtgcctactggaaaaacttttaagttacatatatggctcatgttacatttctattggacactatcactttagaacttcacatagaatttttatccctgttcacaattccagttaatatttgcctccactgtctgccctcatcacaatgctgctaggctgttaacaagccagacttacccagtatttttctaccccaggattttgccctggctgcttgctctacctgggatgctcactcccctagaccttctcccagatggctcctgttcgactttttggtctcttcttagatgccctttctctctccagagaggtctgccttggccacagtttggtcacatcaactgttctattctctttccagcacttctttgttttgtctgccttcccaagtatactacgggctctgtgagagtctatcatgttcatcagttcatttcctgaactcagaatagcacctcactcatagctggccctccataaatatttcctgaatggctaaatgtactagccttaaatctgtttaagattgtttaaactgtgttccaacctgacaccctttgttttgagctaattaagctccactgagggccagccactgctgggcactgggtatatgggaagatgccctggtctctgaccttagggagctcaggacctagtaggttccaaagacaaaaatgtcagcaaatggagttgtcatatcacatgccatgagcctgttgtttttatttcactatgcatgccctaaagaaagaacccaacagaggtcaaaacacagcaacctcaagctcgtgcaccctgtttaccagtagctgcagacagttcttgaaaaggcagctccgctgtgctctactatttgtgaaaaaacaggttaaccattccaaagaactgtgattatgggcaggaccagagcttgcatttctaacagtaaatgagaagatagtttgagcccaaagggcacgtttgcagaggcttttgcgggaagacaaacctcctaatttagcattagactacaaaagcaagttctagactgatatgtagagcaagacactcattttcctttatatataccctataaaagtgcagggaaaagacaaatatactccaaatgattaactttggctacctcagggttatggggaagggtgggataataacacactataaatattttcttcacatgcctctgtagtattttgttttgtttgtttgcttgtttgaaacggtgtcctgctctgtcacccaggctggggtcgacggcaccatcactatcacagctcactgcagcctgaaacatatgggcccaagtgattctcccacttcaccctcccaagtagctgggactacaggtgcacaccatgaggcttggctaatttatgtaattttttgcattgtctcactatgttgcccaggctgctctcgaattcttgggctcaaatgacctcctacctcagcctctcaaagatctgggattggctgggcatgttggctcatgcctgtaatcccagcactttgggaggctgaggcgggcagattgcctgagctcaggagttccaagccaccctgggcaacatggtgaaaccccatctctactaaaatacaaaaaaaattggggaccagcgcagtgactcacgcctataatcccagcactttgggaggttgaggtgggtggaccacagggtcaggagatggagaccatcctggctatcacggtgaaaccccctctttactaaaaatacaaaaaattagctgggcgtggtggcacatgcctgtagtcccagctactcaggaggctgaggcaggagaatcgcttgaacccaggaggtggaggttgcggtgagccgagatcacaccactgcactccagcctgggcgacagagcaagactccatctcaaaaaaacaaaaaagagaaaaaaaaaagatctgggattacaggcattagccaccatactgagcctctacagtgttttcatttgtcacaaaaaacataaatagattttgtactttcaataatggataaagttgtttttacttaaaaaactaaaaaccagacaccacaaagctttcctgtatttgatagggtctgcttctcgcatcttgaattttttttatctcagttctgttcctcagctactaaatcaaagatcagcttccgggctgaggacccaaaaacaggaagtaaagactgaattcactttgggagaatttgatgatgtaatgggtccctggatatcaaccaagcacgctcatatatcacaaatctcttgcgatagttaaggcttccttaacttctttaattgggaaggtaccctttattgagggcatctgttataagccagttaatttgttgacatcatcctattttattccccaatcaactctcaaaaggtaggtattatccccacttatcagatgtaaaaaccagggttctgggaagtttaatgaattgcccaaagtcacagagctcttatagtaagaggcagagacctactttaaacatagctttcccaaacgtgtgctcatttcaccatcatttgctacctccttaaaaaaataaggtagaatggggtttgggccacaatcctgaacaccataatcccaaatattgaaatacaaaatgtaaaaatacccaaaaatataattctggaaaaaataattttaaaaacttttttaaaagacatttgtttacattttaaagtggatttatttgagaaacatatgaagacatgacgaaatgcttcataggccaccttgtgcaataaaataggcaataataatatacatatttttgcaaacataaacacccaagtatactaaggacagtcacatgggtataacagttatgagcagacaaactatattcctaaagaaatagctggtattcaaggggaacgccttcagctttcgcccattcagtatgatgttggctgtagtttgtcatagatggctcttattattttgacgtatgttcctttaatatctagtttattgatagtttttaacatgaagcaatgttgaattttattgaaagccttttctgcatctattgagataatcgtgatttctgcctttagttctatttacgtgatgaattacatttattgatttgcatatgttgaaccaaccttgcatccctaaagcctacttgatcatgtaaaaaaggattagccttttttttttttttttttttgagtcagtattgctctgtcacctatgctggagtgcagtgtcatgatcttggctcactgcaacttctgtccacctcagcctcccgagaagctgggactacaggtgtgcaccaccatatccagttaatttttgtaattttttgtagaaacagagtttcaccacgtttcccaggctggtctcgaacccctgggctcaagtgatccaccctcctcagcctcccaaagtgctaggattacaggcatgagccaccacgcctggctggattagcttttcgatgtgctgctggatttggtttgcaagtattttcttgagaatttttgcttcgatgttcatcaatattggcctgaagttttcttttttgttgtatctctgccaggttttggtatcaggatgatgctggcctcatagaataagttgtgggggagacgctcctcctcaatttcttggaatggtttcagtaggaattacattggctcttctttgtacatctggtagaattcggctgtgaatccatctggtcccaggctttttttgggtggtaggctatttattactgattcaatttgggagtttgttatggatttgttcagggaattaatttcctcctggttcagtcttgggagggtgtatgttgtccaggaatggattcatttttctaggttttctaatatgtgtgcatagaggtgttcatagtagtctctgattatttgtatttctgtggggttagtggtaacatcctctttgtcatttctagttgtgtttaattggatcttccttcttttcttctttatgagtatagctagtggcctatctatcctattaattttttcaaaaaaccaacccttggattcattgatcttttgaataattttttgtgtctcaatctcctttggttcagctctgattttggttatttcttttcctgtatcttaattacagagattatgacacaaatgtatacatttgtcaaaactcactgaaatgtacattggtaaattttattatatgtaaattatactttaataaagctgatttttaaaacaaaaaaactaatatgcaatatatttcacctttaaatttttttaaaaaagaaacagcttatataaccatggtcatctgaaatgctatgatagacaacctaagtcttttaatgagattaatcaaaaacagcagaagaaaattctgtcccaactctcagagacagactaatttgccttcagtatttgttctcttagggtccctggctgattcaatggtgtccaccaacactgagggcagatctcccccacctcgcccattctgatacacatactagtctactctggaaacaccctcacagacacaccccaaaataatgctttatcacgtatctagatacgtctctttttttttttttttttttttttttttgagtcttgctctgtcgccctggagtgcaatggtgcggtctccactcactgcaagctccgcctcccggattcacgccattctcctgcctcagcctccagagtagctgggattataggcgcccgccaccacacctggctaatttttgtatttttagtagaggtggggtttcaccatgttgggcaggctgtctcgaactcctgatctcaggtgatcttcccgtgtcggcctcccaaagggctaggattacaggcgtgagccaccatgtccagccttagatactccttaatccagtcaatttgacacctaaaattaagtctacaagtccatcccttgtctatttggcacccatacatatcttaaaccacacgtaatttccaaatgaagacaataacaaagtaatagttctgcctaacaagatgcaactaacataatgaggctatcctgtgtacaacagaaaattcactaatcgtgatttttgagattttagatgttaaggacttagacttcagggatttttatcattcaggatttcagcattcaggactatgacattcagaatcgtgtcttttgggattgattggtagtgggtataatgacgtattttgcaactggttccatagctgaattccatagctgaattctcaatggcagctcaattctaggtacctgtgagaggcttcttccatccagaagcactttcctaactatctttccttggagcctgatagaccaccaatggaatttgttccattggctaaagcatcaaatcccctgagatccattctccaagcacaaggatccttagaaataggtaacatgtaacatcattataaatcacaaataccatcatgtgaattagttatcagggaaatacagctagcaagtttccaaggaaatgagacacaggcccagtagtatttgatggggaggttggggaggacatggagaagggatagttatagatcagagtcaggaatgtcctttgggagtgtcattgtgggactgcggataattaaaggacatggagaagccagaggcagaaaaaaaaaggtgccactaagggtatgcaccacaatccaggtcgggtccgagctcaattactatgctaatatggtcatggatagacacagagaagagaaaattgtcatatgtgtgtccatggatttctctacgcatctcagctacaagttctgccaatgctgccatttgtcacaagggcagtggggtacatgaccccgtgtctcactgagtggaaacctgtcaccaagaagaagactctaaaggcatgtgtccccaggagtctgctcagagtgtttatcccacacttagggccaggaggcagttttggatatttggtttggagggttggaataggtttaaaaagccaatggatcttatctagcagtagatttctggagcaatctggacaaaaatattgtcttctttcttacatgaatgggatgttcttctctccccacagaagaagcgcacgctgaaggggtccattgagctctcccgaatcaaatgtgttgagattgtgaaaagtgacatcagcatcccatgccactataaatacccgtttcaggtaagtccatcaggtgggtagttccccattccctggactgtggttaaaatcttcagtcacagccgggtgcagtggttcaagcctgtaatcctagcactttgggaggttgaggcaggcagatcacgaggtcaggagttcaagaccagcctggccaacatgaaaccccatctctactaaaaatacaaaaaattagctgggcgtactggcgggcgcctgttatcccagctactcgggaggctgagacaggagaattgtttgaacccaggaggcagagttttcagtgagccaagatcgtgccattcactccagcccaggcaacagagtgagactccgtcaaaaaaaaaaaaaaaaaatcctcagtcactgtgagagagggtggacacggatgactctctgcctctctgctccaaggttaggacttagacaaatcccattaggaaacgtatgtgttccttccatcagtgacatttatttgttaattctttcacttattgaacaaaaattaagcacaaaatcttgaaaaggtggttattccttatacccctttccctcatgtcttctcttcctcaaggaaagtcctaattagtgaaggaagaaataaagctgctatcaggggcccgaaacctaatgtgctttaagtgcagtttactcatgatttgaggcaacatattgcaattgctgggtatgaattgcttggagattctgaggcaaaaagattcagattttataatctgaggactatctggaatcgcactgtctagtacagtagccactagccacacatggatgttcacatttaaatgtattaaatgatattaaaaattcagcttcttagtcacattgggcacatttcacatgttcaatagcaggacatggctggcagctactgtactgaaacagcactggttatagaatgttcctatcactgcagaaatttttttttttttttttgagacagagtctcactctgtcacccaggctggagtgcagtggcgcaatcccggctcactgcaacctccacctccctggttcaagtgattctcctgcctcagcctactgaatagctgggactacgggcgtgtgccaccactcccggctaatttttgtatttttagtagagatggggtttcaccatgttggtcagactagtctcaaactcctgacctcgtgatcgacccgcctcggcctcccaaagttctactgaacagagctggtggagggtatctttaaagtccttgtatatgaatcttggcacttctggcttcaaaggcatggatatctccttgcacatcccagggtaccattcctgcttgccaacctgagggatgaacatatttttaacacggcatagaaaagaactttttttctactagaaaagtgaccctcatgagttggaattttgaggactgaaaataaaaggaatagcatgtatttttcagttgttcaaaatctcaatgataatgagtgcctaaaagagaggtgaaatataaagaagactgcagtttagttaacagtattgtaccaatgacaatctcttggtttttttttttttttaatttttttttattatactttaagttttagggtacatgtgcacattgtgcaggttagttacatatgtatacatgtgccgtgctggtgcgctgcacccactaactcgtcatctagcattgggtatatctcccaatgctatccctcccccctccccccaccccaccacagtccccagagtgtgatattccccttcctgtgtccatgtgatctcattgttcaattcccacctatgagtgagttttgaaagatgtgttgtggttacgtaagatgtcatcagtggagaaaagtaggtgaaaagtacacaggaactctgtactatttctggaacttcttgtgagtcttaaactatttcaaaataagaagttttcaaaactctcattgcacatttgtcatataatatctttctcttccatgtgccagaaatatttttttaatcactaaaaacttaagatgagaaataaatgtggtttctagtcaagaggagaactttctcctgctgtcttagtttagtgattgctctcttggggcatggaatctgagacgagcagctgaaactgcttaccctgtgtttttgtagcacccaaacacctggataaaaaggatactggccccctaattacccaaatgtttgcctatatgacgataaacacccgagaccccactctcggctcagtaggtctgctgtcagtcaactatctccatgcacgctgctcaccttgaactctgtgtgtgtgtctccaggtggtgcatgacaactacctcctatatgtgtttgctccagatcgtgagagccggcagcgctgggtgctggcccttaaagaaggtaattaaactcctttgccattgaatcactgacactcttgatcctatagtagggttgggttccacaatagaatagagtgtggtgtgagagcagctgatggctgatttctcttttggggttggtggaagttcccaagttttcatcctgggcccaggaagcaataactggtatcattcagggattgaccaaatccagcctgctgtctgttcttgtcaggctctgagcaatatttgtatataactcatttcaaatagtttaataagtacctacataagatgcttgattttgtctcatggtcagtaaaacctaaaatatttactgtctggccttttaagaacaaatttgccaactcctcgtatagtatgaagaagcagagcataggccctcatgtgagatgacctgggtttaaatcccagtctgtcacttgctatgtacacttgggcgagttccttaattgcctgtgcttcagtttcccatctgtttaaaaggaagaaaaggaagggataacagcacctgcctttggagctgatgtgagcaaagtcctagaaactaggttggcccatagacagcatgcaataaatatcagctagctttcaagcttttcagaccattggtaagggtatttcttaagccttaccttcctgatggcacagttagaggcagcagtgtttaagcacatgggatgtggagccaggcatgaaggtgaaaatcccagctctgccaatgattagcatgtgaccctgggtaagttccttgaccttcgtgtgtctctataaattttgactaaaaacagtcatggagctgttgtgagaattgaatgattgaggacttagaaaaatacccatcccaaagaaagccctggatcaatgttaccattattgttctttagcctgaagcactggatgtgtcagaagatctgggttcaaatactaatctgcctctacgaagctgtgaggaccaaggataagcaaactatttgttatctctggagctgcaattcctctatctgaaaaaaatgagaatagaaatacaagttgtatcttatcccgaggttgttgtgagccttaaatcggttatgagcagacaagtgctgggtgaatggggaagtgctctccgttcttacagtcttgggacatacagcaaacacaaaagtaagaagtaatcaaaatgggctgggcgcagtggctgacacttgtaatcccagcactttgggcagccaaggtgggaggatcacttgagctcaggagttcaaggctacagtgagccatgctcatgccactgcacttcagcctgagcaacatagtgagatctcatctctactaaaaataaaaacattaggcaggcatggtggcacatgcctgtgctcccagctacccgggaggctgaggtgggagaatcacctgagcctgggaggtcaaggctgcagtgagccaagtgagccgagcctgggtcacagagcaagaccctgttcttaccccaccaaaaaaaaaagaagaaaaaaaaggaatcaaaagggccccagctatggtcattggccatttgccctctgtgaagggattttatacacagggtgttaaaactggaaggaatattagagattagatatctagttctgtggttggttcatttatttatttattcattgagacagtgtattagtccattttcacactgctataaagatatgcccgagagtgggtaatgtataatgaaaagaggtttaattgactcacagttccgtatggctgggaggcctcaggaaacttacaatcatggtggaaggtgaaggggaggcaatcaccttattcacaaggtggcaggagagagaatgacagaaggaggaacttgccaaatacttataaaaccatcaggtctcatgagaactcacgtattatcacaagaacagcatgggggaaaatatccccgtgatccaattaccaccacctggtctctccctcaacacgcaggaatcatggagattacaattcaagatgagatttgggtggggacacagagccaaacgatatcagacagggtctcactctgttacccaggctggagtgcagtagcacaagcatggctcactgcagcctcgacctattgggctcaagtgatcctcccacttcagcctcctgagtagctgggactacaggtgcatgacaccatgcccagctaacttttttctttttttttggtagaaaaggggtctcgctatgttgcctaggctaatctagaactcctggactcaagtgatcctcttgcctcggcctacgaaagtactgggattacaagcatgagccactacacccaactctgttctgtgccttatgtatgtatttgtttcagtagcagaccccccttttttttccaaccaaaatcttacttcaaagccacaaacctagaagggagaaaaccaaagtggctgtggttaaaggtaggagaggtggggggtggtaattccaccttctcaaccttctcattacccttaaggcacctttgtagagcccagtgtttaacaatctcattgcatagtgggggaaactgaggctcagataagggtttgcccaacttaagaacacataactaatgcaaggcagagccagacgcaagcctagatgtgctgatgcctaaatgtaacatgaactaccccagtaaatagcacagtgcatttatgcgctcagatcaacccatgcttctgagtggtctgggcaatactcattcaggctcactcagccaggtctaatctcgaggtgttataaaattggtagcccttgatagactgacctggaaataactcttctgttggtgccaacctgtttcagaaacgaggaataataacagtttggtgcctaaatatcatcctaatttctggatggatgggaagtggaggtgctgttctcagctggagaagcttgcaacaggctgtgcccaatatgatccaaccaagaatggtaagagactgggaattccctctagtttttgtgaaatgaccataaaaaagtaaaagcttttggcctttaatcattgagggtgtcaggaacagaatgcaaaattctacattttcagaattttccaagaggaatcatctgtctttcctaccagcctgttggtgcttccatctcaaagctgatgtctacagctcctaaccacttgaagtgtgctctttggaccagcagcatcaacatctcctaggagttagttagaaatgcaaatgatctggccccactcatgacctactagatcagaattttcattttaacaagatcccaggagacttatgtgcacagtacagtttgaggagccctgctataacctgcatttgaatggcatggtctatttaaatcttaattaaagaggcagccttaagagatataaaatatttatgtcttacagtgacatcatgtcacacataaatttaattacacaaattcaactctatacccttaaaggtgagaggaattttttttcttttacattttactctgtgatttctccttgcctcctcttcaaacttgcccttgacctccacagtctcagagaggagaaggccgcagtctaaatgcaaagtgaaaacaaaaaaagctgtttttttgcctttgacagtaaaggctcaggtccaggggattgggctgcaactggattttattgatgactttggaaccttaacctccagtcgagtacaactccactcgaatgcatttcacatttattatgctcttgttcctctcaaccatctggggtacatggcgtgatgttaagggaatgggctgccttgagcaattcagtatgctccgggtcacaccgctggaagtgctctgcaaatccattgtcgaataggaataatggcccatgtggattgttttccttccattttcctctcttctcaacctcttttgccatagtttccctttctcatttattcttttgtgcgctaaaacttaatactgaaaattggcaacccaaggcggatgtaacacatggctaggttttctgtggcttcctgattcataggccctctcattgccactttaaaaaccaccacttttcaccctgcaccttggggaaaaaagctcttagacataatcgatccctgggcccagaagaacaatacttaacaagttttagaaattggtaactattcaagtgatcctacacattagtcctgtttaccatattcatgcgggccaatatttaataaaaatgaaatggaaagttttctctggataggatccaccataataacagaacggcatgggcttacctctgtgagtgaaagccctttccaaagtcagtgatctggtctccaaatttctgccaatgccttgctgtgggccctcagatgagtcacgtggccatcaagggccccaatgtcctcatctcaaaaatggcagggagttctgaggggcttaggatgaaataatacctaagcccttttccaattctgaaattctttgacttggtatttccattttgtaattttcaccatgcatgctgcagctattcctcttcggggcgcaagtatttccctcctccaagtgatacacatgtgactgaggtgctagggacatctgaatgactcaccagaatgccagtgcgggaggactggtcatgccgagctgttccccatgtgaaaccagggcctgagcactcttggggtcctgctgtggttgtcatgcagtcactgtgctaatggttttgcttttgcattgcaacccattgccatatcctcctctgagcatctcctcactctaccctcttctgatttggttaaataacttcatggatctgagttttgcacagttgagagcagagttttcaagaagcacactgcactgtgaacgcagcttatggtcatcaccctggatgaaggctcacaggattcctggtaccgagcacattggcagtgcgggtctatgagcactgggctttggataatccctctgagcctctaagagcattttctcacctgcaatatggggataatgataataggtagctatgtgtaaggctgggagattcagtggtgttgtggaaagcagtacagctgccaacatttacagagttcttgataaatggtaattgtgtctacttgtcttccttattggtggatgaaagaatctgaggctgagatatagcctcagaacttgtatgggtctgggaagcagcagaagtggatgagtaaaaacagacccagccacacccaacccatagtaacacccatttctgcaaccagaactggccctgatctccccactgtggggagggaaaggaaggaagggaaaagcaaggccagaggacgaagaaagagagaccagtcatagaatgtccagggctggaagtggccaaggctcacagctagtattggtgaagccagagttagaacaccagtctcccagctccaagttgagttctaaataggaaccatacttcctattacaggggttttccttcttctgtggtcattgtatacccaggtcactatcccagcctactctttcttggcaagtctgcacgggactgggctccagtgtcaatgtgtgactctcctctaccacatccctgatgtgagctgtccaacttcaagtcaacctcatacagaaatgaggaactcatcgtctacctatgcagcccattctcttcccatctctcgttattaaggacgtctttgtattagcctgaagtctgtgcagtgcctcccgtaccacagagagccccagacacagccacacacctttgattcattgagtccaggaatggcctttgcagagctacaaaggagaaatagtgagagatgcatatgaagagatgagaggaaggagagagagaaagagaaagagagaggagaagagaagagaaaggaggaaagagggaagagagaggagagctaaacagacggagacatggaaacagagataagcagaaagacaaagacagagagatgctggggttggtatagtttgaaagaggcagaaagaacacatattcagatgccttaaggcaactaaaagtggatcccagcccactcaaaaagcagcacaatgacctcccacctcagccaccccctcctcaagcccacaaccatatcaggaagctagtgagtcactgtccccctgagtcaccaattcccactcctgagcttagcaggtggcagagacattcccggaagtctctatgcctacagggaagggtgcaagtctaaccccactggcaggcttttcctgggaatacagaaagagagggcccccgaatatggacttctggaagcttctggtgtgtactagaaaagggaatcagaaaccagcaggcccaaggagataaaagacagcttctgacaaggccaagtcaggtttcactgtgtcttattgctccttctggccccctttcttctgttgttttccctgggccctttttctcagaaaaaccccctggctgctcacttccggttgggtccattagttttcatgctcattttttcttttcctgtttttctcttttcagcttcaaagaagcctcttcctcctactcctgaagacaacagggtgagtgagagcgctagctccgggtgcaggtgggcccacaggctacctgattggcatgttcctatttgcatgtccccctctccccatagttttcaaaccctggctgcatgcagcaggctgtcatgattcagcagaactcaacacattgggtatttttgggcttgaactctcttggggggtctgtccacttaaaggaccattcagctgctaaatctccatctcactttatttattcaacaaatactgatatcaaattgggtggccattcacctgaccactttggagtatagtagcagctcactctacataaaagtgtgtctggcatggtggctcacgtctgtaatcccagcactttgggaggccaaagtgggaggatcgcttgagcccaggagttcgagaccagcctggacaacaaagtgagacccccatctctagaaaaaatttttaaaaattagctggtgtggtggtgcacacctgtagtcacagctacttagcaagctgaggtgggaggatcacttactcccaggaggtcgagactgcagtgagccatgactgtgtgccactgcacttcaacccgggtgacagagcaagaccccgtctccagaaaaaaaaaaaaaaaaacaaggtgcacatctactcttcgcaagcattttggagacatacatttgttgatattttatatatttcaaagcacttccacccctttattatctattttaaaacttactatccgttctatccacttcagagggttttagttttattctcattgtaaagcttgggaaatcaaatcccaagacaggtcttgaggcttttccaaggccattcagcaacttagtaggatgcaaggtttctggcgtggtggtctttaactcgagtggtggttctcaaagtatagtccatggaccagaagcatctgcatcacctgggagcatgttagaaatacaaattcttaggccccacccccagacctgctgtgtccaaaacgctgggggaggggcccaggaatctgcattttaataagcctcctcactgatctataatatactgacttacaagtcttagatggcatagtacctactctagggcagcttattttgttaaggagatgaaaaaaaaaagatgggggaaaggatcatgacctttaggtagggaatatgaccctgaccttatgataatattaacaccaatatccacttttctttcttttttttttttttttgagatagagtcttgctcttgtcacccaggctggagtgcaatggcgtgatctcggctcactgcaacctccgcctcccaggttcaagcgattctcctgcctcagcctcctgagtagctgggattacaggcgctcaccatcatgcccggctaatttttgtatttttaatagagaccgacttttaccatgttggccaggcaggtcttgaactcctgtcctcaggcgatcaacccacttcaacctcccaaagtgctggaattacaggcgtgagccactgtgcctgaccaatacccacatttgagtactcgctcttcattccagagcaagttctttaacaagagctttcagattccatttcctcatgcttcttcctgaagaatgagctctgccttttttcccttcagccaaaatggtgacatttcaaaactggcagcgtccccataaaggaagctctaaatcctcaaagccccagcctggtgtttagatctgtcatcagcctactccctcacaacatgagagaaatgtactgaaactgtagcagagaatgagctctctctccttttctttcactgaccttctgcagactatttcaccatcccctttgaaggcctggttcggaaccctactgccctcccttgcagacggttccctcaacagtcccgcctaaacccacacctcccatcttaagtgaggctgctcttgtgtctttatttttggtatcaatgaaggtgaaagccagaaaacactgctggtccttctctccctacactctgccatttggcttttcagccttcttggaggagcatcgtggatactgttttgagtgttctgaccacaaaggttttggaatcattgttctagtttcaaccgcatgtctaaatccaatgcaacggttctcttgtctgagccacttgaaatcatttctctcctcaccttcttgttctgctgcctgagtggtaatgacatctcgggttgtcatacagagaaactgtttttaatccagtctgagccaacaggtctcatgctctatgtgagaaacactgtgagcagggccagtcctccggggactggccagtcctctgggggttgggggatggctattttggttcaagatgtaaaatatccatggtcagagtgaaggacaatcctaggcctcttttgcctatggatacaaacaaggtcgtatatcacattgaagtacaaattccgattcctcttggccccctgcatccatgggaactcaactcttcctcttacagtccctcccagtcaacccagggcttgctgaggggccactagaatgtgtctgcatgtgtcctttcttgctggctgcctactaaggcaccctatccctgccactgctacctgggctctctgtgagggcccctcagccccgtggagctcttcccacctggggccagcagaggtcctggggggtcaggttgtgctgaggcctgcagcagagtggccaggaggcaggatcctcattcctttcatgcctcaccacatcatggaggctcccaaacaacccttcctgagcccacagactcagtttctccaaatgccatcccttgattttctcactcaaatctaatggttcccaaccttatcaaactcaatcctgccttttaatgacagatattttgtaaggctccttttgttatcctgaaaagaaatttataactaatataacatatatatacacaattttttaaaattaaagtacttaattaaaattttttgttgctttgagacagggtgtcactctgttgcccaggctggaatgcagtggtgcaatcatagctcactgcaccatctgtctcttgggctcaagccatcctccctcctcagcctccgcagttgctgggactacaggcacttgccaccacacctggctaacttttgtattaaacatactttttaaaaagaatcaacaaatgttctaactgtaatatttaaaaaggaaagaaaaataatatatataacaaaatatgtgtttctatataaatattgggacatgactgcactggaagacagaatgaaatagtcgaattcttgcactggcaggtaggatccattggatttggcatctcgaatgcaactgatacaaaatgtggtattgggactcaactacagcattaccaccagtgatataattttccaaaatgatgaacaactcttagtaaacttctgaaccaaagcatagtcttccctcaaagtacaaggtagttgcattcttgggaaatccagtactttggatagggtacagctaggatctaggctcaggatgttcttatataattactgtataagctggtttctcaccacatgaatgtttaccaggatattcgaaagttgtggggaatgtgggactctacagagcattttgcattaaaggcctatagcatacctcaaactgtgatgttcaaaataacccccatattccaagcttgcatgattattagaaaaaaaaatacatgtccagtgtgcccctacagaaaggtactatcataatttgagggccctgctctgacctttctcttcacagctattaaccaatgagttgacctgcagtgggatgaatgccatagctctgtttcttcttcaaacatccttgaacactattcctccctccataagctcttagagcaaaagcctcaggccatccactcttgtccatagcaccccatttacacatcctcacaagctccacaaatatctagatttcaaattccaatctgcagccgggcacagtggctcattcctgtactcccagcactttgggaggccgaggcaggagggtcacttgagcccaggagtttgagaccagtctgggcaacatagtgagaccctgtctctcttaaaaaaaaaaatccgatctgggctcagctgagatgacatactacatcaaaatgacgagactcttttttcagctccagtatttttatgccactaaatgcttcaatgtactcagagaacttgtgacttcctaacactaaaccacattctagtgaggaacttaatatttccctacatttactctcacaaagtctgctaacccatagcaggcgtgcccatcctgaactctggcgactatgcgctttgtggtcttttcttcatgtcctcaatatggacatgaagaaagggactgaggaacagagacatcagcaatagagcctacaggagaaggaagggagacaggtgctagagtagagagagtcttagggctaattcaagtggtagattggccaggtccatttctccatctgggcctcagtttcctcatcctaaatgaaaaagtgtattaagtgatctgttagaggaattccagctccaataacctatgattccgtagatctagataaacccacaaatcatattagtaaagcacaaactgaaagatttcatgttgactgcatctcctttgccaagggcatgatgcatccagcagagaggctgctgcatataacatagtgcagatagagaaaccagcagacttttgtgaaaatcacgtggctgcttggaattcactgtggtcagaatttacctcatagaatgagcaatgtgatgaattccaagcactgatgtctttgtgtcatgttcagcgctgtaactctaactcataaagaaagtctaccagaggaaggcagactgtctccccagacaccccgatgaaaggaggcattttacctccttttttatgtctttgcttggttttgttgtctctcttccccagcgaccactttgggaacctgaagaaactgtggtcattgccttatatgactaccaaaccaatgatcctcaggaactcgcactgcggcgcaacgaagagtactgcctgctggacagttctgagattcactggtggagagtccaggacaggaatgggtaagtcatctttgtggctgctgtccccgtgtttgaggtgtggtgcgaacaaataaaataccaggatgatttgtcctatctcccacagtgtaaccacagcactgaggtgggagaagagagcagaggcagaaggaagagggaggaagaggaagtagttgaggctcatttttcctcttctcagaagtggctctgaggcagtcacttgctatgcttgttccctgcaccccatctcaggcactccagacccaaactcatctaaaaaaccccctggatttttccactgacatctacaatttgggagcttggcaatttgttctgcaaagtgctattgttcctgagtgttaagtgaggctgaaggtacatcccattaggaagtgcttatttttggtgaaaagaaaatgtgtgtatagagatggtacagattgatagttatgttaggacgcatcagaaagaagacactaaagatttagttacaatcgcagtcattgaactagccatccacatgactcagggagaaaataaggttgtacaaatactactttcccactatgcaacttttgaatgaaaaaaataccgagcatgagattcacactgccttttaaggttttttttttcctcttaatatatccgatgtattaacccatgctctggaatattttccagaatctgagttcaatagttgcatcaatccagccataaatgtactctaaattgcaaattcccttgttgaacacttaggttatctccaatattttgcaaatattaacaacactgcaacgaacatctttgtatattaatattaagggtttaaatgttttcaaggtatgaggttattattaattttaaagtataaaaaagaaaactgtccttgcaacatatagatcatttatgtcaacattttacttaactaacagtagagagaaatatacataaaaaataagccaccctccatttgcccccacgtcaagtccaaaagtaatcactatttggccgggtgcactggctcacgcctgtaatcccagcagtttgggaggccaaggtgagtgcatcacttgaggccaggagtttgagaccagcctggccaacatggtgaaaccctgtctctactaaaaatacaaaaattagcatggtgtggtggctcaagcctgtaatcccagctactccactggctgaagcatgaaaatcacttgaacccaggagggagaggttgcagtgagccaagatggtgccacttcactctagcctgagcgacagagcaagactctgtctcaaaaaaaaaaaaaaagtgatcactattaataccttcttgtgtatcataaataaaagttatacctgtgcaaatgcatccttttttcacttgtaccaagtggatccattctgttctgcatcttgcttttaatttttaatgatattaatacacattgaagatcttttcataccagcacatgcaaatctacctcatttttaaaatagttgcatgggccggccgcagtggctcaggcctgtaatcccagcactttgattgggaggccaaggtgggctgatcacctgaggtcaggagttcaagaccaacctggccaacatggtgaaaccccatctctactaaaaatacaagaaattagctgggtgtggtggcaggcgcctgtgattccagctactcgggaggctggggcaggagaatcgcttgaacctgggaggtggaggttgcagtgggccaagctcacaccactgcactccagcctgggagacagaatgagaatccatctcaaaaataatcataataataataattgcacaatcttagaatgtatgattgtattattagtatttaaataatcctttatggtgagacatttagttgccagtttatttgtttcctctgctgtttcaaacaaggctttaatgaagatcttgtattcatgtatcttggccatctttggaatacaaacatatatatatgatatatatttatcacattagttttccttttcttttttttgagacagggtcttgctctgtcacccaggttggagcacagtggcactctcacagttcactgcagccttgacctctcaggctcaagtgatcctcccatctcagacccctacagagctgagactataggcacgcaccaccatgcccagataatttttgaattttttgtagaaatggggtctcattatgttgcccgggcttgtctcaaactactgtactcgagaaattctcccgctttagcctcccaaagtagttgggattacaggcatgagccaccatacctggcctatatgtcacatttctaactgtgcaacagttaagtcagagtatgtgatatcttaattttgccacataatttcctcacaaagcttgccaaatttaccttcctgctaacagagttatggaagtgccaagactgggtatcattgaacttttaaaaaaagtcaatctgatgggttaaaaaaaaaaaagaggggcacaaatatctttaaggataagactttaccttttacatacaccagaatttacattttcaaggtgccttctctttaagtaggcttatcaaccccattacagggggaggaaagacagaagtgagacagggtaaaacgtgatgagattcagaaccatggtttgagaggcagtgtggtttgctagctaagaacagaccccaactcccctcgtctggaacctccctttctagttgattcatgaagacaattgagctagtcacatcaccttctctctgtccattatagacaggcccatatccgaaataggttcaagactgtctacagggtctacaaacaccgaagggacctagaaattcattagttcaatcaactgactttacttagcacacctaatgtaccaggaaatttgttctcctaggccttacttccccaaatgacagttaaacccttcatttggtgacctgtggaaaggcttaactatgcacttcaaagggcatcaaagaggacaccccagcagccagtcagcattatgggaatttccccagtttgctttgtgatagtgtggtatagtggaaagcacacaagatggggagacagaggacttggactttatcagctactcttgtcatatgcagctgaggattcacagatgaccatgtcatatgtgtgaccatgtcattcacagatgaccaagtcacttttcctctgtgaatccatttcgtgaactgtaaaatgcagctgataatgtcagctttgtctacgtcacagtgttgagaaaatcaatgagataatggaagtgaaagagctttggaaattctacatatccacatacaactatgagagttaccatttgtgtagatgacccagctttgggtggcatatgctattcaaaagcaaaatattatttgatgcattaatataattgtaaaagtatagtatggcaaaagtagacataattaagggaattccaagagtgatacagaaggaatggcaaatttcagaataagctgactttcttccgttggaatggctgccttgagcactgtatgaaggatgattctgagggcagatgtccaattctccaaagaaagtatgccatgattgattagcaatgtctgccagaggagtaaaatataagatgatcatcctgtatttggcacctacagtcttgatttcttcactcttcacaactctgaactgattacacatttcccataaacataatcactagattgaaaattggccttattataagaaaattaaaacatgttatggaataaagagcaataaactatcaggcatctttttttgttttgttttgtttttttgtttttttgagacagagtcttgctctgtcacccaggccagagtgcagtggcacgatctcagctcatggcaacctccacaccactgcccccacccgccaccacccaggttaggtgagtctcatgcctcaatctcccaagtagctgagactacaggtgcatgccaccacacctggctaatttttatatattttctagagacagggtttcaccatgttgcccaggtttgtctcaaactcctgagctcaagtgatccacccacctcagcctcccaaagtactaggattacaggtgtgagccaccacacccagcctatcagtcatctttttacagattgacagagtatggagtatctacttaaactagattttaagtataatctagtttaagcccttcatttgacgggtataaagtcagaggtccagagagtagaagggatgccgctttcaccctgtggtattaaatgagataatgaatgtgaaagtgctttgaaaactacaaagttatacacaaatgtaaagaagtttgatattcttattttgtttattatgttttttgtttatgcacaattattaattcttgctcaaaagtgactcctgatccccaaatctagcctggctttatcctttttttctcgtgtttataccgttcatatctgaagaagctcaattagggaggccttaaattaaaaagcttacaatgccaactggtagtgtcttttagaatctgtggttggaaagtcatcttttatattttaattattttggtttcctgactataaaatgatagtactaaagtggaaaaaatgttgattatcacacaaaaatgtttccttatagaaaatagacactgaatattaatctttttttccagtagaggaaatttcacaatgaggagaacagcaaacagagctttttaagtaaaatcgccacttctttttttattatgtttcatatttcagtagtgaaatcaacctgcctttaacagacaagttgctattattttttaccaattcctttttttttttttttttttttttttgagacagagtctcgctctgttgcccaggctggagagcagtggcacgatctcggctcactgcaccctccacctcctgggttcaagcgattcttgtgcctcagcctcccgagtagctgggactacaggcatgtaccaccacacccggctaatttttttttgtgtgtgtagttttagtagagacagggtttcagcatattggccaggctggtctcaaactcttgacctcgtgatccacctgcctcggcctccaaaagtgctgggattacaggcatgagccaccgcccccggcctaccaattcttgtattctaaactttaaaatgtcttatcgcaaatgccaaataatgtgatattccccaatctttaaatgacttttaatggattaaacctataaaatgatataaaacttagttctatgtaagtctaaacattaattttccttttaacaggcatgaaggatatgtaccaagcagttatctggtggaaaaatctccaaataatctggaaacctatgagtaagatattttatttgtttttggaaaatacagtcctaaggaatcctccttaagttaggaataaattattggttgactgtaaaaataccagatgatccctactgcaacagcaatgttcacacataccatccagctcttgatacctaaataaggctttccactaaaaaaaccaggactttctggagaaaaggcttggggtagggatagaacaaaaaggaacttggaacatctttttgtgccagaaagtaaagaagtacttaaaaagaaatttttcttctttaatttttttttttgagacagggtctcactgtcacccaggctggagtgcaatagtgtgatctcggctcatcgcaacctcaacctactgggctcaagcaatcctcagcctcccaagtagctggaactacaggcacatgccaccatgtccagctaatttgtaaattttttgtagagacaggatctcactaggttgcccaggctggtctttaacttccgggctctagtgatcctcccattatggcctcccaaactgctgggatcacaggtatgaaccgctgtgcccagacaaaaagatgtgggcgtgtcagatgagcacagaagttggctctaacaggctccatttgatgaaatctgggacaatttgagtatcaaaataaataatgactattaaaataagtaatagactacaaaccattgaataatataagaatctgtaataaatagatagactgatagataaataaagaagtaaataaataaaaaggaaagggttttttcttatagtagaatgccaactaatgaatgataaagtttaaaaatcatcattttgtaacccagagtatcaactgattcaggcaagaatcctcaatgaatgtcaccactagcaagttaaagtttgatgagctgtggcatatttacatagtctcaaagtatctcctcacaaatcacttgtaattacaaagtggaggtaactagcaggcccgtctgaaacagtcaatccaaatgcacataaataatggagcaaaaaggtatcttgtgtctccttatgtgatgcactgagaagggcacacatcacttctgtgatattcctgctcaaaaaatgcacaacatgaatttacttataaggatatattcataaggatatattagacaaatccaaattagggaatattctctaaaattaatgtcctgggctcttcaaaaaaaaatgttaatatcaggaaagacacaacaggctgagaaattggtccacattaaaaaagactaaagaggtcgggcgcagtggcccacacctgtagtctcaacactttgggaggctgaggcaggtggatcacctgagatcaggagtttgagaccaggctgaccaacatggtgaaaccaccgtctctactaaaaatacagaattatccgggtgtgatggcacacgcctgtagtcccagatacttgggaggctgaggcaggagaattgcttgaacccaggaggcagaggttgctgtgagccaagattgcaccattgaactccagcctgggcaacaagagcgaaactccatctcaaaaaaaataatagtaatagattaaagacacatggtaactaaatacagtggtgatcctgggctggatcttgacccatacaaaaaaatattttttgttataatatacattattgggacaaccgatacaatttgaataagatctgcagttaagtaatagtgttatgtagatcttaaatctcatgacttcggtaattgtactgtggttagataagtgtatactctgtgtcttaggaaatagacacagaagtacttaggaataaaagtcaattctcaaatagttcagaagaaaagtcaatctatgtctatctaaagagaatagtaaagcaaatgtataaaatatcagcaattggctcatctgggttatgtgtatatgatggttcttttacactattttacagcttttctgtaagtttgaaattatttaaaaattttaaaaaattaattactcactaaatataagataccaggcctaaagaataaagctaatgaggacacctattaacgcattagggttcttaattcaaatgtggtcgtgttatttgttgctgaaattctagtagattctttagtgaagaaccgtcattttctggagtctctcaaccttgtttgttttgataaagtatgtgtgagtagcccttccctcagtgaacagaagggtcatcagttctaagaatttttgagctgaaataaaacatatagggtatatgcttaaataaaataaaaaatctttataggcaatacctttgaagaaaaaacaataagcatttatttcaaatgaccactaggctatgtagttttgtttgttcaactttgcttttaatcagaatctctttgtttatgatcaaaggagcaaactcaaaattccaacaggataagcaataggaaatggtgaggtctggagcaaataaaaaaagtcattcacccacctaaaggtattttaagccattttaaaaataaaacactataccatgcaaacaaaacaatctagttatactgtgcactttcagtttgcattctccagattatgaatctcagctggaaaataacatgacttacaagcaaacattcagatatttagtatataactggatatatgaaagattccagtatgataactttttattcgtgaacttagtgttgtctagtttcaggtgagatctgcctaagtacttaaaaatgtaccacctggtaacatagtcatgggttggtaaattgaatggattcaggtctcctgccttggtttgcagccatgaccttgggcaagttacctcaccctatttgagttctgatcccttctccataaaatgaatgctcagacaagatgaaggaaggcaaatcatgactctcttgctggcattcccttcccatgcactgaactcaggcagacatcaccctttgatagtgaagctatttacccaccatgctggtgacaaccttttcaatgcacagctctaggcagccactactatcgctgatggcctgtgtgtgagatgaagcctatattttcccaatcctcgattagataatctctaagagcccatgttggtgtcatgtactgttctgtcttataatgttcaaaacctctaacgaatccatgaattcctttagtcatggctactctcaagtagccaaacaagtttgttaagtggtattccttccctacccagaacttctctcctcctgcatttattaattttcaaaactgattattaaccgatgatcagtctgcctcctcttacctaaaaagcagccagagaggttaggatgtggctaaatattgttaacaacataaaaaaaaaacttcatccctaaaaatcatttatattcttctttaccattttatagttgtttttcaccagacaacaaaattataaaaataatgcaattacttggcagaatgtctggaagagcagtcttaaagaggaaaatactacagttgttttaaaaggatatttgctaaactttcaaactggtattacaattttatagctgcactagcaccctcctccttataacgaactgtctactgacttatgaaacgaagaggaaaattaatgttttctaaaactttattttagaaaatttccaatgtatacaaaagtaaagataataatataatgaatatccatgttccccaaacctagcatcaacaatgatcagtattttgccaattctgtttcatatgtttctttccaattaaacattttaatacctggaaatgaatcatgcatttgcttttgagtttaaacgcactggtagaaacatacgtgtgcagacttgttaaataaataaaatacacttaaaatttttttaaagcactggtagaaatagaaaatgaccatatgattttctagcattgtcttttataagtaaataatgaaactttaaaatatgtcattgacatatgacttttccttgctttcaggtggtacaataagagtatcagccgagacaaagctgaaaaacttcttttggacacagtaagtctccttaacctgtcttttgacataaaataaaatgaattaagtgcactgtctcatgtctggaatcccagcgatttggcaggccaaggtgggaggatcacttgagcccaggagttcaaggttacagtgagctatcattgtaccactgcacttcagcctgggcaagatcaagaccctgtcaaaagaagaaagagaggaagggagggagggagggagggaagaaaggtaaaaatgaaagaaagaaagaattgtactgttttttcagctttgctgcgttttatgccaatgcagtgggttgacatgttggattaacgatagttttcatgtctggtgaaaatattctgggaatttacaggactagcaaaccacaggataagaaacctgggcttggcattgacatggagacatcatcaccgctgcagcagtctttgtgagtggtgatggctggccatggggtgccatcagggctggtcagtcatgccttcttctcagtgtgggtcagagatgtctgtgactctgattcggcctgactcagctgtgagtccagaggaaacatagcacttgttttaacttacatttcatcaacagttatcctctaaagccatgcagtgtgcatagcaggaccgattttactcagggatgtcaagattaagggcgaaagggaagagaaaagtagaaaagatggtatggtggggcaggtactgggctctagttcctgttatgtcaccaactcattgggtgactttggggacctctcttcttccttctgggcctcggtttctcagtgagtagaagggcagaattggattaagtcagggatcacagttacccagccctcatcctgccactttctgctccttgtcctgtgaccaacacagctgatctcagtccatggcattgggactttattgggaaacaagacaaatgcagaaaaaagagcaagggaataatctaaaataaactaaggtaaactccagaggagttgggaaagattccatgaagaaaaagaagttgagctgagtccttactgaactctggtctctccttggctctacatcaactcagcacttaattatttcctgtgggttccccaaaaaaacacacattagaattgctgggaaatgttcaaaaatacagattcccaggtcccaccccagatccacagaatcagagtctctagtgttagttcccgggaatctgtactttctcaagttaaatttacaatgcaaatgtagccaactcaaacctggcgctgccaggctgtgttattggataacaaagtagaacttgattaatatgaactaattgagtggagtgcaaaattagctaaaactctgaattacactgtgtttaaacaagtatagttttgttatattaatcacacatcagttaatgacgtctatggagcacttcaaacagcccacattaatgacttctaaaagatgattcctgtattacagcagttcttgtgaggtgctaagtgctaagtacattttgcttgctctggcagttgaaacattcctccttactgatacatatatatatatatatatatatatatatatatttatatatatatatatattttttttttttttttttttttttgagacagagtctccctctgtcacccaggctagcatgtagtggcatgatctcggcttactgcaacctccgctgcctgggttcgagtgattctcctgcctcagcctcctaagtagctgggattacaggcatgtgccatcacacctaactcatttttgtatttttactagagacggggtgtcgccctgttggccagactggtctcaaaactcctgacctcaggtgatccgcctgccttggcctcccagagtgctgggattacaggcatgagccaccacgcccagcctccttactaatattttgagctactttaccaaattctcttctcctccttaggtaaatatgagggcaaacatcaatgggtccctgtcagactcagcccagattctggatagaattgaatgacattttcttgctatttttcactttttttgtgtgctgtttttgaaacaatagctgtattatttctaggtgtatttagagtctttttatctaataagtataggacctttaagagatgaattcctgcatagtattccatggcgtatatgtgccacattttctttgtccagtctatcattgatgggaatttgggttggtaaaaggatgagttcatgtcctttgcagggacatggataaagctggaaaacatcattctcagcaaactaacacaggaatagaaaaccaaacactgcatgttctcactcataagtgggagatgaacaacaagaacacatggacacatcacacaccaggaacatggatacatcacacaccagggtctgtcagtgggtggggggctaggggagagataggattaggagaaatacctaatgtagatgacaggtttatgggtgcagcaaaccaccatggcacatgtatacccatgtaacaaaccttcatgttctgcacatgtaccccagaacttcaagtataataataataaaaaaagagatgaattgattcattacacctttttatgaactaaaactcctggtgtactgccccatacatatttcgccactagactataaacaatttatcttgttcctgctgtacttaggcacccaaaagtgtatctagcaccttgtagttgttcaataaatatttgttgaatgaatgaatgaatacactgaaggcttaataaatgtttttaaactaacaactccacttaagggggacctgggtgatcataagcatcactgcaggagctttttaaaaatacaaattcctggactccaggcctatccagtcagaacctcaagaggtggcacccaagttattctgggacttacctacatttgggagccactaaaaagcatctcctaatgtgccatatcagttcttccaatgttgcctcctcccagaagtctctcatgccttccctcgccctagctatggaacgtggtttttcttgtctttgaacctttatgggtcaaatgttattatcagtattattacttctccagtggctctgttctcactctgcctccaatctcagcagtttctcttctgtctttacccatctaggtagatggtaaattccttgcaagtgggtaactctcttagaacaccttacaacatctcacacatagggtgacctgaagttcagacattctaaagtgtcattgaagactcaatgttgacttaataattggtttgtttcaagagaagaaaagcaccacctccagaatgaaagatggctgtatttcagagacactcttaaagtataatgcagcataacaagactatgaattatcagtccatctgttcacaataacttaccctgtgtgttgagattatcttctgaaaggtcaccttcaaattatatgaacagaaagaaagaaaaatactcctaacacaaccaacatgtctcagatggagactgacaatggaataattacttccaataagtagcaaacttagcatgtgataataatggccaataatactctaatagttcttgtcctagtattgtattccaggagcaattctaggcacattacctcagttctcccatcaaccttccaaaggtcattttacagatgaggaaactgaagctcatacagttactcatctttataagttccttttaaggccaggcacggtggctcatgcttgtaatcccagcactttgggaggccgaggcaggcggatcactggaggtcaggagttcaagaccagcctggacatcatagtgaaacctcatctctactaaaaatacaaaaaattagccaggcgtggtggcgggcacctgtaattccagctacttggaaagttgaaggaagacagtcacttgaacccaggaagtggaggttacagtgagctgagattgtgcaactgcactccagcctgggtgacagaatgagactccatcttaaaaaaaaaaaaaaatccttttaaacccagagattctggaattcaaacaaatagcatgggccactgtctgtgtgtgtacacagatatgtgcccacaggcaaaccatcattttagttgtgggatagaaggatttgtgttgttgtagtttctatatactttgttccttatactccaagtgtatgccctccgcacaaggatcttgtctaactctgacctttacttagggccctcattgtgactaagttaagtgaatcataatatttggcttaacaaatgttaccagtgcaagtttacagcggggtaggaacagagtgttagataggaagtacttaaaatagacttcagattttttaatttccaccaagaatgaataaaatggtatgtccatttattagtgcttatttcatcagtgctggcaaaactgtcagggtggcgaaagttacattctcagggcactcccttcttcccacctctctcatgaaaccaggagcttaatgttctttttccttccgccctgcagccaaattctcattctggaaagggcctaagaaatatattatcattaagagaatccttatacactgttggtaggaatgttcattagttcagcccctgtggaaagcagtttggtgatttctcaaaaaactaaaaataaaattattattcaacccagcaatcctattacagggtatatacccaaaggataataaattattctacctaaaagacacctgcactattcataatagcaaagacatggaatcaacctaggtgcctatcaacagtggactggataaagaaaatttggcacatgtacaccatggggtaacatgcgccctgaaaaagaacaaaattgtgcattctgcagcaacatagatgcacctggaggaattatcctaagtgaattaacacaaaaatggaaaaccaaacaccacatgttctcacttataagtgagagctaaacagacatcaagatagtaacaatagacagtggggactccaaaagttggaaggaatggagagtggcaaggatagaaaaactacctattgggtaatatgttcactatctagcaaatgggttcaatagaaacccaaatctcagcaacacgcaatatgtccatgtaacaaacctgcacacatactccctgaatctaaaaaatttttaaaagttatatattcccattaagacactgatgaagttttcaggacagttttgtgcctttgtagggaaatggagaagcagcttctaacattctttgaaaggaggcatcctggagtagtagaccaaggctgggctttgctcacataccagagttcaaatccgaattctgtcactttctagttgtgggtcgtgggaatgccacttaagctctctggcactcagtgtcattggcggttaaggataccaatatccagatggcaatattgtggtaagagttggaaaatatctgtaaagagtctgatacatggggagctctaaaagggcagagcttatgtctctgtctccattcatggttcatgtcagcatgagaacagtctgggatccatgtaggagaccaagaaatatctacggaaggacaggagtaaatgaaacggtagccattcttactgaaatctgctctatgccaagtgggcctacagtatttcctccttctgtgggcaagaaagtggagctggaggcataagcctggtttcctgagatcactaactttccattctttctaaccattccagggcaaagaaggagccttcatggtaagggattccaggactgcaggaacatacaccgtgtctgttttcaccaaggctgttgtaaggtatggagctaactctgctcagcaaagtggagagaaacacttctgaagtgtgtgagcactggggaaaagacaacaaagttagacagtgcaagaggtagaggctcactagaaatggtctgttttccctctttactccgagaaaaccaaagccatggagatcaaggatagaacttaagagacttagaaagtgacagagctgggagtggatgccaggtcctctttcaattagcatctccaattttagagttctaaagacataaaatacttggcactgtattggatgagtatataatttaatacatagaataacagaagagatatttctatctggaagcaaaaatatatgaactccagttctggctctgctcataaaactacctaccattaactgagtctttattatgtgccagaaaatatgcagaccatttccaatcctaagaagccctgaaggcaggtattactatgctcatttcacacagaagaaaccgaggttcaggagctgatggtgcctccctatggccgtgggtctgaaggggccaagccacatccaggctccagccaactggactgcaagatccttcctgcttttctgcccctctgtacctgtttcttctctgtaaaacaatgcctaagaacctatctaggtctcaaattcccttctaattagaacatttgttagaactaagctgtttgacaatgaccaaagtgcagtcagaattaagagaagagacaaataatttttaaggtgtcttcggaaaatttttttggaagactgaggatgtgagcaggacgtggagcaagggcaggtggcaaagaggaagggcccgatccagggatgggagggaacacagtgtacatcacagaggggccgtgcctctaccatggctgggagacagtaaggaggtgacctgcaaccccacaggtatgacggagaagggatgaaacaaagtctgtgtcgaggctccccacaactacccccagcttcagggattcactaggaggccttccaggacaaagacttattgagatttaatacagcaaagtgatacaaagcaaaatcagcaacgggaaaagacacatgggacaaaatctagaggaaacaaaacacaagcttccaagagtcctctcccactggagccaaacaggacgtgcttaattccgccagcaacaagttgtaaccacacgttagcagtctaccaggggagctcattagagactcagtacccaaggcttttattggaggctgtttccacagacagcccctgcctagcacatgccaaagttccagatacccaaaaggaaaacaagcgttcaccataaaacacattgtttctagcagacggtttaggtacagctcgccacccttatcagttagggaaagagccctcccgaaatccaagttcccaaacaccagccaagggttaaccatgcaagcaggtctttctaaggagggtagtcaggcctgttatgttcatcctctgcagcttatttgacttatgaagtcaaataagggtgaaggggtcagagaggctttctcaatgtatgctgacaatcagttaaattcatagaataggcaaggcaaacacatagcaaatatttccattccctcattttgtggcaatggaagaaccatcaccaatccatcacagcattgctgtccactgggtccagacacaacctcagagtcctttttaacacagtactgcagcacccaggcccaatctgtcaagacagacttataagttgaacaatatctgccaccttgtgagaggttataagacaaagataataagaacttaatactcgtagacttttttgtgtctcaacattgcttcttaataatcattacatttgtgtttcatttgtttaagtgagaacaatccctgtataaagcattatcacatcaaggaaacaaatgacaatcctaagcgatactatgtggctgaaaagtatgtgttcgattccatccctcttctcatcaactatcaccaacataatggaggaggtaagctctagagcaggggtggacccgggccgcccagcaggaggtgagcagcaggtgagcaagcattactgcctgagctctgccttctgtcagatcagcgtcattagattctcataagagtgcaagccctattgtgaacagcacttgtgggatctaggttgtgtgctccttataagaatcaaatgcctgatgatctgagatggaacagtttcatcctgaaagcaaccccctgccacatccatccatggataaactgtcttccacaaagccgatccctggtgccaaaaaggttggggactgctgctctagaggacaaagccagagggcacctgggttagacttttttgaattgctatcaaggaatacctgaggctgggtaatttataaagaaaagaggtttaattggtccatggttgtataggaagcatggtgccggcatcttcttggcttttagggagccctcaggaagctttcagtcatggcagaaggcaaaaggggagcaggagtatcacatggcaggagcaggagcgaggagggagaagatgccacagacatttaaacaaccaggtcttgcatgaactcagagtgataactcatttattatcacaaggacagtgacagcaccaaggcatttgtgatggatcccacctaatgacccaaacaccacctcccatcccaccaggccccacctccaacatagggcttttcttttcttttctttcttttcctttcttttcttttctttctttttttttttttttgagacagagtttcgctctgttgcccaggctggagtgcagtggctcaatcttggctcactgcaacctccacctcccaggttcaagcaattctcctgcctcagcctcctgattagctgggattacaggcatgtgccaccacatcccgctaattttggtattttttgtagagacagggtttcaccgcattggccaggctggtcttgaactcctgacctcaggtaatctgcccgcctcagcctcccatactgctgggattacaggtgtaagccacagtgcccagccagggattacatttcaacatgagatttggaggggacaaacatccaaactatatcagcacccacacaggagacttaatgaaaactggcaaaagctcgccctggcttctttttgactataaataataaataaatatacaaatagaaaaatatgacaaatatttaattatattatatatcttctattagcaagctatcttgtggaaataatggaattttaccacttgcccatctgtgcttatgatgttttcaaggaggatatgatatcaataattaggctttgggatttgttttccagaataaaattagcttttgcgtctgatgatgattattattttttttagtgatttaagttagatggttgctagagcaaagccctaaccactgcttcttggcttttcaatcaacccaggcctggtgactcgactccggtatccagtttgttttgggaggcagaaagccccagttacagcagggctgagatacggtgagcagtacaatcaggaatgtaaactcatgtccctaaaggtctggggcaaattctgaataaactggccatgagcctacctgttcctcagactacaaatcaccattaaaacaagtgtattatatatctagagatgatggcactaatgaatatttacattgtgtgtaagagaagtacatatacaagcacatttctctaggtcaaaccagtggccattggttttagtgaagagttcattaatgaagtgtttattaagcacctactttgtacagagcaccctactaaatgctattagaaaaatattagaaaaccatgccttagcactgtgtttccacctatcttctagaacttttatatcatctagttggttgagtagcagactattgccagaactgcaagttgagagcatctagaagtgtttctctgcataagagagtgttaaaattctttggaatacctttaggcgtggcatgatctccagtgctgcagcccctactatgttttcttgccctacggaattgcttcactcacttgggattacctgcctggactctgaaggcatttggctttgcatcccttggtcccaactgtgtgctgcctgtggagaaggctggtctaattttcatttcttatctcctagcttggtggttctcaaatttcagtgtgcatcaaagtcttctagaatgcttattaaaaatgttgactcctggctcctatccaaacactcaccaaaacacaatccttgatagggtcctggagtctacttttttttctggcatgatctccctctgtcacccaggctggagatgcagtggcgtaatcatggctcactgctgccttgacctcctgggctcaagcgatcctcccacctcagcctcccaagtagctactatgcctggctaatttttaaaaattttttgtagagacagggtctcactatgttgccctggctggtcttaaactcctgggctcaggcaatcctcctgcctcagcctcccaaagtgttgggattacaggcatgagccactgtgcccagctgagtctacattttaaacaagcatgctaggtgattttgatacaagtggtcagagggcaatactttgagaaccactgccacgcatgggcttctttatccctaaccagcaccgtgtccggcacacagtaggtgctcaatactgcctgctgttgagtctctgcctcaaagcagtggaaatctggctgtttaggtaccagaccaagcactggggaaagagtgcctctttagcctccttatgaaaataagggtattctaataaatgtagaatcttgatgtgtccgtgctggatgggatttcagatattacctggtcagcctactcattttgttggtgaggaaattgagcctcggaatctcgtatttgtttgttaaacatttcttgagagcctcccatgtgccagacactgtgctagcttgtgcctctgcacaaattctctttaaatctttctctttaactgcccctctgccccagtaaggcctaatagggttatgtgtatatagcaggtgctcttaatagatgaatgaatgaaagaatgatcagctcaatgaaatttacttagtgtgaaaaatgacatagaaaaatgggacattgcaagaaccctttctttaatattttgattaatatggtttctttaatatcttcattaatgccactctccttctttccatgttaccttcccacacatattttcatagttttctagcatatcctatgttattatgtgggaaaaagataatttatttgccatctttgaattatattaacaataggctaaaattctagttagggctttatagtcccctggtatcccaataccttatatctactgcttgctgaccccagagaactctctctctctcttccagggaaatgggtgatcgacccctcagagctcacttttgtgcaagagattggcagtgggcaatttgggttggtgcatctgggctactggctcaacaaggacaaggtggctatcaaaaccattcgggaaggggctatgtcagaagaggacttcatagaggaggctgaagtaatgatgtgagtgctcagaacaaggatatgcagaaactctggggggaacatcggttcagtgttcttgaaatgccattcaaacgccagggggtactatctccctgcgcaaactcccagcagtggcttcctattgcacagagaatacaatcaaactcttcacagtggtctccaaggcccaccataatctgatcatgcccacctcccccttctcagctcctacccatctctcctccagtccatgacatgccagccacactggcctctgctcatcttcacacacacagctgactccttgccatttttcaggtctcagctccaatgacatgtttttgttttggggagggaatgaatattattttcatccaaaccataaattagacaaaatgaccattggctattttggtaccataatattttcggcatttttgggagactgagtttaggccatctcaccccttgtctttttcctccaggaaactctctcatcccaaactggtgcagctgtatggggtgtgcctggagcaggcccccatctgcctggtgtttgagttcatggagcacggctgcctgtcagattatctacgcacccagcggggactttttgctgcagagaccctgctgggcatgtgtctggatgtgtgtgagggcatggcctacctggaagaggcatgtgtcatccacagagacttggtatgagcatgcagggtgaacacccacaggtccagggtaaagggacagttctcactgaaatgactgggaacgcattaataaataatacattacagataatctcctttcctttctcaacttctcccttccttcacctactttgggtggtcctagtggaaagggcttcatgaggacttacttctgggctctgatcccagcccaaactctttcacctcctgcatttcagtttatattcttccaaaatggagataactgccactccttcttaacctctctgtgactcaatttcctcctggtaaattgaggaaactgagtttgtctgaaggtattattcaagggtctaccagaatcacactggggaagcccttaagctactctcagaatctctggtggctgggactcaggaatattcattttaacacattccccatatgatttgtatgcacattaaaatttgagatatgcagctgggtgcggtggctcatgcctgtactcccagcactttgggaggccgaggtgggcgaatcacgaggtcaggagttcgagaccaccctggccaacatggtgaaaccccatctctactgaaaattcaaaaaattagctgagcttactggcgggcacctgtaaccctagctacttgggaggctgaggcaggagaatcacttgaacccaggaggcagaggttgcagtgagctgagatcaagccactacactccagcctgggtgacacagtaagactccatctaaaaaaaaaaaaaaaaaaaattgagacacactggagtgttatctccaatggctttttcaatgcaacagtctataatactaattaggggtcaggtactctccctattgaagaacagttttaagaggattaacaacatcaaaacattcttaatttagtcaactgggagatgctttcttcctgttatccctgatgttaacatttcctatcacatcaggttgcattagagcctatctttggttagacaacaccaaggatttctaattagaactcaagaatgaagataaacttactcatcttgatagtggatcttacacattcaactttccagttaacttccagcggcatttgtgaggcttaattaacatttgtaaagctccatgatgcccttgtatgacagcactgcagtaaagcaaaggactgtgattataggagactccttaactactgatgactcatcaacagttttcctctccgcctttgtttgcctgtctcctctccaggctgccagaaattgtttggtgggagaaaaccaagtcatcaaggtgtctgactttgggatgacaaggtaaaagagggatgtggtgccggtgaagtctcaggaatgggactgaggcccccggaacattctgaccttctccctccactctcttcccaggttcgttctggatgatcagtacaccagttccacaggcaccaaattcccggtgaagtgggcatccccagaggttttctctttcagtcgctatagcagcaagtccgatgtgtggtcatttggtgagtgtcatgctgggccccactgccccatgatctgggcttcaggccagctgtttcctttatcaaatgcagacaaccctacccacactgaaccctgtatcatatcatgagggtgtcccactggagggttgtgtaagaaaggccccgaaaactatgaaagggccttcatcattttgtttgtttttagagatactggacatggtggtgggagttaactaaaagtggaaacaagagttctggtgccagctgctgtgaagtcaaaagctggagaagtcaggagattcaaatatgagccccttgaaggcagggaccatgttttgtccaacactacatttccatacttatctctcaataagtattaatatttattcattcattcaacaacaattaactgatcatctattctatgccaagggctaatctaggtgctgaggatgcagtggttcatagaacagaaaagacttctgttcttttggaactaaatttgagatgggaggggagacagaaaatcacaaaagatcataataacagtcataaacaataataataataaacaagctaagggatagaagataaagccaggcaatcataagtaggtgctatgaataaaataaaacagtaatggggcagagtgactaggatagagagagggtctgctttgaatagtgtggtgtgggaaggcctttctcagaaggtaattcttcagcagagacttgaatgataggagggagctgtcaccatttgaagagccagggaacagtgtccctgacagagggaccagcaagtgcaaaaacttggtgcatccaaagaacaaggggtactgacttattgggagaacaacaggcaatgaagctggtaggccatcataaggaattagaatttctaaaaagtgcaaatggccatgaagggatgaatgatgttggtattgcaggatgtgccaaatgttcttgctggatttgccatgtcacctgaagtcatagtttgtgcatactaaagtgtgcaaaaaaatataccagacaacctctttgatttggattacaagaattatactgtggacagaaactacttgaagattgatttttgccattcggtatgaaggaagggtttgacaagggcttactagtagtagaaaccaggggggagtttggctaggtaaatcttttaggagaagaatgagtgttaaaaatcttctgcagcattttagtctatccatctctaggagccaagtggtttgttcattatgagtcctacctatttcttaaaacagtaccctattaaccaacccttgcagctactttgttaaccaggtttaagttacagaatggacttgaaagaaattgtactaacagcatttttggatgactcccctctccccagtgtgtataactaggaaggttggggctgatgtgcagtcatctcactatgggtgatgaaactgatcacactgcaccaagcaagcaagggccccacaatgagacatttggagcaatggccactttagcacattcaccttctgactctgaatggggtttattcagccaaagggtgtcagcctgggaatttcctggggcatattaccattacagggttgggctgaaattagtccctgtctaggatatattatctgaagagagtccagaaatgaggttgatggatggatgcagaattgagagatcaatggaaaaaagtgtgaaaaaactgggggtaccagcctaagcaacagaaacctggatgagctgaaaactccatgcctgcatcagcccattggactttgtcctacgttttaagtttctttgccctaattagcagtgtgctattcagaacaagtcaacctctttgtactttgctcaatttttttatctatacatttctcatctgtgtattaaagcaatcattctgaaaccatgtttcagcatcggcacattttcaaaaaaattttcactaaaaattatggtgtcttggggtgataagcattcttatttagggtcaggttctgaatttccaactcctgaggcacctctgagtaacatctagagattctgatccactgggtttgggctagggcccaggaatctgccatttgaacaagactctgagatgatttttattcaggtgttttggggatcatgctttgggaatgtctactctaagattctctggaacaacctttgaaaagctctgaattagctgatttgcaagcagccttcttgctctgacaacctgtgaatatatcagcacatgataaagacaaagctaggtgtcacatttctaccaagggcagaagaggaaaagaaagggattaaatcagaggtcaaaaatagacaagcaaaagatgtgttttgcttggtctacatggcattttttaaattcaagaagttcaactcttaatttttgacgtcttttttaaaaaaatcagaaaatgtgccaattctgatccctcattttcatgtgccatactttggttggagtcaaatcatagctgtctccttaagacagaactgtttatctcattttccacaatcctccccaatcccaatagtgtcacacctcctgcactccattcatttacatcctgcatcttggcatttgagtctacaactcttagttgtagcatttgagtttggtacaacaaagggtccatcttgaaaatccttctccactacaaaggttgggaaatttcagttctttaaaaataggacaggcctaataagcctcaggtagacttgatgcacttctggaggtagcacatgaatcctaatgcaaggagtctgtaatttctagaggcaggttggtttgtttgctgtctgtgggctttgtcattcactgtgctgtgctcaccatttcttgtaggtgtgctgatgtgggaagttttcagtgaaggcaaaatcccgtatgaaaaccgaagcaactcagaggtggtggaagacatcagtaccggatttcggttgtacaagccccggctggcctccacacacgtctaccagattatgaatcactgctggaaagaggtcagtggaggaagtgcttccccatgcattgtcgtatacaatttgaggacctccctccttccctagagaaaggaaccctctcagaaggatgaggcaggagggataactaatatagattagcaacaacatgactttgaggatctgttaacgggatagatcccccatccctaaaggagctgaaggcgaccttaaatattatttggtttgctacataatgtcacaagctataagcatagcttcagagaggaggatggggtgtggcctatgccagcttccttctcgattttctgagaagagaaaaaaagtctgtaacatcataaaaccattaaaagcacaggaagttagttctataacttggggaacaaagttcacttgcactatgaaaatattaaaatggcttaatttgagttcattttattcattctgcatttaaaatggggagccaattcctctgtacccgcccaggtggctcatttaccccaaccttggattgcaggccatggcttgagccccatcactatgagtcttagtctttgctgtctttgctgagttagaaaatcatacatttcagccaaagtggaaagttgctgaaacagagaattaataaaaattctgatcattgtacgacaacaaggtggaatacaaaaaatttggaacactaggattttgtctcagctttaccatttatttgccattaatctttgacaattctctgaacttcctttttcttactgttaagagaattaaataatgcttggtctgtgagttcatagagcttttataatcagaaacaaagaaacaatagagacataaaggagggcataaaacaaatcttatccacttcataaggattagctacaataataataatgatggctgacattcagttggcactttttccctcttttaaccatcatttattgatttttttaaattaatagtctttattttttaacaaagagtacagagttctcatatgcccacctcacctgaacagtttccctgttcactaacatttggcatgagtgtgatacatttgttacaattagtgaacctctattcatacattaactaaagttcatagtttacattaaggttcagtctttgtgctgtagagttctgtaggttttcacaaattcatgtatccatcattatagtatcagacagaatagttttactgcactaaaaatctcctgtgcttcacccatttatccctctcctcatccccaaaccactggcaactactgatcttttcactgtcttcatagttttgcctttctcagaatgccatatattggcatcatacagcatgtaggcttttcggactggtttctttcatttagtaatatgctttaaggtccctccatgtcttttcgtggcttaatagctcatttctttttgttgccaaataatattccattgtatggatatatcatagtttatttatttacctaccaaaggaaatcttggttgttttcagtttttgtgtttgtttgtttgggtttgtggggttttgtttttttttttgagatggggtcttactctgttacccaggctggagtgcagtggtgcaatctcagctcactgcaacctctgcctcccagtctcaagcgatcctcctacctcagcctcccaagtagctgggaccacagacatgtgccactaggcccagctaattttttgtatttttggtagaaacagggttttgccatgctgcccaggtgagttcaggcaatcaatccacctcaggcctcccgtagtgctgggattataagtgtgagtgctcaggcagactggtttccttcacttagtaatatgcctttaaggtccctccatgtctttttggcttgatagctcatttctttttattgctaaataatattccattgtatggatatgccacagtttgtttatctatttacctgccaaaggaaatcttgcttgctttcagttttaaacaattatgaatacagctgctataaatgtttatgtgcagatttttgtatataaattttcaactcaattgggtaaatgcctaagagtatgcttgctgaatcatatggtaagactatgtttaactttttaagaaactgccagaatgtcttccaaagtagctgtattattttacattcccaccagcaatgagagttccttattagcattcattgttttggatttcagtggttctaatagatgtgtagtcatattacattgttgttttaacttgcattttcctaatgacatatgatgttaagaacattttcatatgcttatttgccacctgtatatcttcttggtaatatctattcagatcttttgcccatttctcaatcaggttgtttgtttacttattgttgagttttaagagttctttgtatattttggatacaagtcctttatcagatatgtgttttgcaaaattttctcctagtctgtggcatgtcttctcattctcttgacagtgtctttcacagagaagacttttcaaatattttaacaaagctcaacatcaacttatttattcatgaattgtgcttttgatttacatctaaaaactcattgccaagcccaatgtcacccaaattttctcctatgttactttttattttatggaagttttataattttgcattttacatttaggtctatgatccactttgagttaattttcctgaaaggtgtcaggtctgtgactagagtcattgttttacatatggatgtccaattattacagccctgtttgttgaaaagactataccctttctcctctgttcctttgttaaatgttagtttactatatttatatggatctatatctgggctgatccattaatctgtttgtttattctttcactagcaccatcctctcccattactgtagctttagagtaagtcctaaagtcaggtagggtcagtcttctagctttgttgttcttcttcattattgtattggctctctgggtcttttgcctctccgtataaatgttacagtcagtttgtcaatatctaaaaaaaataacttgctgaatttttattaggattatattgaatctataagtcaagttgggaagaactaatattttaacactatagtgtcttcctgtccatgaacatggaatatctgtccatttatttagatcttctttgctttcttttattagaatttttaattttttctcatttagatcatgtagatattttctgagatttatacccagatatttcattttttggtgttctttagcattaatttcttgatatatttttatatgtgatttattgaattctcaaaacaatttcatgaggtagatactattattatctccattttacaaatgacaaaactgaggttcaaagaggttaaataacctgctgaatgtcacacagctaattagtggtaaaactgagattaaacactagtcccttggattccagaatacctgctgttaacaactaggacaatgtatatggaatacagtcaacatggaagcacatacaaaaatccacaggggatgctgctattaaattctggtttgttttggatttacctatgacgcacaagtacaaggaacttacagagttcttttttccctctccagagaccagaagatcggccagccttctccagactgctgcgtcaactggctgaaattgcagaatcaggactttagtagagactgagtaccaggccacgggctgcagatcctgaatggaggaaggatatgtcctcattccatagagcattagaagctgccaccagcccaggaccctccagaggcagcctggcctgtggcatcagtccctgagtcaccatggaagcagcatcctgaccacagctggcagtcaagccacagctggagggtcagccaccaagctgggagctgagccagaacaggagtgatgtctctgcccttcctctagcctcttgtcacatgtggtgcacaaacctcaacctgacagctttcagacagcattcttgcacttcttagcaacagagagagacatgagtaagacccagattgctatttttattgttatttttaacatgaatctaaagtttatggttccagggactttttatttgacccaacaacacagtatcccaggatatggaggcaaggggaacaaagagcatgagtctttttccaagaaaactggtgagttaagtaagattagagtgagtgtgctctgttgctgtgatgctgtcagccacagcttcctgccgtagagaatgatagagcagctgctcacacaggaggccggatattctgagaagcagctttatgaggttttacagagtatgctgctacctctctccttgaagggagcatggcgagacccattggatggattggggtgaacagttcaggtcccatgcttggagcattgggtatctgatgtctgcaccagaacaagagaacctctgacggtggagaaccatgtggtgcaagaagagatcttaggtctcttcttttataccaagctcatcttttataccaagctgtgcaggtgactatgcctcctcttctgcacagaatgcttccaccagcatcctgagaagaaatgattacttctgaaaaacatccttttttccagcctctgggaatcagccccccctctctgcactatccgatcctcatcaacagagggcagcattgtgttggtcagtgttcccttggcgagcaattgaaacttgtttaggccctagggttgagcaattttaaggttgagactccaagtctcctaaaattctaggagagaaataaagagtctgtttttgctcaaaccatcaggatggaaacagtcaggcactgactggggtgcttccaagaggcatgagagtgcctactctggcttgagcacttctatatgcaaggtgaatatgtactgagctaggagacttccctgcaaaatctctgttcaccctgggttcacatccccatgaggtaatattattattcccattttacaaataatgtaactgaggctttaaaaagccaagacatctgcccaaagtgatggaactagaaagtctagagctggtattctagcccaaatctgtctgaccgcaatacacagattctttattcctattcgacactggcttctactgaaaatgaaacggattgcagagggaataaatacaaagatggaaagccagtaaagaagtcagtatagaaccactagcgaatagtgttgctctggcacagaccactgtggttgatggcatggccctccaacttggaataggattttccttttcctattctgtatccttaccttggtcatgttaatgactttggagttattcagttaatgaccctttaattctcacaaccaaccagtcatgttgcttgaagccatttatagacgagcttcaaagcaactttaaaagattcttctgtagaagtatgagttcttcctttaattatcattccaactttcagctgtagtcttcttgaacacttcatgaggagggacattccctgatataagagaggatggtgttgcaattggctctttctaaatcatgtgacgttttgactggcttgagattcagatgcataatttttaattataattattgtgaagtggagagcctcaagataaaactctgtcattcagaagatgattttactcagcttatccaaaattatctctgtttactttttagaattttgtacattatcttttgggatccttaattagagatgatttctggaacattcagtctagaaagaaaacattggaattgactgatctctgtggtttggtttagaaaattcccctgtgcatggtattacctttttcaagctcagattcatctaatcctcaactgtacatgtgtacattcttcacctcctggtgccctatcccgcaaaatgggcttcctgcctggtttttctcttctcacattttttaaatggtcccctgtgtttgtagagaactcccttatacagagttttggttctagttttatttcgtagattttgcattttgtaccttttgagactatgtatttatatttggatcagatgcatatttattaatgtacagtcactgctagtgttcaaaataaaaatgttacaaatacctgttatcctttgtagagcacacagagttaaaagttgaatatagcaatattaaagctgcattttaataaatatggtgcatagggcctcggttccatatttatttaaatcgcaaactctcagaacttttccttaagtaaaaatggttacattgtttcattttccacagacaattaaagattacatatcattgaacaacattcattcaacaagtaaatatcaaacgttcctatggttcatgcacacagttcagtgtatgcatcctcatgaaaacaaagatggaaaagtcatagtctttacttctaaaaaattcctagtctgattgaaaaggaaaacatatgaagaaataaaattataatagaacaattagggcaacaacaaaaaactgtggtcaaagaagagaagagcccagaataagtgatggaatctatcagggaaaggatgacatcaagggaaacttcttagagccctgctactcaaagtgtggtccctggaccagcagcaatagcatcaccatgttgtgaaaaattcagattctcaggcttcttcctcacctaccgagcaagaattgtcattttaacaagatctgcaggtaatcgtatacacattaaagtttaagaagcactgtcgcgaggatatactgtctaagccagttttgaagataaatttatgagttataaggtaagtaagtgggcagaagtaagagacatactttccaggtagagagagaacaggaagtattgggaagctattgtcagttcactattgctggagcatgcgcgcatgcgcgtgcgcgctgtgtgtgtgtgtgtgtgtgtgtgtgtgtgtgtgtgtgtgtctattttctcagcaagggtaaggatgatagaagaggtgggtaaattgaaactgaatctataaatctatgaaagaactatactttaaaagaccaagaagttggaatttcaccctataggtagaaaagatgtcattgcacaggaagagaaggtcaaatttgcgatgtgtttaagaatatattctggcagcagcatagtgaatggatttgagaaaggcaaagccaatggaaaagaaactaatttggagattatctttgccttgttcacagtaccatattatttttcctaatcattcactgtcatctgttgtgtgggtgacatatggaaattgtaatttggagtacgtcattcactttagatagcaataaaatagctttccttcttaaaaccccagtaatataaaggctgggtggttatagttttggtgtgctgagcactctgtgcctttcagtccaccaaatgcccagctccattgcaggagccaggtcatgcgccagtcaaccactgagcatggaagagaaagcccaaggcttccatgcagtccttcctagaactcacctctgtgcttgaatcccactgccaaatcatccacatgagaaagtcaaaagcagattggaggaacagatctgcttctcagaggatttttcctgcagaccctgctcttctcagaatctcccaacacctaaggccacccttttgaggaaaagacagaaatacctcattcagcaagacagggagtatgtgcatcatcaggtgcagaaagagctgcagattcccaattagagggcttgggaaggtggcctggtcaggaacagagggctaggggtggaagctgcatttgaacagtaagcacatggttttactttagaatagatattaatttgcgtgggctttaatggggaaggtgctgaaattttggtgcactgaggctcacttcccagagccaccccttggtaccagcactaggggtgtgtgtatggttgtgtaagagtgtgtctgcaatgactttgagattctccccaaggtacaatgtatagttggcttgtagtataacagagtcatacagacaatgagtggtagacggagttttagagttcatttacttatttcataaatggttaccattcatctactatggctctttgttaggtacatgatctaaaaagatgactaagatatctcatcagttagggaccaagcacgtcacaatcaaattagtataattcgaggagagctttttgacaaaaggactatttaaaactgtgtggttcagtttaggagaaccttagaaagtggtacagaggaaaaccacagcggggcactcatgctatggtttgaatgtttgtgttcctccaaaattcctattgaaacgatctccagtgcaatagtattaagtggtggggcctttaggagatgatcaggccgtgagggctctgcccttatgaatgagattactgcccttatgaaaaggtttgaggaggtagtccctttttgccctttacccttctgccatatgagaacacagcaacaaggtgtcatctatggagcggagagcaaaccctgaccagatactgaatctgctggcgccatggtcttgagcttcccagtccccagaactgtgagaaataaatttctgtggtttataaattacccagtctaaggtattttgttatagcagcttgagtagcttgaaacaagtagttatcaccccctaggcctgaagggataacaagggagagtggtcatttaaatatggaaggagaatattggagagtgctgccttaaaggagaagacctttagtaagggacagaggaaacccaaggcaacatcacagggaggaagccaggggcatcaatactctgcctcactctccttcctttctcccatcaactgggtcttctattggtcaaatcccactgaacgcagaggacaagggagccctagtagggtagtccatagaggtcagtctccaggaccagagtgcagggtgagagagtggagtggatctggggagacaaagagaagatacctagtacagacaccaatccttcctataagagggctcagcctagtgaaaaagctcaacacataaaccaatgcaatcgattctcattgcttgtagattctgtattggtaaatttgtctactggataaaatttgtttataaccctaaaatcaatcctggaggcttttcctgcagtcattcatgacatgccaaagtgtggagcagtaaaaattttgcgttgctccatatacacattcccaactgaggtcaaacagagtggcgttcagctctcatgctgcaaacaagtggcttttctcagtctatttagtgacacattttctgcatttctgtactttttttctggtgattttgctgtttaaaatggcccccagccaggcacagtggctcacaactataatcccagcactttgaggggctaaggtgggtggatcacctgaggtcaggaatttgagaccagcctggccaacatatagtgaaaccctgtctctacttaaaaaatacaaaaattagttgggtgtagtggtgcatgcctgtagtcgcagctatttgggaagctgaggcaggagaatcgcttgaccctgggaggcggatgttgcagtgagacaagatcccgccactgtgctccagcctgggcgacagggcaagacttcatataaataaataaataaataaataaataaataaataaataaataaataaaacggcccccaaatgtagtgctgacatgctgtctagtgttcctaactgcaagaaagctgttagttcaataagtttaatgagggatgagttatagtactgttgactgtgagttcaatgttaataaatcaataatatatataaataagggttttttttaacagaaacatgcataaaacaaggttatgtattgattagttgacaaaagcgtggtgagcaggggcttgtaggaacctaaccctttatttcccctagaagcaatggttcagtatttgttaacttagtgttcacagcaactttatagaacataattactgaataataagaaccaactataattgcaaagagctgttgtaggttatgcgatgtagctatagtcacagcacagcaagagcacagagaattaagtaaacacatctaagggatcaggaagggcctcacaggggaagtgaagtttgagatgtgcattgaagggtaaataagagttcccaaaaaggagagggtctagaaggacatttcaggtggagaaatcagcaggcataaaaatgcatcttattccaacttcttctcctgcattattttcatgttacgtctaggacccttgaggcccaaaccaagtgctggccacaatcacgagagacaactgaaggagtcaagcacagttgaccttgaacaacatggaggttagcgatctcaaccccttgcactgtcgaaaatccacgtataattttttaatgctccaaaaacttaactgctaatagcctactgttgactgtatgccttactgataatgcaaactgttgattaacacaattttgcatcttatatttattatatactgtattcttataacaaacaaaatagctacagaaaagaaaatgttatttagaatatcaaatggaagagaaaatatatttagtattcattaaatggaggtggatcatcataaaggtcttcatcctcatcgtcttcacattgaaaaggttgaggagaaggaggaaaaggagagttggtcttgctatctcaaggctaatagaagcagaagaggtggaagcggaggcaggagaggcaggtacactcaatgtaactttacagaaatacatcgtaatttctgtctgaatttttgccttctcatttctctaaaaatgtttctgtataatacaaatccttctttcactatttgccttagtttcagtgcccacatcatagaagggtcatgtcataaaagaagtcgaaagtcatcttgagtaaccaaaaccctttgccagattgtctaacatcaatttgtgttctgatattgcctcttctacatcttcctcattgtctggcactggttcagtagcactcatctccatcaagttgtcatcttctgttaatccctctggagtggcatctattagctcttgatttctccaagatccatatgttgagacgcttcacacacacccctcacccacctttttgccatatgctcaatctctttcatgattttcttgattgactctgctgtaaatcctgtgaagttatgcacaacatctgaacacagttttctccagcagaaacttgttgttttgagattgatgactttaatagcttttcctgtaacaatgtggcatcttcaacagtgtaatccttccagactttcttgatgttctatcagggttctctttcatagcattgacaatcttttccaaagagtaccatatataatgggcattaaaggtccttatgacccccttatctagaggctggattagagatgtgtttgggggcaagtagaccactttgatgccttcagtgttgaactcatggggttctagataaccgaggggcatccttcaatatcaaaagaaccttgaaaggcagacctttagtggcaaggtacttcccgacttcagggacaaaacatcaatggaactgatccagaaagagttctcgttgtccaggccttcttgttgtacaaccaaaagactggcagctggtgtttaacattttccttcaaggcttgggggttttcagctttataggtaagggcagtcctgatgataagcttaactgcattgcacaaaacagcagagttagcctatcctttcctgtcttaaatcctggtgctcgcttcttttccttactaagcaatgttctttgtggcttttttttccccccagaatagggtactttcatccaaattaaaaacctgttcaggcaattagttatcctttctcctccatgattttgttaatggcatctgataacttgtctgctatctcttggtcagcagaagctgcttctcctgttatcgtgacattttttaagccaaacctctttctaaaattatcaaaccatctttgctggcattaaattcttcagctttagatccttcacctttcttttgctttaaattgtcatataatgacttcactttttcctgacttatattagagtctatgggtacgtctttcttatagcaatctttatagcaacgcacccacctaaaacctgcattttcaatatgagctaaaatggtatttaacaaaaagtgcaaggttttcatacctgctgggagccgcagctacggcttcatgaattttctttccttctttctctctttctctttctttctttctttttacagtggtccttatgctaaattcattcatcttaaaatgatggacaactgcagctgcagacctcaatctatggtacatatcaagaaaattcagcttttttcttgtaatgttatgacttttctctgctttttgggaacactttcagcatcactagtgtcacttcatgtgggttccatggtgttattcaaggtttgctgtattacactaaacatgatgaaaaatgtttcatcatgagagatgaattgctcactcagagatgattagcatcacacagcacttgaagtggatactggcaacacttgagttcaccacaatagcaacaagagatggccacaggccaggcgtggtggcacacacctgtaatcctggcactttgggaggccgagacgggaggatcacctgagatcaggagttcgagaccagcctggctaacatggtgaaactacatctttactaaaaatacaaaaattagccaggtgtaggggcacatgcccataatcccagctactcgggaggctgaggcaggagaatcacttgaacctgggaggcggaggttgcagtgagccaagatcatgccactgcactccagcctgggcgacagagtgagactctgtctcaaaaagaaaatcataataataatcccatttttgagcatttattatgtaccagactctgcttagtgtgttacattatcatttcatataaccttcacaagaatctaagggatatacttttttgttttgttttgttttgctttgttttgatacagtgttttgctctgttgcccaggctggaatgcagccgcaccatctttgctcactgcaacctccacctcctgggctcaagcaattctcttgcctataaaatgaggcaattttgagcaagtggtcaggttctatctacagaatggccaatgtaaattctgtaactgaccatcaagtttatcttttcctgccacccacataaatacttagaaccaaatgtgttagcaagctcatagcaggtagagctgtgattgatttttgttttgtttacattttggtcttatgtacattcgattctccatctcatctctctactcttttccttctttttaaaaaatttcttgctgatttttaattttttaacataatgtattcctgtaacttacatttaatatgtttttagaataaggtagcatattagtaaacaaatggacttagcttggaagagggaaagtgaggctgtatgagattgtggtaaaaagcatgggtttgacttcactaccttgggcaaattattaaaccttaattgcctcaattataaaaatgggaaaaatgattgtattttccttatagaaaaattacgaaaaattaaatgaggtaatgtacttggtaaatgttagccattattattattatcattatttatgttttcccttcatgcccattccagatacttcattactggtgtctataaagcagggtctcctgatagttttaaaatacatatatatatatattttttttttttttttgagacagagttttgctcttgttgcccaggctggagtgcaacagtgtgatctcggctcactacaacttccacctcccgggttcaagcaattctgcctcaccctcctgagtagctgggattacaggcgctcgccaccatgcccagctaattttttgtatttttagtagaaactgggtttcactatgttggccaggctggtctcgaactcctgacctcaggcaatccacctgcctcggcctcccaaagtgctgggattataacttgaagcttttctaaaacacaaggtaatgttgccacatggacaacacgtgggccacagctttgcaagtaccaaagcaattcttattgatatcctctaccatttcattgctgatgcacagcttggggttggatgtgaaggaaatctgaaggcagtagacagacagctatacatttcagtggcaaagtttaaaaatgtcacctatgggtgttcattccatccatttttactgaactcctgttaagtaccaggctccaaggatgcaatgggaaagcaagacagacatatccctgctcccttagattttatggtctcatggtggaatacagggaagtgtgttgacaattataatgc

SEQ ID NO: 71 - DNA, 4366 bp, Homo sapiens
  misc_feature (2332)..(2332): "n" at position 2332 can be any base.
tgcattctttgccccaaaactctttcctttggttgtgctaagaggtgatgcccaaggtgcaccacctttcaagaactggatcatgaacaactttatcctcctggaagaacagctcatcaagaaatcccaacaaaagagaagaacttctccctcgaactttaaagtccgcttcttcgtgttaaccaaagccagcctggcatactttgaagatcgtcatgggaagaagcgcacgctgaaggggtccattgagctctcccgaatcaaatgtgttgagattgtgaaaagtgacatcagcatcccatgccactataaatacccgtttcaggtggtgcatgacaactacctcctatatgtgtttgctccagatcgtgagagccggcagcgctgggtgctggcccttaaagaagaaacgaggaataataacagtttggtgcctaaatatcatcctaatttctggatggatgggaagtggaggtgctgttctcagctggagaagcttgcaacaggctgtgcccaatatgatccaaccaagaatgcttcaaagaagcctcttcctcctactcctgaagacaacaggcgaccactttgggaacctgaagaaactgtggtcattgccttatatgactaccaaaccaatgatcctcaggaactcgcactgcggcgcaacgaagagtactgcctgctggacagttctgagattcactggtggagagtccaggacaggaatgggcatgaaggatatgtaccaagcagttatctggtggaaaaatctccaaataatctggaaacctatgagtggtacaataagagtatcagccgagacaaagctgaaaaacttcttttggacacaggcaaagaaggagccttcatggtaagggattccaggactgcaggaacatacaccgtgtctgttttcaccaaggctgttgtaagtgagaacaatccctgtataaagcattatcacatcaaggaaacaaatgacaatcctaagcgatactatgtggctgaaaagtatgtgttcgattccatccctcttctcatcaactatcaccaacataatggaggaggcctggtgactcgactccggtatccagtttgttttgggaggcagaaagccccagttacagcagggctgagatacgggaaatgggtgatcgacccctcagagctcacttttgtgcaagagattggcagtgggcaatttgggttggtgcatctgggctactggctcaacaaggacaaggtggctatcaaaaccattcgggaaggggctatgtcagaagaggacttcatagaggaggctgaagtaatgatgaaactctctcatcccaaactggtgcagctgtatggggtgtgcctggagcaggcccccatctgcctggtgtttgagttcatggagcacggctgcctgtcagattatctacgcacccagcggggactttttgctgcagagaccctgctgggcatgtgtctggatgtgtgtgagggcatggcctacctggaagaggcatgtgtcatccacagagacttggctgccagaaattgtttggtgggagaaaaccaagtcatcaaggtgtctgactttgggatgacaaggttcgttctggatgatcagtacaccagttccacaggcaccaaattcccggtgaagtgggcatccccagaggttttctctttcagtcgctatagcagcaagtccgatgtgtggtcatttggtgtgctgatgtgggaagttttcagtgaaggcaaaatcccgtatgaaaaccgaagcaactcagaggtggtggaagacatcagtaccggatttcggttgtacaagccccggctggcctccacacacgtctaccagattatgaatcactgctggaaagagagaccagaagatcggccagccttctccagactgctgcgtcaactggctgaaattgcagaatcaggactttagtagagactgagtaccaggccacgggctgcagatcctgaatggaggaaggatatgtcctcattccatagagcattagaagctgccaccagcccaggaccctccagaggcagcctggcctgtggcatcagtccctgagtcaccatggaagcagcatcctgaccacagctggcagtcaagccacagctggagggtcagccaccaagctgggagctgagccagaacaggagtgatgtctctgcccttcctctagcctcttgtcacatgtggtgcacaaacctcaacctgacagctttcagacagcattcttgcacttcttagcaacagagagagacatgagtaagacccagattgctatttttattgttatttttaacatgaatctaaagnttatggttccagggactttttatttgacccaacaacacagtatcccaggatatggaggcaaggggaacaaagagcatgagtctttttccaagaaaactggtgagttaagtaagattagagtgagtgtgctctgttgctgtgatgctgtcagccacagcttcctgccgtagagaatgatagagcagctgctcacacaggaggccggatattctgagaagcagctttatgaggttttacagagtatgctgctacctctctccttgaagggagcatggcgagacccattggatggattggggtgaacagttcaggtcccatgcttggagcattgggtatctgatgtctgcaccagaacaagagaacctctgacggtggagaaccatgtggtgcaagaagagatcttaggtctcttcttttataccaagctcatcttttataccaagctgtgcaggtgactatgcctcctcttctgcacagaatgcttccaccagcatcctgagaagaaatgattacttctgaaaaacatccttttttccagcctctgggaatcagccccccctctctgcactatccgatcctcatcaacagagggcagcattgtgttggtcaatgttcccttggcgagcaattgaaacttgtttaggccctagggttgagcaattttaaggttgagactccaagtctcctaaaattctaggagagaaataaagagtctgtttttgctcaaaccatcaggatggaaacagtcaggcactgactggggtgcttccaagaggcatgagagtgcctactctggcttgagcacttctatatgcaaggtgaatatgtactgagctaggagacttccctgcaaaatctctgttcaccctgggttcacatccccatgaggtaatattattattcccattttacaaataatgtaactgaggctttaaaaagccaagacatctgcccaaagtgatggaactagaaagtctagagctggtattctagcccaaatctgtctgaccgcaatacacagattctttattcctattcgacactggcttctactgaaaatgaaacggattgcagagggaataaatacaaagatggaaagccagtaaagaagtcagtatagaaccactagcgaatagtgttgctctggcacagaccactgtggttgatggcatggccctccaacttggaataggattttccttttcctattctgtatccttaccttggtcatgttaatgactttggagttattcagttaatgaccctttaattctcacaaccaaccagtcatgttgcttgaagccatttatagacgagcttcaaagcaactttaaaagattcttctgtagaagtatgagttcttcctttaattatcattccaactttcagctgtagtcttcttgaacacttcatgaggagggacattccctgatataagagaggatggtgttgcaattggctctttctaaatcatgtgacgttttgactggcttgagattcagatgcataatttttaattataattattgtgaagtggagagcctcaagataaaactctgtcattcagaagatgattttactcagcttatccaaaattatctctgtttactttttagaattttgtacattatcttttgggatccttaattagagatgatttctggaacattcagtctagaaagaaaacattggaattgactgatctctgtggtttggtttagaaaattcccctgtgcatggtattacctttttcaagctcagattcatctaatcctcaactgtacatgtgtacattcttcacctcctggtgccctatcccgcaaaatgggcttcctgcctggtttttctcttctcacattttttaaatggtcccctgtgtttgtagagaactcccttatacagagttttggttctagttttatttcgtagattttgcattttgtaccttttgagactatgtatttatatttggatcagatgcatatttattaatgtacagtcactgctagtgttcaaaataaaaatgttacaaat

SEQ ID NO: 72 - DNA, 1863 bp, Homo sapiens
atgaacaactttatcctcctggaagaacagctcatcaagaaatcccaacaaaagagaagaacttctccctcgaactttaaagtccgcttcttcgtgttaaccaaagccagcctggcatactttgaagatcgtcatgggaagaagcgcacgctgaaggggtccattgagctctcccgaatcaaatgtgttgagattgtgaaaagtgacatcagcatcccatgccactataaatacccgtttcaggtggtgcatgacaactacctcctatatgtgtttgctccagatcgtgagagccggcagcgctgggtgctggcccttaaagaagaaacgaggaataataacagtttggtgcctaaatatcatcctaatttctggatggatgggaagtggaggtgctgttctcagctggagaagcttgcaacaggctgtgcccaatatgatccaaccaagaatgcttcaaagaagcctcttcctcctactcctgaagacaacaggcgaccactttgggaacctgaagaaactgtggtcattgccttatatgactaccaaaccaatgatcctcaggaactcgcactgcggcgcaacgaagagtactgcctgctggacagttctgagattcactggtggagagtccaggacaggaatgggcatgaaggatatgtaccaagcagttatctggtggaaaaatctccaaataatctggaaacctatgagtggtacaataagagtatcagccgagacaaagctgaaaaacttcttttggacacaggcaaagaaggagccttcatggtaagggattccaggactgcaggaacatacaccgtgtctgttttcaccaaggctgttgtaagtgagaacaatccctgtataaagcattatcacatcaaggaaacaaatgacaatcctaagcgatactatgtggctgaaaagtatgtgttcgattccatccctcttctcatcaactatcaccaacataatggaggaggcctggtgactcgactccggtatccagtttgttttgggaggcagaaagccccagttacagcagggctgagatacgggaaatgggtgatcgacccctcagagctcacttttgtgcaagagattggcagtgggcaatttgggttggtgcatctgggctactggctcaacaaggacaaggtggctatcaaaaccattcgggaaggggctatgtcagaagaggacttcatagaggaggctgaagtaatgatgaaactctctcatcccaaactggtgcagctgtatggggtgtgcctggagcaggcccccatctgcctggtgtttgagttcatggagcacggctgcctgtcagattatctacgcacccagcggggactttttgctgcagagaccctgctgggcatgtgtctggatgtgtgtgagggcatggcctacctggaagaggcatgtgtcatccacagagacttggctgccagaaattgtttggtgggagaaaaccaagtcatcaaggtgtctgactttgggatgacaaggttcgttctggatgatcagtacaccagttccacaggcaccaaattcccggtgaagtgggcatccccagaggttttctctttcagtcgctatagcagcaagtccgatgtgtggtcatttggtgtgctgatgtgggaagttttcagtgaaggcaaaatcccgtatgaaaaccgaagcaactcagaggtggtggaagacatcagtaccggatttcggttgtacaagccccggctggcctccacacacgtctaccagattatgaatcactgctggaaagagagaccagaagatcggccagccttctccagactgctgcgtcaactggctgaaattgcagaatcaggactttag

SEQ ID NO: 73 - DNA, 96597 bp, Mus musculus
  misc_feature (2986)..(3005): "n" at positions 2986 through 3005 can be any base.
  misc_feature (7486)..(10000): "n" at positions 7486 through 10000 can be any base.
  misc_feature (17313)..(17398): "n" at positions 17313 through 17398 can be any base.
  misc_feature (22084)..(22138): "n" at positions 22084 through 22138 can be any base.
  misc_feature (36130)..(36149): "n" at positions 36130 through 36149 can be any base.
  misc_feature (51795)..(51825): "n" at positions 51795 through 51825 can be any base.
  misc_feature (72322)..(72480): "n" at positions 72322 through 72480 can be any base.
  misc_feature (95799)..(95818): "n" at positions 95799 through 95818 can be any base.
agaaagagagacagagacagacagacagacacacacacacatggagcaggggaaagagggaaatatatccaaaaataatgaactaaaaacaatagcaacagtaatccccccgccccttaaaacatctttcaggacttataagcttgaaaccatgatcagaaaccatgatcaagagcttcgattgttcttatcaccagaatttccacggtcccaccaaacaggccgttctgcaggtacagttccctgcattcttcatcaagaccatgatcaaagtccaagctgggtgacctgcaaaacctcagatctctccctgccaaccaggcacctgtgttgagaaacaacccaccccatctttcatttctacaaatgtgcattgtgggattggtggtgaggtttttagtttacatctttaaatcttttaaaacatagaactttccattctcatccctgaaagtttacactttggtctctgcttaaatgacatgcaccactattataattgtgtatctacttttatgactttttagtgtgcataggcatgtcttgccttcattggtgcaaagagatgctagaagagattattgtaattccctgggaatgaggacggatgtgagccaccatatgagtgttgggaattgaacctgggtcctctggaagagtagcctgtgctcttaaccactgagccatctctccagcctccctgtatggtacttttgaacaatgcttatcttctacaacagccatacagttcttaaatggcgatttgcccttgactgctgccccagttcctagtagagtgggtgtcttgtgttgataacgtaagaaaactttttagtgaataaataaataatcaggatggggagactgctgagtaagtggagatgcccgctgccaagcccgctgccctgatttccatcccaagaccacatggcaggagagaactgactcccacaagctgtccatgccccacccttaataaatgaatgcaaaacaattagttaattaatcaacgaggtcctctaaaaagtgaagagcagtttagtagctatacttaggctgtatgagtctcttccctctaattaattcgctaatcagtttgcttctgatgaaatttcttccacctaactcaacctgatgacatttgcttgggtccagacacatgacccaacctgagccaatcagattcttccttcctagtaaacttggaactggactccagaggcaagcaatgagccttagatgtatctggatgaggggttggcggatgcttatgcagaggcggggcggggggagggggagagggttcccattctctctgtaaagaaaatcaacagtcagaaagtaaaacaaaagcctggtgtaacaacagtctccaatgctagctcttggaaggcagaaaaaggaggttcataggaacacatgcacccaggggggaaaatgtaaagcagacaatagtactaaatagagacaagagatattgcttgtattctcagagatttgctgcttcattcaagatgtccagttgtctgtgactccatgagaaactgctactatatgttataaatatatagagagccggtggtggtttcagtaaaaatatcccctgtagacccagggagtggcacttactaggtgtagccttgttggaagaagtgtgtcattgtggggacaggctttgaggtgtcagatgctcaaaccatgctcagtgtggtcctctcttcctactgcctgcctatcccgatatagaactctcagctccttctccagcaccacctctgcctgcatgctgccacgcttctcaccatgatgatgatggactgaacctctgagctgcaaaccagtcccaatgaaatgttttcctgtatagaagctgccatggtcttagtgtctcatcacaccaataataccctaactaaaacagagccccaccccatcctcttttagacaacggcagtcaacgtcaacctgagtcctggtgaagacacgcactgtgcctacttcaggaaggaagattagccaggttgattcatcaggttgatcacacacctttggcagattagttactgatgacagcccagctctcagccagatcaggtctgatgctaagcctttctatgactttgttacccattgggccagctctggagagacctcctgctttataaggaggaggcttatgctgaagtcagacttgaccttgaacccttgagtgtctcaactcttgtacctgaaaacaaacaaactcatgggttcaaacaggataaagaacagtgatttcaaaaataattctgaatagagacatgaaagaaaatggatggatgtggagttaaagttatccacccctttattaagtttgtaacctcaggctatatttttttaaaggaaaaaattgcttttgaattccccagtggactttttcctcccctgccccccccccctttttaatttgtcattcagtggccaagtcagggtttgctggcttctggaaaatccaggggattttgaaaatgaaaatctaaggtgtggctaaaagtatacagagtaatcttttatgccaaggggatgctgggcatctcctatgttagttaaggttcctattgctacaatgaaactccatgacctaaaggcactggggaaggagagggtttatttgattcggatgtccacatcagagatcatcactagaagaagtcagggcaggaatttaaacaggacaggaacctgaaggcaggagctgacacagaggccacttaggagtgctgcttactggcttgctctccatggcttgcttggcctgttcttctttctctctctctctttctttctctctctctctttctttctttctttctttctttctttctttctttctttctttctttctttctttcttcctttctttctttctttctttctttcttccttccttccttcctttccttccttccttccttccttcctttcctcctttctctctctctgtctnnnnnnnnnnnnnnnnnnnnttcctcctttctctctctctgtctctccctcccccctccctcccttcctttctttcttccttccttccttccttccatcccttccttcctttcttctttctttattctttaaaattttatttatttattatatgtaagtacactgtagctctcttcagacacaccagaagagggcatccaatctcattacagatggttgtgagccaccatgtggttgctggaatttgaactcaggacctctggaagagcagtcagtgctcttaactgctaagccatctctccagccacttggcctgttttcttaaggaacccaagaccactggcccagggatggtactacccataaagggctgggccctccctgtcaatcatcaattaagaaagtacctcactgccagttcttccctccattcagatggctctagcctagccaacactgttgagtagctaagatcagatactatggaatcttccacatcttcatttctgaaggccttaaaacagaacgcactagtctggggaccagatgtctgggcgggattagggatgctgcctagagttacagaacaatatttcttttcctctatgaatctaactgtgtttttggcttctttggttgttcaagctaccagatttccttctggtattctgggagcctggtcattttctaagactagaattccaagtgattctatcaaaaaacaaaacaaaacaaaacaaacaaacaaacaaacaaacaaacaaaacccaaaaaaacctgcaccataactcttaccagggtagagcaggaggttggggccctccctaggactgtgtgaagcagcagcaggggacctgcctgatgaaagttctatgtggggcatcagggagaggtggctttcaccggctgacggcttggcatacagccacaccttgttatcatgtctacaattagctgtggggccgtgtagacagggaaactctgctgccctgtctttttccacatccagcaaccaagagagaagaagcttatgaaggcaaatcttatacaccactgataggaattcaaggtagtgtaaccactgtggaagtcagcatggaagttcttcaaaaaaaactaaaactagaccttccagtgcaactcagccatattccatttctggatagtttacccataggactccaagcaagttcacagaggtggtcacccatcgatgtttaccgtagcattcttctcaaaagctagtttattaaagcaacgtatgtatccaggatcaaaggaaggaacaaagaaagcacggtgcttatgcaaggttcgtgccacttgcaggggatggaggcaactggggattgttttgacaaacaagtaaagacaaatattgtgtgctttctctcatatgtgattcctagatcttatatagtgtgatggtttgtatatgcttggcccagggagtagcagaaggtgtggccctgttggagtaggtgtggccttgttggagtaggtgtgtcaccgtgggagtaggtgtggccttggagtgggtgtgtcactgtgggaatgggctttaagaccctcttcctagctgcctggaagccagtattctcctaacaaccttcagatgaacacatagaactctcagctcctcctgcaccatgcctgcctgaacgctgccatgttcccgccttgatgataatggactgaacctctgaacctgtaagccagccccaattaaatgttgttcttataagatttgccttggtcatggtgtctgttcacagcagtaaaaccctaactaagacatatagatatataaaatcacacacatatacatatgtctacatagaactaaaactatctagggcagtgcctctcaacctgtgggtcgtatatcagacaccttgcttatcattatttacattacaattcataactagcaaaatcacagttatgaggtagcagtaataattttatggtggggggggttcaccacaacatggagaactgtattaaagagtcacagtattaggaaggttgagaaccactggtctaggggaacaaagagctttgggattatagggggaacactcaacatcaaatacatatttgtatgagaatgtccttgtgtaacataggaccatgtataatgaatagacacagtgaaaaatattttaatttaaaaaattgtgtgtgtgggcccatgaattgactcatgtgtctctgtgtgtgtctcatgtagctaagactagccttgaactcttgatccttctgtctgtacccctcccaagtgctagcattaagggctgtaccagaacatcagctgggtatggtagtgcataccttcaattccagcaactgggagcccgaggcagatgagtctctgtgagtttgaaattagtctgatcgatctacaaggtgagttctaggagagccagggctacctactgagaccttgtcagagggttggagagatggatcagtgtgcaagagcactggctgctcttgcagaggacccaggtttgaatcccagcattcacacggcagctaacaactgtatgtaaccaaagttccgggggattcgatgatcttcaggccttcctgtgcactcatgtggtgtgcagacacacaggcagacaaaacacccacacaaattaaataaataagtgtgtgttgtttttaaaaaaagaaagaaaggaaaggaaaaagaaaaaaatcaaactagcaaacgactttcctgagaagttgacgtcactttctactccgatccagggagccgggggcatcctctgggtacgccctaaacacaagttagtgggcagggccagttccaagatgaacttgcaagaaggggagggggagaaactgagcaagaagtatgaaccctggcagttttttcatgccaggccccgtatgtccccaccaggggtcagccagggtctggaaggcagatgttgccctggccagctgttggaattaacagagtcaacgtcactttggtctggagggagccccaaaatttcactcagatttgcacatctctatttaagaccttattccgcagagcagttatccaccgtcattgaatatgtctagaaggggactgactagaaagatcggcacggtgctccatacactgtcttactgggggtgggtgggggggcaggcagcaggagtcaagggggcagaaatgcttcagttgagggtagggagagaccgagctggaagtatgatgtttttgtgcaccatggaaaggttatcctgtgttatttgaatgttgattttttggccctcatatctaagtttccatcctgacatagcattgaaatgcttaggtggagaatcgcctctctcactgcgcagtggtggcacacacctttaatcccagcatttgggaggtagaggcaggcagatttctgagtttgaggccagcctgatctacagcatgagttccaggacagccagggctacagagagaaaccctgtcttgaaaaaccaaaataaataaataaataataaaaataaataataaaaagaatctcccatctcaagtttgtgtaagcaagtcttatcatttattccctgccttgttgataaatgctgatgaagtatcaaagatgacttggggctggactggcatccttcggcaagcagctcagggctgagcatatatcctgggtgagcaagccttgttcaggaagtcaggctcagctctgacattccctgttaaccaaatacccctgccccgggggagtgccttcttgccttccatcagcactgcaactgtctttgaggtagagaaaccctgtgtctggtgtcaatactcttgcatccatccagtttgtgagtgtttaggtgtgtatgtgtctatgtccatgtgtatgtgtatcctttagtgcaagatgtctgatatccaccttattccttgagacaggatctctcactgaacccacaacttattgtttctgagctagctggctggccatcaagacctggaatcctcgtcctaactctgtcccatatagtgctaaggtcacaggctcgtggccacacctggcttttaccttagtactgaggaatctaaactctggtagtcatgtgtgctcaccggcactctttaaacttttatgtgtataagtgttttgcctgcgtgtatgtatgtacaccacgctgggtgcccaaagaggtcagaagagggcgtctgatcccgtgagttatgggtggttgtgaatcattggggaactggactcagagctgtcttttctccagccccctccgccagtgctcttcctgaagaaaatgcagaagtctcagagtggcccagggcttctgacaagggggaaaaaagtcactaaatcctttgcccacatttcggatgctttccactagacgcaagcacaaaacacaaaacattactgtattgtgaaacaattggattcgttttgaaaacacctactccgttaaatatttgaaagtagaacaggaaaaaaaagatgaaatcggtgtgtgnnnnnnnnnnnnnnnnnnnnnnnnnnnnnnnnnnnnnnnnnnnnnnnnnnnnnnnnnnnnnnnnnnnnnnnnnnnnnnnnnnnnnnnnnnnnnnnnnnnnnnnnnnnnnnnnnnnnnnnnnnnnnnnnnnnnnnnnnnnnnnnnnnnnnnnnnnnnnnnnnnnnnnnnnnnnnnnnnnnnnnnnnnnnnnnnnnnnnnnnnnnnnnnnnnnnnnnnnnnnnnnnnnnnnnnnnnnnnnnnnnnnnnnnnnnnnnnnnnnnnnnnnnnnnnnnnnnnnnnnnnnnnnnnnnnnnnnnnnnnnnnnnnnnnnnnnnnnnnnnnnnnnnnnnnnnnnnnnnnnnnnnnnnnnnnnnnnnnnnnnnnnnnnnnnnnnnnnnnnnnnnnnnnnnnnnnnnnnnnnnnnnnnnnnnnnnnnnnnnnnnnnnnnnnnnnnnnnnnnnnnnnnnnnnnnnnnnnnnnnnnnnnnnnnnnnnnnnnnnnnnnnnnnnnnnnnnnnnnnnnnnnnnnnnnnnnnnnnnnnnnnnnnnnnnnnnnnnnnnnnnnnnnnnnnnnnnnnnnnnnnnnnnnnnnnnnnnnnnnnnnnnnnnnnnnnnnnnnnnnnnnnnnnnnnnnnnnnnnnnnnnnnnnnnnnnnnnnnnnnnnnnnnnnnnnnnnnnnnnnnnnnnnnnnnnnnnnnnnnnnnnnnnnnnnnnnnnnnnnnnnnnnnnnnnnnnnnnnnnnnnnnnnnnnnnnnnnnnnnnnnnnnnnnnnnnnnnnnnnnnnnnnnnnnnnnnnnnnnnnnnnnnnnnnnnnnnnnnnnnnnnnnnnnnnnnnnnnnnnnnnnnnnnnnnnnnnnnnnnnnnnnnnnnnnnnnnnnnnnnnnnnnnnnnnnnnnnnnnnnnnnnnnnnnnnnnnnnnnnnnnnnnnnnnnnnnnnnnnnnnnnnnnnnnnnnnnnnnnnnnnnnnnnnnnnnnnnnnnnnnnnnnnnnnnnnnnnnnnnnnnnnnnnnnnnnnnnnnnnnnnnnnnnnnnnnnnnnnnnnnnnnnnnnnnnnnnnnnnnnnnnnnnnnnnnnnnnnnnnnnnnnnnnnnnnnnnnnnnnnnnnnnnnnnnnnnnnnnnnnnnnnnnnnnnnnnnnnnnnnnnnnnnnnnnnnnnnnnnnnnnnnnnnnnnnnnnnnnnnnnnnnnnnnnnnnnnnnnnnnnnnnnnnnnnnnnnnnnnnnnnnnnnnnnnnnnnnnnnnnnnnnnnnnnnnnnnnnnnnnnnnnnnnnnnnnnnnnnnnnnnnnnnnnnnnnnnnnnnnnnnnnnnnnnnnnnnnnnnnnnnnnnnnnnnnnnnnnnnnnnnnnnnnnnnnnnnnnnnnnnnnnnnnnnnnnnnnnnnnnnnnnnnnnnnnnnnnnnnnnnnnnnnnnnnnnnnnnnnnnnnnnnnnnnnnnnnnnnnnnnnnnnnnnnnnnnnnnnnnnnnnnnnnnnnnnnnnnnnnnnnnnnnnnnnnnnnnnnnnnnnnnnnnnnnnnnnnnnnnnnnnnnnnnnnnnnnnnnnnnnnnnnnnnnnnnnnnnnnnnnnnnnnnnnnnnnnnnnnnnnnnnnnnnnnnnnnnnnnnnnnnnnnnnnnnnnnnnnnnnnnnnnnnnnnnnnnnnnnnnnnnnnnnnnnnnnnnnnnnnnnnnnnnnnnnnnnnnnnnnnnnnnnnnnnnnnnnnnnnnnnnnnnnnnnnnnnnnnnnnnnnnnnnnnnnnnnnnnnnnnnnnnnnnnnnnnnnnnnnnnnnnnnnnnnnnnnnnnnnnnnnnnnnnnnnnnnnnnnnnnnnnnnnnnnnnnnnnnnnnnnnnnnnnnnnnnnnnnnnnnnnnnnnnnnnnnnnnnnnnnnnnnnnnnnnnnnnnnnnnnnnnnnnnnnnnnnnnnnnnnnnnnnnnnnnnnnnnnnnnnnnnnnnnnnnnnnnnnnnnnnnnnnnnnnnnnnnnnnnnnnnnnnnnnnnnnnnnnnnnnnnnnnnnnnnnnnnnnnnnnnnnnnnnnnnnnnnnnnnnnnnnnnnnnnnnnnnnnnnnnnnnnnnnnnnnnnnnnnnnnnnnnnnnnnnnnnnnnnnnnnnnnnnnnnnnnnnnnnnnnnnnnnnnnnnnnnnnnnnnnnnnnnnnnnnnnnnnnnnnnnnnnnnnnnnnnnnnnnnnnnnnnnnnnnnnnnnnnnnnnnnnnnnnnnnnnnnnnnnnnnnnnnnnnnnnnnnnnnnnnnnnnnnnnnnnnnnnnnnnnnnnnnnnnnnnnnnnnnnnnnnnnnnnnnnnnnnnnnnnnnnnnnnnnnnnnnnnnnnnnnnnnnnnnnnnnnnnnnnnnnnnnnnnnnnnnnnnnnnnnnnnnnnnnnnnnnnnnnnnnnnnnnnnnnnnnnnnnnnnnnnnnnnnnnnnnnnnnnnnnnnnnnnnnnnnnnnnnnnnnnnnnnnnnnnnnnnnnnnnnnnnnnnnnnnnnnnnnnnnnnnnnnnnnnnnnnnnnnnnnnnnnnnnnnnnnnnnnnnnnnnnnnnnnnnnnnnnnnnnnnnnnnnnnnnnnnngcaggcgagcggagcgcggcggcgcgggtagggaaggggcgcgcggcaggcccacgggaccagcctgggacgcacggagccctcgtgccctccgggacagtcgcctgccccggagcctcagctgtaggcgcccggagcctcggcggcgagtagcgcgtggggcaggggtggcgtgtaactgcaggaaccggggcaaccggagaaggagccggaacccggccgggatgagaaggtgacgccgccggggggcgccactcgctttgtggggaagatgctcgcctactgcgtgcaagatgccaccgtggtggacgtggagaagcggaggagcccctctaaacactatgtgagtactgcttccaccgaccccggcggggggctggccagtcccggagattcacgcccccaggggcagcctttgactccagagtttgttcgcagggctgtgatctctagggaagccttttctgcccttcttccactcccctgtcccgggtttctttttttggcattgcaattggcaagtggctgcccttgtctgttacaacggtgaagtcatgtgtccgcccgctgcttggatggttggtgggggaagctttcgtcagccccttgcagagcatttagttcctttgggaaggagcatctttgccgcgctccctaggggagccgggcactcacgctcactcggcccggaatgctttccgttgctttgaccagagacccacacttctctttctgctttccacgtttgctgttctgcctgcaccggctggggacagaggaagcgctttgccccctgccccctccactcttcgtttcgagctttgatttccttcttaaaaccattgtgttccgcggtgtgaggagaattgtggcttttccttttatccctcctctggacgtgacccttcgctggggtcatttcctcgtgtaagtgatgctctgactccagacacgagtaggcaaatgtggtctgtggtctccgaggcacggttgactggcccgccgcccctcccccttctttacccaaacttaatgagaagaggctaaggttgaccagctgggctttagagtgtgtgacagtactctttcatctcagccggtcctgtctcccagtcctttacacctttggaagtaaacattgtgtccttgttgctttaggatgacttgccgagctctgctcctggagatagaagagactcacagtaaagaacccaaaacacagaaaacatggagacagtaagggcagcctcttatttgcaaattaggcatttaaaggcgtatttagaatgctcaaagcattaattttaacaattaaaacgggctgttggtggctgccctagattgcacattagtctccaaagtgccttctatttcactgttggaaggaggctggggctggtggtgtcataccagccggaggctactctttctgtcaggatcacagcagacttgaaggcagagttctctgcagttgactagtggggctggactcaggttgggaagaaggtaagagtggtcagaccggagagacggatctgtggggggcattccctgacacagtcagagatcctttccaattgtgtagtctagtgtcgaaagcctctacagccgttgcaaaaacaaaacaaaaaatcccagatttcctccaggagctgtggaggcagctaagtaggagagcccttgactagcgagtttggagagagagagagagagagagagagagagagagagagagagagagagagagagagagacggagagacggagagggagaaagaaagaagagaagagaagagaagagaagagaagagaagagagtgtgtgtggttggagggcttcgatcagcaggtggccactctgctctaaggacaggtatccatttgtacaactctgggttatgtatgctgccaaccatcttgacaactttggggggcactgcaggctgtcttaaggattgttttatatatattttttcagccttcagttgaggctggtactgctttcaatgatggcagactctgccctgagaccctagcaggcgactttccaggtctgggttttacatgaaacatccaatttaactttgagcagctaagcccaaggttacaatgtaagatacactggcagcaaagtagcagccaacaggaccaagacctgctgttggaagtatggaaaggcaggtcaggctactgtttgatctttttaaaaggcttacccactgcacaacatggtacacattctttaaaactccactggggcacagtttccttgtattgaaaacaaaattaaattcttttatgtgtacaggtgttttgcttgcatgtatgtctgtgctccacttgcatgcagtacctgcagaaagccaggagagggtgtaggtttccctggagctagaattacagacaggtgtgaatgattgggtgggtgccgagaattgaaccgggtcccctggaagagctgccagtgcttataaccgctgagccatctctcaggctctagttcctcacttttaaagtgagggtaataatagcgtgtacttcatagggctgtcaagagacttaaatgacatcacccctgggaaggacttagcccagttctgggtacatagtgagtgctcatcaaatattagctaactgttggcgagactctgacaaagaaagtttctgacctaaaggaagagagacttggcgttttaagattgataataacgtgtactgtgtggaaaatacaaaagaagtcctgttcacttcccttgaaatggtcatttcctccctttctgcagacagagtgtttcctgggtcatctccacttccgtgtgagaatgaatggatgatgtgattcttggggcggagagtgacgtcacccagcagatgggatcacgcagagttctagaaaacaatgaacggagtgtgctatatgttgtggccttgtggagctggccgggggcagatggctcatctggtgcaaccttttacttaacagataaggggatgacagagaagcaggtgtgttagctagtcacagcactggggctaacggacggacttccagcctgtggtgtgggtgaagataccccaaatctggttgaagttgacaaagaagagagatacactgctacacagtttgagcactgatatataatacactggtgcccaataattgaaagagttcaggagggctctcgggcagttttgttttttttttttctatacctcttgtatagtagataccccatcctggaagggcaagtgttgtgaaagaggcattccagcatggttagccggcaggacaccttgtacatatgtgtggtaaaccccacactgggaaagcatgtctccttccatgcctgcttcgatggagtgccgagcctgtgctttggcaaatcgcagagcagagtttttttttttttttttttttttttttaatggatgtgcacattagccagagcttgcagatgagggaggcttggagcccatgcaggagggacagcactggctccagaacactggggaacacatgaaaaggttctctcaggacaccaaccggagggtgtgcacatccccacaaggagggggagctaaagaggtgggggggtgtatttctgtgctttgggtctgtttataaaaggcagacaaatagcctccatcttccatgctgttcgtagtgcaggcagcactccacttccttcctctctgccagcccctgccccgggtggggctgggaaggatgagcacccgctgcttgggtcagcctccctgcttgggagaccttaggtaaacgggcgttggcctcagaccctgtttctttaagatggctctgcagatgccagatgcaaaccatagccacctccgtcggagggcttgccggtgtaagttggaaagcagacttctttgcgcgcacaggtgtgtataggtgtgtttggagccatatggtggcggggagacgcttgtttatctgaagcaaaggagacatcatgtctgtttggatttgggaggtgttttgctttcacggtcatttccttccctgagtgtttatttcagacaaataccagtcgtgaatgctctgatcctccacaggactctagggaatgcaaataagagccagtgtcagcagctacttccatggtgccggatgctaacaggcatgctctccagggagcctgatgcttcatttactgtactggcgtgtctgtgtgtgtgtgtgtgtgtgtgtgtctgtgtgttgctctgatccttattacagatggattgaccaaagcttggtgaagttaaagttgcttaggattccactcagcttcagtgggatctaggtaaacacaggttagtttactgcccaaggagaagcccaagacagggctcttcccactcggacggtgagtgagtccaggctcagacccgtgtgacggtgagagagtggtgatacagggtggcatttgagggctgtctttctggaaaggttgctcatcatgtgtcatgaaactgggcttgactggtggacggagaggttcctgggagaacagggtctgtctccagtgagtgctggaaagatagatgcagggcagacctgtgagactaatgcattttccctgatttccatcatggcagattgtgtttgctgtcccaggagtggtgcgtttaggaatcggtatcaaaccccttcatgcctctgctcttcatttttatttcctgagcccgagattatggttccagcctcactggagcgagaagggcagcctcacagttggaaagagccttcttttttagggccttgaatcatggaagaagtgagagcaggcagattggggttcaaataccgcctctggcactcccaaacagtacaagcttggatccctgactccaggctcagcatcctcacctgtaactaggcagagaagaaggcccagctgttgagggtctgatgggacggacactgggccgcctgcctcgtggaaagcacccagtgtacatgacaccagagcacagaggacagctgtccagacctggagggggtgctggcctagtgttggggcctagtgtgagattgttagatttctgataagctgaggagagaaagaaggtgggctggtgggctggtagagaaggggaggctccaggtaaggacaaggaggctcctagctaggagatgagcgccacacagagcctgctccccatctgcctgcttctgggagtgtgactctcttacacacacacacacacacacacacacacacacacacacacacacacgaatgggaaccgtttcttctctatagagggaagtgatctggtggtgaatcacagggctgatgaggttccccgttcatggaacaaccaaccacatccttcaagaccgttgggacagggagcagagccagccgtccctcatggctcactctgttcagggttgagtgtgagggatattttgaggggagagggcaagccagggttggagtcaccgtgtgtggtggcaggcggaggggaagggaagggaaaaataaacctatttgatgtcaagtaagaccggctccagcttcagaaatatgagcgccagctattgcgttttccaaagagctattctggggccagctgagttaatgggcagtgggggctgtggactaggggatggatgctggggaacttctgacttagggtttgcctggccatccctggaaattgccttctaatttcctcatcctgagtcacagagtccttggccagaaaagcctaacaggcaactctgttctcttttgcctcctaattaaagaaaataaaacgactaacggagttatccgtacagcagtcacgcttactcgtcattagtgctgagaatccaggaaagagatcatgggccgggacagaactccagggacaggaaggacaaggggtgtgtgtgggaaacgaggtggagattctggctttggaaataggttctgagtgagggccagcggtgttctctgtcctgacaattgccaaaaataatggaagcttccaacagggtggtcagtgtttggacaggctggtccccagagtgcgagctgcctccagcctggttgggctggggggacaggagctgtaggcaagcaggtgaatggagagggtcaggggcttggactagtgggcaggccactgagaggcctcagataacctcaggcaagtcgccatggtagcagcagggactaagccctgttatatacacagggctgaccagagtccagccaggaccttgcaaagcacagcaaacgggttaggaactgacctgaggatctatgagggccagacacggcaacagtgctgacactgagggcgcttcacgatccccgtgtgggggaggtggttttgtgcctattttataggtgtcgaaatggaagttacacacccttagggtggttctgaggcagggctgtgattctcacctcgacccctaacaagttggccagctgccactagattctccagctgagatgagccagggagagatgacaggccaatccaggcagagtgtcctaaggagtgagaggcactccagtgctgggtcacctggcctgtcgtcatcactcactgccatgccgtgtctcggtttccacatctgcaaacagtgaaacagtgtaggtgaaaagaggacccagttccagggtcccaggagaaatcagatgagtttatcctgacaagggttctagaacggtgcccgcaggtcagacgtacgagattagaatctgcctgactggttcagtcccaaagcaggaagacctctccgtgaactggagttcccaggggaggcaggtggatggagaaggcggcggccgctttggtggtggggcttgggtgtgatgagcgttggctgggagaggaggaatggaatgaccagaagacagtccaggggagggaaagtgacgccctacaggaaacatttatgcgggacccaggatggactcacccaccatgaccgtgggtgagaaggagaacggagcatatgaggaaggtcaggtcctcaggtggcagccaaagagattcagtgcgccaagcactggggaggtggagacgcggggcccttggagtttgctagtgacctagtctagccaacgtgaggattttttttttttttgaggacaagatgcctgccgccaactctgacagcctcattttggtccctgagactcacatggagatggaggggattgatttctgtaagttgtctatgacttacacccgagtgcgtgtacatgtacacacaaactcacacactcacacacacagagacacaaatacatacatacacacacacacacacacacacacacacacacacacacacannnnnnnnnnnnnnnnnnnnnnnnnnnnnnnnnnnnnnnnnnnnnnnnnnnnnnnnnnnnnnnnnnnnnnnnnnnnnnnnnnnnnnggagggagggatggagagagggaggaagggagggaggggaagaacgcattctgactgcagggctgtgttggtcagtgctagggcttctaggtgtgccttgggggtcttgagttcgctggatcccagcccctttagttcatagcctttactcctagtggccggactgccatttcaaagttgattgcacccagtgctcttggggaaacagggctgcagaggagaaggggacgctcccaggagtgaggcagtggctgcttcagatctcaacagtgcatggctgggggtgggggtggggcaggggcagcagcgtttcagaggaatcctttccacccaagctgtctggtgtccagacaaagacagggcttgccttcgattctgaatagctcaatgggagatatccacccctctggactcaaagttttatgtacagtgcttcatactatctcttcagtcttttgatcccctacagtacactcctatatcccagtaccctgcttctttgggggtgattgtcctaatagaaataacagctcctggttaggatactctcttttcaaaaccatttaaaactgcttctttgacagcttcatacacgtatacaaagtatcgtgatcaacccccctcctctcctccatcctccctccctccttccctgccagtatgtctcccccaccttcttgccccgtttccttccataactcagtgtctaatgaaccacttactcactggtgagtcgatgtggggccatccattggagcatgagcaacttgccacactgagaaaactgactctctgtttccaggagttaccaacggtcagtagcatttcagctagggtgtgggggggtctcctgagcccccgccccatccatgttggaatgtctactggtttgatcttgtgcaggtcttattcaggtaaccccaactgttatgaattcatgattgccctggccctgtaacatccagaaggtgttctctctctccctctctctctctctctctctctctctctctcacacacacacacacacacacacacacacacacacacagcactcctccctgacttttagctcttagtattctctctgccttgtcttctttgtatgatggtgatagccttgtgtgtaatactttctatgtgccaaaggatattctccaaacagcttcacactttataaagctgctgccggcatccacagggtacaggtgagaatgtctaacctcatagctgcaccaggtcccaagactcccgaacgtgccttgtctgtagattcggttgcttccaagtagcacatttcactcccagaaggactagatggtcgtaggccattcagtctgaggccttggttgcttggctttccacgaacaagtcaccttttccccctttacagtccccttgcctatctagaatggctgctgccctttggatctgcctcatagagggatgcgtcaggtatgaaaggggccccctggcttcccaagctgtatcttcctaagttggtacaggcaatattatggcagaaagctcttctggatgtctggagactctctcagcaaggctcacctgaccagtttcttcctgagaaggttcacagccagggctgtcctgggcacacattgggtcctcagtggagatcttctatggcacaacccttcgactacttttctatttccgtgcctccacccttacctgagggggaagtgacacccaggtggctgagttagcagagaggaaacagctgcgcttctgctcctcctctgggctttctttggccccttccctgtcacttccctttgtccagtaaggaaaccaccctccccaggcctgggcggaggtacacacgggatggggcagagtcctttcctctgtgtgcactaagtcagagagggcctctgaaccagcgctgggatccctaaagtgtgggtgaccttcagatgtggcggaaagtgatcgctcttatcaatccgaccataactccggggaggaaggggtggtgataatgagtgtacctcctaggtggggtaaggaaccgaggggctgtgcactgggttgaacctctgtccttttattgtacagcgcctggtagagcatcctccactctcaagtaatctacttagttgatggagaattcgccctgtattacgtcaccgccattcactgctgccatttagtctgtgccaggcacctccagacctctgatttataatcagagttgcctttctaatgccattggacttacggctgcagtttagagagtagcagtctcattgtcagtaaaggacatatttgggcatatttgtcccttcccctggcctgtgcctggtctctgtcaccttacttcacacacttggactctctccagggctgccccaggggtcatggggacttcgaagcccaatgtgctgtcctaaggagcctgccccttgttggaaaccctgcctcatggctttgcctacctaggggttctgagtgaataggggctgtccctgtcctttgaagtaactcctttgtaaacctttcagggtaggtccagttctgatccagctttagtctgtttcctggtggctggaacccaaaaagctattttaagggactcgcctgtgtgggagaatttctctgagtgacagcagagaggaggcctagccgactggcacaggcctggcgtgaggctccgagaggggagctctctcctgaattctacctcccaggcaggggctgatggggcgctttggcacagactgcctcttggaggggacaccagctcttactggtgagattggggtatgcagggatggctgctggttcatccccagtgggttggtccaccaatccttctcacacacagttaaagtcacccagaacaatgtctgagctttgctttcaagctgggattaattatgtcagtcatttctcattggcagctagagcaaaagagcttcgcttcccactgtgctttctgagggtcagacccgggaagtgggtgcaccgagacaagaggaagtttatgggggagccctgcaaagcacagccactgagctagggggcttacgtccaggagaccctggccattgctgaagatagggcatctttcttctgtccctggtgcttacgtggtagaagtcaaggcttaaacccagatctctgcagtgacagaggagtgagttttctgctgtacaccagagagttggtggactgccctggacagtgggcccttacgtgagagtgtgccatccaacttctctatcccctgtcactaggctggaagcatccacagcagggtcaaacctagcagcattcggcctttctcatctctggactcttgttctggtccttgtggatgctccctggtgtgttcccaaggccatctcctccctactgtgcggtctactgagtacagaacagggtggtgtcctggtctcatagggaatggagtgacgagaaaagggatatcctgccgtgggtgccctacggctcttaagatgtcccttctggtggcttcccaggaggcaggagcctaagggactcatcacatggaccccagacagaattcccagggtcatggatgaccgctgcaattcacctgcccgctctgatctctgagcccctgcattaacaccgtgtggttgcagctggcaattgagataaacttcaaagtggtccagagccacttttgaatccggctgccaggggctctctgtctttcctttcttttcctttcttttcctttcctttcctttcctttcctttcctttcctttcctttcctttcctttcctttcctttccttttctttcttttcttttcttttcttttttttttggtttttcgagacagggtttctctgtgtagctctggctatcctagaactcactttgtaggccaggctggcctcgaactcagaaatctgcctgcctctgcctcccgagtgctgggattaaaggcgtgcgccaccacacccagctctctgtcctttctttagagatgatgactctcgtggcattgtggttgggatcaggggacagtttaagtcattaagtcattctcatcctgacgcttgctaaggtaaatccaagctctaggacctagagtgacctccggagagacttgggtggcagccagcagaagcagggagccagaggatgtaggacgggtgctgacagcctcttccacgtgggctgaggtgaggacttggaaaatcagtcctgagttgtggccttggctctctctgccttgctggtttcacgtggtcacctttgttcaagcccatgggcttccgtttctgctgaaatgatgataatcatcctaatacttagctcatgtggtttgtgactctttatgatgatcagaggttcgataggtgtcagctgttgttattaccaccgttatcatccttcatgatttttttttaattaccttctagaagcttctctgacctcacatcttaggaatatttcctgcgaggtattagcgttttgagtgacctgaggttggtcagctcttagcaagctgtaaacttacaggtcgtccatttgtccagtatttggaatgtttcctaggctccaggcagggtgaacacaatggggtggcctggctctgtgccctcgatattctcatgggaaagggaaacactacacaaacaatcagataaaaatatattgtacacgaggtgcgggataaacactgnnnnnnnnnnnnnnnnnnnnnnnnnnnnnnnnnnnnnnnnnnnnnnnnnnnnnnntaggtgaggcggttattggaggagggttggtgtcctagtgtacagagaggtggcaggtatggccctaaggagaggtgacttttgaataggacttgagagttgaggcagtgaggcattatgggtatgtgagagaaagtagttgtggggcgtgggggaccaacaagtgctaaggccctgaggtagagtggcagccgtcctttccaagatggagcaagggggctggggtgtttatgttttggtgtgagagtgtgtgtgtacacgcatgagagggcaggatggagtccctgtccctcccatcctgggagtggcctcctctgctctgcagtgccagcttcctgatgtcttgtggaagactcagactggccactacactgcttggggtttgatcctgactccctaggaagacacagtctccatcagcagtgacgtgggtggggacccccggaccccagaagcattggcatctgtagggagatgtatgggctggaagttaatcttcaacctactgcgtgccaggtgctgcagtaaaagccaagatgtcagctgtgcgtgaccacagcagtctttctctttcatgtcccttattccatccagcagaggtcatggtgggccctggagcagtgtggtgaaacctgtgggctgaggctttgtcccgtggaaatcttttctctcaccccacgcttagcactgttgtggttggatgttaaagcacacatctctccaggtgtccatctctccatcacacatctgatgtgagtgatgtcaagatgctatcagctgagctcactgaaacctctgtcctccttggagtagatagaactgtgaccagagaaccaggtgtctctgttaattaactccattgcagactaaccggggaacgtaaaatctaccttgtgatggccagggaaactgtcttccagagcgcgctcgcgggggtggggggtgggggttaaataataaatacaatagtgccaactttcgtaagtacctgactcatttagctgtgagaaaggcatagcacagtccttgctatgcagtcaagggaccagagtcaggcaaagactgacctatcgatggtcaccagccaggaagaggtaatgtggggactaaggcttgcctggttgctcctcagccttttagagaatcctcctattcagtcacaccctgctgccccatagatctctacttgaaagaggggagttaaccagcaagcctcaggataagaggacaaaagtcacaaaagccacaggaggccagcccctctcctttctttagacaggaaaaaccatttgttatgggaacgccacactgcaggggtctggctttgttgtgtggggttgtcttcctgggtggggaccctgttggtggagggccatttagggtgtctagcaagattcttttgacacctagtcctaaggggaaggccagcaggtggctggggcagtgcggtccttgcgagagggcaggacattctatcttgttctctttggaactaaacaggtcttaactagtccttgggcccagaataaacagcagctgttgctggctccacccctgcgacgccagtctattaacagcttagccctgactcccttgggttcagtagcactggggttgggatggagccttgcattacagagcctacctagtgggggtgtacactggcctgccctctcccaggcccaatctccactcactggcctcataccttctgccctaggacgaggccaggatccatcgggtccatagtcctggatcgactcagctcttgtctttgccacctgcttacctagtgaccttgaacagaatgtaactctgagcctcagcttcctttgtaaaagcagctaactttacctctgtttcagggtgtcgtggctcagtgcaagttttacatacaaacacacacagcaagccagccagccacacacacacacacacacacacacacacacacacacagagagagagagagagagagagaaacacagaaacaaagacacacatacagacagatacagacacacacacacacacagagacacagacacacacatacccccagccccgccccccccacccccccagatacagtgcattacagcaggctggcctcaagcttacactggagcaaagatgaccttgaatctctgatcctcctgctttcacttccaggggtgctggaattccaggcttccaccaccaacccagaccccagggctttgttagtcaagctgtcttctctgtccctggtacagttattgaagacaaagttcccgacttgagcttgaactttgccactcgggcttgttgttgggggagctgctgaaagaccctgcacctcatttttcttgtctgttaggtgggatgctagacccccccccccccagcagtgagggctaagcaggctaacgtgttttaaacactcaagactgccagctgtggaggaagatgtgggcaggtagtgtaacgaagcccctgtgtggggctgtgagccttgtctctagtgaacaaacaggtcttctactggatgtgaccacatcaggatgtttccctgggctgcaactgtgagcctgcttgttgtggcttctctctgactccttactcttgggaacttctgccatctttttagctcttgaggctcttgaaagattgcatgggaacccccatgagaacatccaaacagagaactcatcttttgcaaagagagaaaacccaacagcaacaaaaaaaaaatctcacctaacagttagtcctgagtgtgtttggccctggtgctggggtgtcagtgtgagcacttcaggctttgagaaaaaaaaggtcctctggatgtggattctccccaggagcctggccccttaaaagaagtagccagcacggtgttaatacacacacacacacacacacacacacacacaggttttgtctgtttttgttcaagaagagaaggctgtatggctccattttgaacaccagaggctgccactctctgatagacagggaagagaaggaggctatattccagggagaaatgagaataggagctcaaggcttggacccagactgctggctcacaggtcagagccagcacctctgctgtgtggtcctggggaagtcccttcaccactctgcttcacttccctcgccttcgaaatggcaacagaacagaacctctggtgtggcatcgttgggaagattgaacgagaggaggaagccacgtcctgccaaggcgtggtcctgccctctctgagtagacacagcaggtggattcaactttccagagccccggggcctccagggcctgatggagatatatttagaacacttgcgagggccacatggtgtctgtgacaaaggatggagcctgtggcatgttctagggggagggtgacctgcaggtgagggaatgccagcccttttcctagctggctggctatgagctgatgcccgcctaccccagggcactccgtttcctcagatggatggtgacggggacttccgttaggggtgctctgagaatcgttgccagcatgaaagcatgcaggaagctttttgtgataaccacttagccagctgtaaggcgtgatgaggggccttcatgtcagatagggttcacacagagcagggagcttgctctgtccctgagtcaaacctgggaatgaccgtggaaaggagacagggtgctgtcatgctgtgggatgtacttgtgatagcagagcggagttagcatgtatttgaacccatgacttagcatccgaaacaactaaggtagcgaactcctcctggtagcaagtgctggaggtaggactgaagctgtgaaccagggaccccccccccaggccagacagtcctttgtgcggtgtctgttgtctcttgtcacagaggaagagaacatggtttatacgggtctttcgctgtaatgggaagcggtttctagagccactcagaacgcactaactggaaaagacttgatacacaggtttccaggagctcagcaggaatggatgtagccagggaaggcaggagccatagaagtggggcctctgaaacgagggactccgatcctatacaggctcactcctgggaagaaatccacagtaataaaaaaagctctgggagacagtagacatccgagtctgcacagcataggcaggctgggaggaacgtggaaggaaggcacggaaggacctggctgctggcccctgtgcccaggagggcatgcaggacacactgtttgttgtgaaatttttatttgcaaagcagggagttagaggtcctgcacattaaaagctttctgagacagtgtttgaaatgatagtgaaaaaatagacattcttaaggtagtaaaaacactttttgagaaaataaaagaggagtgtgtgcgtgtgtatgtgtgtccgtgtgtccgtgtgtccgtgtgtgtgtgtgtgtgtgtgtgtgtgtgtgtgtggccagctttcttgagatgtaattcctatagtgtgcaaatggcccatgaaatctatacagttcaatgacttctaatattcacagtgttagacaactgcactgtgatagtcaactgcagaatgtgtcatgatgccccctccccattggtccctagccactggcaactatgaacacaccttttgtctttggaccagtatcttctagccatcacatataaatgcagtcatctgttaggtgctcttttatgactggctttcattaggaaatactttcatccatgtcgcctctttgaatggcttgctggggttgctggattcattccttggggcccagatcttagcacggccagcccttggttgcaagtacaggctatgctggagctagccctccgtctcctgtgaatgaaccctcgccccttccccggccagcacattgaaggttgggtcttcagtacaggttctgctttgcagttttattctcagcacttcctctgcctcttagagctggtgggggaggggtggaaactgcacaaggcctccactgatctgtccccccccccccccagggaccttctttccggtagtgggtggggaaagagacagaatagcatctttatttgtttttaatattgcccgactccccccagcccctttcctaagttctggtcagagtccccatggttgttgtcagactcccttcccttgagactccgggttatgtgacttctctcttgggggcagccgatggggaagtccacaagtgctttggcttcctccagtgtgaagttagttagactctctgtttttcctctagttggagctgggccagcacaaagctggcacatcctttaagaggcggtcagctgtaagtaacacggccctgcagaacctccttaagcatatggaatcggggtatctcccatgcctccctgtttataggcgggtgttgttgcaggtggggctcccagatctctgtgggaagctgttgtatcggggcttacctgctctgaccctgggtcagctcagtgcctgtttgggagtagaacctggcattgaagttctgattgaggctaccaggaggctctgccccgccctagactcactagctcccaattcatatcctctcctgtcaccctgcagaccagagcgggcattttttggataccttttggtggcctctctctctctttccctgtacttacgctaaagctgtttccactgtctggagtatgtgtttcacctgccctgttcctttaagacaccattccagtgtctcttccggagtcatctaaggtacacgggcctttcccacatgtgtgaggtatttgtaccatatgaagagaggatagaccggatcctgcacttaagccccaggctaacagacgaaaagttctcctaggacaagggctttgctaacccttgagctgaacacttgtcaatatttgctgaacctgcctgactcgtggcctggcccgatgtgtttgttggtcacgtgctgggttttcccgacttcagatgcagccagataaattaatcttgttttacaaggtgttttgtgtatatgaccatggcagaacccacatcctctatattttccctgtcagcccgacccttctaccccttccccatctcttcagcgtctactctgatttgtttaatctaaacccgtgcatcccctggtgtgggatctgttgtatggcttgcataggtggctttgtgcgacctcttctctttgacccagtagatcttttgtgcattctctggcatctgcttccttgcttttgactgattcacggctctctgtgcccacgtgcactacacttaccaactctccccttgatggacacttgagttgccttcaaggctctctaatgcaaatattactgtggcaagcatccatgcacactactgccagtgcaaactccacacactgatttccctcacatgtagactggaaggcaggatggctaccaaatgactcagtttgggaaagtagtgccatgttgcttctcagatggctctgtcagtttatacgtaggcttcccacgaactccctgtctgctgaccccacttggtaactacccaaagaccttccagactgctggttctcctcctcacaaaccaatctgacctccactggatgatataataaattctaatctcttcctcattccttgccaacccatctctcctgcctgcaatgaaagtcctttttataattttccacccaggtctcactaatgggcccagaaacctaaaaccttccattatctgaagaacacagccagcttttcaaaactaaacctcctttgttttctcccttaatctgaactaagcccttcctatctatcttccttctccaccgagctgggagcctctctggcaggttctgtagaccgtccaggaaaggctgaaagttgtgttgcttcacatggtgggggaatgactctagtcctcccgggttgcttctctccttcagaagccaggtttggtatttagctctgtttaaactgtgaccgtgctggcaggtggaaaccaactgggtttatctgctgggcataatgacaggaaaaaggatgctacaaatacttcctaggcgctggcctgggccagattctcagtcatcactgttccatgacacctcatgttgctgaaattgactattattggtttgggggttggggtttgttttttggtcattttatttctttttatttaaaattatacttatttatatttattttttaaagattgattttaattttatgtgtatggatattttatccgcatatacatttgtgtactacatgcatgcctggtggcccaggaggccagaagaaggtatggggcccctggaactagagttaattacagctggttgtgagccgagaacatgggtgctgggaaccttgctcaggtctgcaatagaggagcagcagatgcgcttaacccctgggccacctctctggctcctgtctgcgatttcactttgccccatcacagtgaggcttagacatggcgtcaggtccggtgttctgagcctattatgtgcttgtctgagttctccagttacaccgtgagctgtgacccggcaacatcagcgtctcctcccccctcgcctctgtccgtgcccccaaccccccaccctccgcagggtttttcacttagcagatgctcagtaaatacttgctgagtggttgacacagattgcatgctatctgtcatcttcaaaggttaggaccagaccgttaaaaaaaaataaacaaaatctttctcttaaaagaaggcattacctcctgcccttcccttgcaaatgttccttctagtcttatttattgcttttttggggggtagggagtcttaggagagcgactcagaaagcccctttaatttaagagagatgccataaatcacacccattacggagggatcaaatgcctgcgtgcgtgcgccctataagtggattaggggcgcacacttgggatggctcctctgtttgtcccccacccatctgcagggctggccttccctggcagtgtgtggtatcctactaattgctcttcaataaacaacagtctgttgaaaacctcccatgaaaaaaagtgccgtctatgtattgtatcgggaaaactaaatattatgggaaaggccaaatatttccactgtgttaagaaaataagagccccggctgtatggagcttccctctcagtgggcaaaagactcggtggagacttcaaagagggaaaagctgtcaggacagccagggcagtggctccattaaagaggagtgagtgtgtgcatcctactcgtggctgcagaagctgcaacattctctctgcctccgggaggatggtggaatctgggtgatggagctgtaatggagtccttagtatctgggcagcatctgagctggagggcccctgaccgcacgtggaccatctgatgagtctcttctggccagttccacccacctctcatcactgggttaagcaggcggggttggctggctttcagtggggagagacctaaaaatcatttggcttttactaagaagtcaggctaggttatctaagggccatccccagggaggggagatctgagctgctggcttgcccattttaatgggctgggggaagctgtttgaggagtggccgtaaaattgctcaccagacctgaaatatgagaatgctgtctatgagtcagagggaagagctcccaggtacagagaatgggctcttgttcttcagggtggttgaagacctggcactggcttgctgggtttctccttagcaggatcattcccacctgccaaccctgactaggtacacatcagctgttaacccaaatgcagacgtggaggaaccgttgcttctcggtacagggactttcctcttccttgctcccagaggatgcgccagtgcactgtggtgacaccctgtagggatgacagccatgctcttcagctctgcgaatgcctaggagctgtgcagagtcccaaacacctacgccttcatggagcctcccatcagccaaggcaggactgttattgcctccttcatagacacagattcagaggtctgggggtgtgtggtggcgcgtgaggatatttccctgtgatcagatagatgagatgtggcacagctagaattcagacctagatcctgtgacattttagcattttgtgcgagatgaagttagccattcttccctgttggtggcactactaccatcttctcttcctcttctcctccttccttcttaggaaaatatgtatttattttatgtgcatgggtgtttgtgccttcatgtatgtctgtgcagaacatacattcagtgcctgaatgggcaagaaaagtgcatcagatcctctggaactggagttacagatggttgtgcgctatcaagcaggtgctaggaatcgaacttgggtcctctagaagagcagctagtgctcataactgctgagccatctctctagccccacaccctgacttcttaagcctcagtcttagttgtaaagagaggaccacttcccaggaacaaatgattcactaggtccagtagaattggttactacagattttaagagcactctggagaggggctggtgggcgtggccatgtgtcgagcgtgctgggtaccagctgtaagctctgcatcttaggtgcagaactcccttgaattctcgcagcgctcacgtgagatttgttttataaatgtaggatgaagactaggagatgatgtagctctctctgcgctatacagctcaggggtggtggagctgggcctttgctgggcctttccagtgccaagacacattctcttggtgtgagaccatgacagattgttttaccagagtggtcggggaggggaggccctgaggggtgtggagaaggggttggaaatagccaatccttcaggctgggggaagggaagagggctggggaacagccggaactatcaggatgggaccagtcttcatcactctcccgaacacagggactcagtcccccaactgatgccttggcattgaagaccaggccttcgtggctctgcggaggtgacatcactcatcctctgtgctggctccttggctaactgattagatgtggtcatggtgatgggtatgaccctgtcaggatgacgcatcagccgtgggatatcctggtgtgggaagaactagatttagccctggaccatttctctgttcactgcttctgtacgctcgaagctgagagtgctcttccactggcccaccaacccttccgagctccagcctccttgctgacctttgaaagcacatcacggtcaatagctcatctgatccctcctgtctttcacccagcaagcatttatgcagcacctactgtgtgccagacaccgtttcagatgctgtagacacctgggtgagccagagcggtcgctctccagagaagagggaggccccaggctgactgggtggaccagcctgagtcaggtcatctctgaaggaagtgtgtggtgagctgagcaggaactgggcagaaggaaggaagtgatccctgagcaggagtagaagctgctgtctatactaactgtatgtggcagtggcaggtgttcgggggaggggacacctggcaaaggccagtgggagagagaaagggaagaggtgactcagtttccctttactgtcgccatattctgggatgtgccccggggctgtatctcggactctgaatgtttgatgatgaccaagatgggcttctcatgttgccctgttcacgtttatcagtgacacggggagacaggagagagagcactctaagaggtaccaggcttagctttcaaaactaacttgaggaaggttggagtggaatgggcaggaggaagaaatgcaggaaacagccccgtttacagtagcatcatagagtagaaaacccatgttattcttgtgccttgcaagtctgacactgtccatcaaataacaatccccgtcccctccaccacaacccaacagctgctctctcaccttgtttgggtaataatcctaaaagttgcatgaagtcaggagcccaagtacagcaggggctgcagacacagaagtgggaggagccaggggctgggtcacttgttcattagaaaggaacgaactcagccctgtgagtgactttcaggtcctggggctgtagccctagaacttgcatttctgagatgctgtcactggagttcaaggtggagaaagatgagggggagaccgtgtctgttctgcctgagcccatttgcacaggtgaacattgctttcaacccccgccccaaccgagtcccaccctcacatgcagcatttgccgagatgagcggctggatagggaagctccgagacgggccaccagaggcatccctgggccaggaagaggacatatcagggggtccctacaggagccggaggaagggaggatcagatagacccaaagactgaactaatggtcacatacccagagacgaacggatggccttacttgtgacttccttactgactctggacccatgcaggaaaaacctttctcctatgagcctcgttcttgtgtctcatgggcccatgcacttgaaacacctggtccctggatccctctgtagagagtcgactcttgttacggagtatagcagtgttggggcctagatgcaagaatgacatgcgtggacagttgtcgtctatacaaggctgtgcccagacttgctccatgcttgctcaccacagaccacagtcacagaccttgtggggatggagctgggtataaaccttaacccctgactccaggtctctttctctcagtcccttgtccagcctctgagctggggatgagttgcctggagcggaggctctgacctattatagccttcctctaggaggtctttccccagacacagaaaatctcaaaggcagaggacattaggacccgggcacacttgtcagtcacgccccagttctgctttctcccctaccaagccccaaagccactgacagaacaaacaccacgtctgtatctcttctgactggccacttctctatcttctggagatttccatgaaaagaggcagctggtcttgaagagtcaatagaaagaggtcaccagggagtgagtgccatgtaggacgcttgccatggggcatcaagcttccagaatagctctgtaaggccatgtgcttccttctagatgcagggagtggtcacaagatgctagtgcccagcctgagggagcacagggcccagcctgagggagcactctagggcgggacttggggtgtgggtcccaagatgcctggcttgacctaactgtccccactgaggggtggccccgcccaccacctgttctttccctcagctcagcacatctgtccgtgggctccccacctccctctcacttgagataccaccaattctctaagacgcagtgactccgtcaagttttgccacaaggtgggaaaggacagtctcactaggattataatcccagctggctgttctagtcatgtgaccttgggcaagctttgaacccttttggaagttcagcatcttctgctggagagggtaagcacccctgggcctgtgtgttgatacgggagcttagtgattcagagcagccccctacagagagagtcagagcaaggagctattaaggtggtttctgtcccttctggaagtctcatgaaataccccatgattggctgctctcaactgtgtatggtcagtgtatgggtgaaggtctgtccagatctcccacttgtatcgactgggatggtggaggccacacctcggtccgttactacagctacctgcctagcagacagttaccaggaaaaaactcgaaggagctaccactgtgtttcttatgggcgaggcacactggtaaatgccttgtgggcattttctcacctcatcttcattcaaagtggcacaacagagaaaggccctcactgagcaaacccggtgacctgagtttgatccccagaacctacataaatgtggaaggagagacccggcttcacagagttgccctctgatctccacctgcatgatgtggcatgtctactcacgcacagatatacacatcacatcctcacgcaatatagtaaaaaatgtttaaaaaaaaaaaacccatccaagtcatgacctcttgctactcttgtttcataggcgtggaaggctcaggaactggatacctcatccaagtccctataccaaataagagaccaagctaggtctagcatgtgtaatttgtaccccccattaggcatccttgtcttttctgcctagccccaacctgtgtgataaggctggagggagactgcattgaacagtttatgtttttggctgagtggttcatcttcagtgcccattgcagcacggctggcatatctacagcaagggctgggaggagagacttctctgggacctcaagtgcagcctgggagggctagaatgtatagctcatgcctttgactgcaagagtctgggtgtgagtgagaggggtgggctctggccaagtgaagcaggctgaggtcagagggaggggaccacctccccccagggaatgcttgcatgacgtgacttcatgaagcgctgatggaagagagctggccacatgccctcttacctccagcctctgtctgatgaagaactcggatcaggaggggaggcccaaccagatgtagtgcctggcagactgccctggccccaacacagggctctcctccagctaacttggcagccctcttccccaaggggacctaggagcaaatgacgccctagagttggctgggacagagaagcgggtccctcatgggtacaggttaggaaggggcagagagatgagggttgggggctataaagatgtgacctggcattattttgttccggtcactctgtattttaacacaaattgtgtgtgggtgtgtgtgggtgtgtaagtgagagagagagagatggggggggaagtgggagagaaagaaacagaggaaagagagggagggaggaagagggagggagagaaacaaagagagagagagagnnnnnnnnnnnnnnnnnnnngagggagagaaacaaagagagagagagagagaaggaggaggaggaagaagaagaagaggaggaggaagaggaggaagaggaagaggaggaagagggggagagagaggagagatttttcctaagagcttgtgcctaggagtgaactaaaagtacaacaaaaccgttggtttctagcaatttgctccttctgttttcaaagctgctatgccctctgcaccagatgcccccaggtcctagtccatggctgtccctgggtgagtggatgactttcccaagcactgcccagatggaggtcctccatcctcttccaccttgggctcctttgagtctttccagcatcccagatggtctgaagtctcaggagcctttggtgtggagtttcttcaacttcacacagccttttccgggatcccgtatctccttttgtttctagggaccccgcccccaacatgttgcttcccaaggtttctcatcaccaggcccagtttcaccaacatgcctgcctcagcttgaggttccctcagatccatctgtttcctaccacatctatctctgtggccacaccagggctccccgatacctgatctttattcctttaactctcccacctgtgccacgttctctgcctctgtctgggccctggccctggctctgtggactgctatgcccactttgcctccatctttccctcacccacagatctgggacttgccttctccttgcctccttgggctccagccatccaagctcagcctgtttcacaccaccccagctttcgtcccttctttgcctgggtgtccccttgccaggatagccctctcctctcttccagtgtgacaacttctgggaaaccttttaagtttgtgatttaagtatagtttgtccccatagaagcttcttttaaaatctgtgccactgtggtggctttgagacctggtgtcctttgaaggcaatgaagcccttgagcgatattagcacctgtttcgtgggagtggcttagtcaggaggcagctggttagcataaagcaaggtcgccctcatctctccatggtatctaccagaagctgtgcttgtgctcctgggtttcccagcccccagaatcttgaaccaaagtaaatttcattcatttgttgatttatttttaattttttgaaacaggctctcatggagtcccagctaaccctgaacctatcctcttctttctattcctcagggaccaagcctggcaactttgtttcttaataaattacccggtctcaggaattctcttagagtaggacaagaccaccacctggagtgtcattatctctcatccctgggggccagagttgcacaatgttttattggattttgtctgaccagtgtctagggcggagcctagcacagagtaggtccagattgcttcttttctggatgcacctgatgagcggcttagctatactgagaatccaccaccaggtccccactgttgttccatgttataggttaaaccggggaagttggaggctgggtatctgtagagagtggttctgggaatggagtgggagaatggaaaggaagcatctccagtgctgtggtaggaactgtggttccaggcacctataatggcttttataaaggggggagggaaagggatggtgggatcgactggaagaaactggtttctagaaagggcgagcaagagcaagtttcccctcagtgcaggtgtccggttgtggggacaggctagtggagcgtcagtgcagtgtccctgtgctggacaccaaggacatggcagccttcccagagtccctgttggactgggtgatttatactacacaccagggtgtgctgaggccagcaagctatccgggcagagaagagggcgttttaaagcattggttccttccagccatggtgttaacccacctggatctctccttgcccggcagggacatcagggacatcttcctataggcaggatttctccttgctctgatggccgcacctactgtgagttagtgctgccctactgtgggcgagctgctgatccaccacacagggactgctgaggcctagcataggttttctccaagctcagtgactgtcacatgattcctgattacaccagatgaggggccgggagcacccagcacggagcctgctcagggaggtttctaggagacagtgggtcttgcttggagtttggaggaatgaggctgagaggacgtagtaatggagttaagaaccctttaaaaggagacggctcagtgggcaaagtgcctgcctgccatgcaagcttaaggacctgagttgttcaagactccagcacccacataaaaaagctggacgaggtgacacatgcttataatcccagcgctgtgggcagagacaggcagatccctagggctcagtggccagccagtctaaccaaaactgtaagctctaggttcagtgagagaccttgtcccaaacaataaggtgaagagtgttggaggaagacacggcaaagtagcctccccctgctccacacacactcagataagtgagcacacctacacacgtgcaaatacatctcacacacgttcacacctctctttaagtgacgttttctcctcttttacttttgaataactgctttactgagaagtaatttatataccatacagcgtggtctcagaacatctcaagagttacgcagctactaccacagtcaactttgggacctttcatcttctaggtcctacctgaagcagtcaccccgcttcaccatcagctctgagcaagctgtcaagcactttctggctcatagatttgcttgctgtgagggttccatacacagcaggtctccaggtgtgggtcagttctcgtttatttgactgcagtgctaccaaccacacggcacagttttgaaggtcattcgttctagatacaagtcctttaacaccgggggctggagagatggctcagcggttacaagcactgactgctcttccagaggtcctgagttcaattcccagcaaccacatggtggctcaaaccatctgtaatggggatccgatgccctctgctggtgtgtgtaaggtggacagtgacagtgtactcacatacatgaaataaataaataaatcttaaaaaaaaaacaaaaaacaaaaacaaaaacaaacgtcctttgacagacacatcgcagttataattttctcccgtgctgtgggttctctttactgctgacactcatcgaagcagaaaaggttgtgatcttgttgaattccggtttgcctgctttcctttcattaccgaatttttttggcctccctgtttgaggtctcgaagacttccttgcagcgagggaatcaaactcgggaccttgcgtgtgatacagtgcaacaaccactggggctacttgagtgccctgttaagactccatccttccgtctctcccatttgagaggctctggcccgtttgcatatggcggaaggaggtatcaatcttttccagctttgagttgggtcccactgattgtccgacccacggtttccccgcttgctaatgctttgccttcttcaggtaggtctctgttcaaacacccctgccccagacagttgctccctgaccttcagtgtctctcctgctcagtctcgggacctcagcacggtcccatgatttctgttgagcccagagcagcggtcgggtgtctgtctcactacctggacttccagtgtccagcacagtgcctggcttctgtgggactcaggaaatttcttttagttaagaagttgctttctcagaggattttgactaaaatctctgagcggtcctggcctcacggtgttggaagttaataagtgagaacgggccatcaagcaacattacattttggggatctcttgtctccccagcccagcaatcccattagttcatgttacttgcatttttggttggccctggtgactggaaatttcttcctgacagtggacagagacctgctttcctgcagttcccactcatctactgtctgccctgacagtcgactggacctgatccccgtgttgtgacagtcctttaaatatccgagaacatgtatcagtgggcactactgattcttttagctgttcctttgagccagtaggggctggttctgacctctctgtcactgatggaggcctggggatggtgggtggcacaggctgccaatggaaacttggacacagacacagctcagagtggaggagtggaggcatctgattccagttgtcccttcttcattagagtggatgagtcccaagcttgtaggcaggattctccaggaagtccagactccctgtcatagacattgagaaggcaaagctgaactctgtaggacacactcttctacaatggtgctttccagttaaagagatgtctggttgctttcttttcttcccagctagtcagtggtctctggaggtttggttggcttcaatgacccccaactctcactgacagtacacccacctgggagctcttaaaacctccaaaaccattcccaccttccaaggctctagtttaacgtgctttcgaggccaaggcagggtggttttaaagggcccgtggtgtctctgtgtagccggagctacaaccttagtttcgggatcacagggttgaacttgaaactccccactgccccataggaatgagcaagggctgatgtcagcacagcatccagagccaggggacaggagacaggggacaggggacaggggacacaagtgttttccaagatcgaaatctcatgttaaattatgaaagccgtacactttcaagcaaaaggaaataaatacggaaatgttcaaagtagaaagcgagactgtacctgtctcttccctgagatctctactctcagataaccagttctcgaggggcacagggccctgcacacttacaccgcagataaacgaacgtggctggctgtgcactgtaggctccactttgttttctcagcatgctacagaagagggcatcttaccatcagcacgtatatgagccataatttttataacttttaaagtcagtgaacattgagtattccttatttttttgcagcagagaatatttttcatacatataccaactctccgttttcctcttcctcttcctcctcttcctccctccctccccccccctctctctctccctcttagaggtccagttgctaagtgcaagaacttgtaagatttaggataggaatcagactcctagatgatgctagagagatggctcagtggttaagagcactgactgctcttccagaggtcctgagttcaaatcccggcaaccacatggtggctcacaaccatctgtgatgatacctgatgccctcttctggtgtgtctgaagacagctacagtgtccttataataaacaaacaaacaaacaaacaaacaaacaaacaaatctatcttaaaaaaaaaaaaaagaaaaaggataagagtcaccagaatgctttccagaaagccaggccataccaggcactagtgtcctaatgacagccacttgcctgtgtcaccagcgaagctttgctgagcacagcagagaggaaggtgtgagtgtgtcagctggggaggaagtggagaggtcacttccctgaaggaccgtgtaagggagcagctgacttctggcctcccctgcgctgcacaggaagcggaaccaaactgtgctcattaacctttgcctggctccgaggtatgacaaaggcacaggcgccctggcaggatgtgtatgttgagggcactgggccagggctgggcgttgattagggagtgtgtggagccagaagttcccttccgaactttgctagagctggcgagtggtggccaagcccatcggaacccagcacatactgcttttgatgtttccaggctgggctctgggctcctcggtgccaaagtgcgcctagcagacatgtccgacatgatagctggacatgtgagctgacacaaaaatgctggcacttgggaggcagaggtggatttctgagttcgaggccagcatggtctacagagtgagttctaggacagccagggctacacacagaaaccctgtctcaaaaatataataaaaaataaaaggggggggcagggggagctggcaagaagattcagtaggggaaagggtttgcctcctggtctgatggcctcagtccaacctgggatcctacaggctggaaggagaggattgactcaggtgtcccctgctgggcacatatgtaccatggcatgcaaaccttggtatgtgcgtagctatacccagtgcccaacaccaaccaaccagccaaacaattgatttaaaaatacggttaaacctgagagagaaagcgcttgtctggagggcttggctaatttaactctaagctcgtccctggctgtgggtcggacctcagctggtcacagctgggactcccctcttctttgggcgctggaggtattagcgctgtctttggagagataatgagaacgaaggctctagctgtgcctggcactcagtgagtcctcagcaaacaggagtggctgttgctctcctcactccaagggagcccatttgtttgctcagataagagcaaggtgtgcctggtggcctcttcaaccatctctctctctctctggggaattgaaggacggagctttgatggtgactccgtcttttcaggttcctcaggctttgtggatcctgggagtgcccagcttctatgtgcatttcccttccaggaaacagggaagaaaagaacatgaaaaaggcctctggcctcacagtatggcaccctgtcagcagatctgtgcatgtgcgtgtatgtgtgacttgaaggtagaagaaaaactgcctagggggactaacagaaagatatggagacatgaggagggagtgtgctttttttcaggactggagatgtagcccagtggtggaagttgcctagcaagtacaaggtcctgggttcaattcccagtgctgcaaaagtaaatagtgaatggataaaaagctttctttttccccagaaatgggtggtactcgtgggcttttaagtagtaggtggatgtggctcaggttctcgagcctttctggggtgactcctgcaggattcactgcgatggtcactcaccctgtggtcactcagtaggtgtgcatgttggagtagaggtctccctctaaatcccccctttaagtggtggctctttcccaaatcttcactgtcacttagaacaaattcccagctagaggaggcattggggttttaccagggccacctctgaggtcctcaatgttttcaggctaagctaaaaatgttagagtcaggagtgtggctcacttgatagtgtatttattatgtagcatgcacaaagccctgagtttggtccccagcatcatataaaccgagtatatagagtaaggcatacttgtggtcttagcaaccaggcagtagaggcaagaggtcagtagttccaggtcatctttgcctattgtgagtttgaggccatatggattaatagacccatattcctaacctatccagcttccctcccccaacccctccaaaattgagccaagtgacatgggccattactggcaaggtttaggactggcaaagacccttgtaccgaatcagaaggattcatagtctagctcttgcccattaagagtttgggtctggggctggagaactcccttcaataagtctctagccacaccttgttgctataaatcctgctattttcattgaatgaaccagttgctatctcaggacccagtacatggaaggccaggagagggcaagacagcttctgctaatagggagaccagggaggggttgggctcccccatgtcaaacagactgatgcaacatgtgtcaagctctcgggtggtgctgtgccagcaattagcaaacaagggtggatgtaatagcccgctgatgatggatcacaagctctgagcactcccagatgtggacagactcatggggccaatgggacccaggtcagatggtggcactcttgagggctccttctatggaacaatgagtggatgtggatagggacttttaatatcaggaccattactgccaccttgagagtcatctggaagacagtatcagcccaggctttggcatagccacttgattaggaatcatacccctggagccctctgcccaagggtggtttaaatttagaggacagcttggctggactggagatttacaggccactctctctcccaacccttcaaggcagatctatgtatatggggcatttagaaggggaaggtagggcttaatgttctcttagatggacatcaacttcttgggggaagaacttagcatgggcccctcctcatcaagaagctagtgcagtatccatggtccctttcattggcttctgggttgtgttcattctggtttctagggccatggttttgaacccagtttaccttgaatggtaggtttcccttcatccgtagactccagaagatctgaagtgattctgtgacctcccagatcctaaaaccggaatagcccactccaggagcaatgtacaccccccccttttttttgggtggctacagccccaaggtggagcttgtagtttgcagactataaggtagattagatttcctccctacttggctccttgactgggcaaccatcaggtagtgaagacaacttgcccagctatgttcgacggccctggtcctagccacctgatgccagagccgtgtgcaagcaggttggagagcattgcaggttggagagcatcgcagtggagtttccatttggcctggggccatgtctgctgggcatggggccagggaaaataaggccttcctcagtaaactgcaaccaccatgtgtaccacataggggtgcgcagtcccctctacaattccagctcttctccccttgttctactttctgtgtcaaaagcagcaacagacattagtatttctgatgaaacccaaaccaacccttctaggtgtggttgggccccatctttgcagatcccattctgaactcccctccagagactatgcttctttcttggaactgacctgcaagggatttgcatcccggtcatgcaaatttactgacctaccttcaaatttgaaggagcttggttcctagagggcagcagaacccactgggcagacagggtcagagagctcggatgtggtcaggcggtgtgtattcagtagatagaatgacctcggaatgggaggtggcctgatgaggtgctgtgctgattgcccatatgtggtgtccctgctgagggttctcgccctttagacgtgagctgcagagaaacatgatagtctggctagtccacaggaagctgcacatggctactggtctttaaggaggtttcctatttgtctaccatctgcctgaagtgaccagagaccttgaaatggaatccgtgcatttttaaaaatccagaagaaagggaaactccacacaggaaacataagcccaaggagctgtgtttggaatcagggtgtttaattgaagcccagctgctgggtaatgttatctggcagctcctgaaaccagaggggggtttatctgtaggggtaaacagagttggctttctccagtgacctctgccctctccacctcagacacctgctctttctccaaaactatctctaaagcagggccagccagagtgtctttaagaagctctggtgttggggtgaggggcaggagtgtgctggggcgaggttggaattctcatctggagtgataatcaaggctctatctaaggccgggaagaaaacagagcaagtgtcctgtcacgatagagtctggagtccgtcttcagatctctggtcttatctaccagaggaactgtctgcttccaaggctactgacctatggcatacgtgtcccagaagtttaggaaaacctggggctgggagcgtgagagatcagagatctcacagtcaatgaagtgggctgtgagtgagatccagctggggctggctccagaattctctcctcacttggccatctgccacctgacaagtcgctgccttgagccccagattccacctctgcccaaaaagcgacctcttaccatgtgccctgtaacaactagcaggcctccttgtatctcccagctagcaggcttcctgcgtctcctgactaccaggactgcctgcttcatctttccagcagcccggctgggagcctgtgatttatactccctgggaggtgaaagggaagcccgtaattcccacataggaaggagcatgggtgttaagccccagttaagtccttccccagctccgcttcacaggccctggagaatggtggagtttaatgacctgcaggcaagtccaccctcctctctctctcctagtgggcttggccgcttggggacaccaggcagcacctggtgcagggacacacctgctccctgtggagcattcgcgcaaggagacagtcaggtggaagaggggtgggggtggtagggtgattaagaccctgatgaaaaccttgctcctcttccagggtagcagggagctgctgtgtctgagcggtggccggcttttgctgcctgcctgaaccctgatctctctctgatccccaagttctgtctctggttgttcatgggctctcagtgcgcctttgactctccctcgttcctctaggccagtggtcctcaaccttcctaatgctgtgaccctttaatacagtttctcatgtcgcagtaacccccaaccataagttattatcgttgccacttcatagctgtaatttcgctcctgttatgaatcgtgatgtatatatctgtgttttccaatggtcttaggaatcccctgtggaagcgtggttggacccacaggttgagagccagtgccctaggcccttccctgctcagacgtatccagacttctctgttatctgaataaagctttaaaagatgtttagttcctatttcgtttcctatagtcatttgttttaaatatctacagacttaaatttacataaagaggactaggcccgtggctgccaaaaagtttttttttttctctccaaaattaaagtttaattagtattgtaacaataggagagggaggacctttaaatagggcacagccttcttgaatggctagatatccttgtgctggaactggcttcatggtaaagtgatgagtttagccccttttcctctttcggtctcttgaactcaccctgttctctgtgcccaggacggctctccatagccgccggcaccatgctcctgggctttccagcctccagagccaaatcagcttttagtgtttatcatttatcctacctcaggcaatggtagaaaactaaatacccagtatagaagataggggaaagactcagatttggttcatgtcttctacagtgtatgttattagctaagtggctttacttagcatctctgtgcctctccttcctccagcaccgtctggggataatcattgagaatagatcaaatgagctgatacgtgtaaatactttataccacaccggcatatagtaagttatctaaacacgtgctatcgtttggatctaagtgattttgtaatttattgtatgagataaatgtttgcataaagcacactataattcatgtgcacacacacacacacgtctgcctgtctgtctgcctgtccacatatttatttcggttcatctttttctcacacagggtctcataccgctgaggctggtcttgaactcactttatagtggaggatgaccttgaactcttgattctcctgcctccacctctcaaatattggaattataggtgcctaccactgtgcctggctttaaaaagattcttattatttttcactgctgagactagagctcctggtcttaaatgtgctgggtaaatgtgctaccactaatctatatattcaattcatatttagtacaataagctagtagtttattctgagcatatgtgggcagggctggcctttaacttgttttctttttttttttttttccttatcaagacctctgctcattaatactccatttctcggtggtgatatccccccctaatttcctggctttagggccctctccttgattgtctttcagagtattctccgcaccatgcagctaactgtcttagttacttttctgttgctgtgataagccaccatgaccaaggcaccttataaaaggaaacatttaattggtcatacagtttcagaaggttagggtctccaatggtgaagcaaaggcacacagtggccagagcagcttctgagagatcatgtcttgatccacaaccacaaggcagaaagtgagacacggggaatgatgtgtgtatgagtcacacacgtcctccaacaaggtcataacccctactccttcccaaacagttccaccaactggggaccagagccttcagacgtacgcacatatggggccattctcattagatcctccacgctgactctgtgacttagcctggaagagaaggaggaacagtgctccttcaccaattaacaggccacctccacactgcaagctctgctgtctaactggggacttgcacctgtctgtccacagtgcctaaatgagtctctttgctgaagtttctcctcctgtagcccaggccctggcttctctgactatagggtgttcattagaagaaccccacagacctatggtgtcagaattatttaccagtggccttggtccctgaattcctgcagtgccagagtaattctgttggacgtgcagatatgggaacctttgctggggagacttttctgtccccagaggtcacctcccttgtgtcccatctgtgccaggggaggtcagcagagtagccccatggctgagggtgtgtgtgtgcagtcttcaaaagtttacacttcttccagggctgtaggaccggaacaataagattccacacaatacgttgtgtggacaaggagctttctctccttccccagagacctcctgaactaggtggccttccttggtggcctgaggtgcagctctgtgtagtttaccaggggacagcctagacttggtgcgcttgccttgtcgatcttccatgtgtgcacttcatctctcctgtgaagttgcttcttatgccagacttgccagcgtcctaggtcagtgtgacaactctctgtgtgcatgctctgtgaagggcagtgagcctggttgtcgggaggctggctgtccggaggtcaaggtgagccacatatctctggtctgcccaggtctgcccatgtggaattttaaagtgtgaggctcatggacctgcaatttggaaggaggcttcacagaatctcattcactctgaggtagacggagaaatgtaaatcagctgtttcaaaaaatgtaatgacctcaattttatgtttattatccacaaataacacttaacctgtttgttttaaccctgtactcagagaatcttcattatcatttcagtgactgcttcttcaggtgtgtgtagagtgtgtgtgtgtgtgtgtgtgtgtgtgtgtgtgtgtgtgtgtgtgtggagtccacatgtttcctggccctggtgacaaatgagggggaaatggtctcagctgtgacactcctacagtaatattaaacagtgcctgcagcccagtcttggtcacctactcacctgcttctcttttccctcaggtatacattatcaacgtgacctggtctgactccacctcccagactatctaccggaggtacagcaagttcttcgacctgcaggtgagttagcaagaaccagctggcggcttgagtctcccatgggttcctcgttcatgtccacatctcactggaaggccctggacagagccaagaggcagaatccagtctggcacagaggggcagatgcgggggaccctatcgagcagccaggggcagatgtgggggtccctaccgagcagccaggggcagatgcgggggtccctatcgagcagccaggggcagatgcaggggtccctaccgagcagccaggctgggtactgtcttgactgctacatgcagacacttaaggctttgtcgctttccaccatggcccttcacagtcttgctttgtcatcctcccttggtcttggggtggaaaccgtggggaggcaagaaggcagttgtgggtgctgtgtgcctgagcagacatatctataaacatccatgatgagacacaagccaccacatcattgctagtaaagaaaagcaaacacacagagaagaccaaaactaaataagcaatttatagaactacatgctgggcatacctccgggtctgccttctacccaaacaaggagcttgccacccagctcgtacttgtggatggtaaacgtgtgtctctaacttagacagatgtgtctcttcagcaacacagtagtatatagccacactgtaaccattaaacacacccctttgatgctggctgatccgttttagggtcttttggtgacagatgagtattttatactcacactgggcttagacaataatatttgagaagttcgtgcagttgaccagatggtgagaaccagcctggggcggtagggcttccgcaaagcccaaactaggatcagctgtccctgtctagtctctgcttctcttcaggactgtcgatggcccttagtaattcacaccctgatgaactgagccgtcatagctcttgcagtttacatgtggctcccactatcatagacaccgaccttctcccttttccatatggataaatccagaggaagactttggtgaggtaccttctttggcctaatcggaatgcccagaggtaggaagggtcttggagtgtagacatgagccttagcagggtaaatgggcgtgtcacccttgcacatcagaaacaagtgatagagtattatgtgaatgagcagcattccgtggtggtggtgggggggggggtgccgagaaagtgggggtttcttcccttagaatgtgagtgtgatttagaaccacaaaaacacaaaagaagacgcagatgttcctagccctcacagccagcagccctggaatgacttcacttgtggccaggcttgtctgagtgggttatcttctgtgcatacaagttccacacctaccgggtcagttacattcagatcaaagatatgtagtccttccctttagccccttagcagtgggccatcttggagagggagatgcaggcctgtgtgtttgtgcgtcagcgcctgctttgatctcatgatgcttgtcactgggagacaaaccttttaaaaagccagttccccaggttatggatccttctgcttcaaccacagggggttgaatttgtcactgcgtgtgggaataggagcactcatgactcctgcctcttcccctctcagccctgcccaggctccttaggtctttccaggataaactggtgggctttgcctgcaccccatcaatgggtacagtgtgcggggacaggaaatgataatgtagtagggcagagtctggaccctgaaaggactcattgatcagctcgagggagtctagaagcctggggaaaccttcccaatcagaatgtctattctggccccaccccctcccaagttatagaatcgcacaagaatctgccctccacccctgacccctgcccgaggactcactctctcctgtcactgtagtggggggccacaagnnnnnnnnnnnnnnnnnnnnnnnnnnnnnnnatcccaaaacatgtagagagtctttgccatccattattccacagtgcagcacagtagcagccacttgagtcggaggagttcttaaggcgtccgtcccttttcatcttggtggcatccactcgtacactcattcatggctatggcattctcagtcactggggctgctggcctgacaaggtgacttagcaggcaaaggcaggcttgacggcctggttctatctctggcagccatcaactgagcatcatccatcaacttgaagccgctgtcccagagcccctccgaaagcccagagaaggcttcaagagcattttagatgtcaaggtggagaggcagggccttgcttcttctataaatagcttttaactcggtgttctctcagcaggagagggacctaccccacagggagctgaacaggttatgctctcatgcccaagtttgtttggttataagggatctgcctggagatgaccttgggttaatcagaaggcaggcaagtgaccacacatgccccttgttcaatcttccatttcccatgtctcctccatgacctagccccaccaaagaaggacaggacaggggggctcccgggccctggctccattggtgacagtttcacaacctggcctgccagccacggggctgcagtaatttctctgcaaacattggctcatgtactgttggcccccaagagggtcccctggcagtgagtgcaactgggtcaatatttggtcagagccaggaaaggcccttaatcttcccatgaaccacttggaagacagccgagagcggctggaggctacttgtttgctctaagggcttcagctgtgtggaagagcttttctctctcccttattcatctcccctgcgctttccgtacacgcaggcatgaacgcacgcatgcaggcaagcaggcaggcagcgcggccacagctcttgaatagcctggactgatgtgctgtgtgtgtgtgtgtgtgtgtgtgtgtgtgtgtgtgtgtgtgtgtgtgtgataatattatttatggacactcatggatcactgcatctttagaattagaagagttcctttctgtaaggtgtatgtgagtgtgtatctgtgaaggtgctgtgtgtacgtggggtacgctgatgagcacacatgtgttcaagtgtgcagaggctacaggaagaccctgggtgtgagctatcgctttccacataattcctgtgagagccttccgctgagactggagctgggctggcagctcgtctctgctccccattcccatgctgccccaagctctgggcttgcagactcaggcagccgcactcaaccttgtacgtgagttcttggatccaaactcgagtcctcagtgcttgtgcagcaggcactgtcactcactgagcggtttctgcactgcaggcgccagcacgacggtcgctttctattctaaggcctttgctttgtaggtaaaaagctgttaggttctctattcatgggaaatgttctgtgtgtgtatatttgtgtatgtatgggtgtatgtgtgtatgtatatatgtgtgtgtatatgtatatatgtatgtgtgaatgtgtatgcgtgtatgtatactgtatgtatgtgtgtatgtgtgtgtgtatgtgtgtgcatatgtatgtatgtgtgcatgtgtatatgtatgtgtgtatgtatgtgtatgaatgcacatgtgtgtgcaggccagaggctgacactgagcatctcccgctacctcttcatctacctcttcatcttgtttattttgagagacaaggtctccaactgaacctggctcttgatgattctgctatattgattgaccaatagagaagaacactgagtctagatgaaagccatgtgtgtgtacatgcatgagtgcgtgcatgtacatacgtgtgtgtgtgtgtgtgtgtgtgtgtaggtcagaggacagcatgcggaactcagttctttcctcgtctcctatggattccggggttctagctcaggttgtcaggcttggcctggtgtctgctgagtgtttcacctactgaaatataactattttaaaagttctagaaggatatactccaaattggtgaccattacacctggatggatattagggacatcgatgggaaggagacctagtcaaatggagaacttcaagctcatctgtgaaaaacaggataataattaaagggaaatctgaggagaggtaggaaagtaagaactctaaaataaaaaatgtctctttgcagttgttacagtaatggaaaacaacaggcttgataaatttgtatcaagaatgtatcttataagagaaagaaagtgaaaataataattttaagttacattacctcatttttcctagaccttcattctagatcattcctgtggaatgtaagtagttagatctcattataacaaccccagggagctatccaaattatcttgtcaaattggaatcttgtgttcagatattacttaaaacccctgagccaagcattggaagaggcagtccgttaactggcagcggtgctctggtcctgatgatgttgccaggactgagatggctgggttccaaaaccaagatctagcaagcctttccgatgataaaccctccgacgagtcctttaacctctctgtggccctgttttcttatcttaaagtgaagtcattataaagacccgtctcctcggatcatagaaggaacgaaatgatagattgcatgtaaagaaagccattggaaaggggagggtaaggttcttagagacgggggcagaagcttcatgagctcagagactggactctaggaggaggtaccggggctccccacgccaaccggagtcacaggctccttcctgtgcccctaatgcagacctcactttggccagatgatgtgcggtctgctcttctgctggagacgcagaaggcagagagaagatttcccttagagaaacaaatacttttcatctccactgtctaattaccaacctgcttcctccccgccatgctgttaggagaacactaggctttgtttttgtttttaaagatttatttatttgttttatgtatatgagtgcactgtagctgtacagatggttggttgtgagccatcatttggttgctgagaattgaactcaggacctctgctcactctggcccaaagacttatttattgttatatgtaagtacactatacctctcttcagacacaccagaagagggcatcagatcgcattacggatggttgtgagccaccatgtggttgctggggtttgaactcaggaccttcggaagagcagtcagtgttcttacccgctgagccatctcaccagccctgtgtggttttttgtttgtttgtttggttggtttttttttttttaaaggagttactggtctacagtttttctttacccttgttggtggcagaacatggaaggattccagggaagccctagaggactccattggtccctggtaattcctttcctactgggagctgacttcagctccttttctgtgcctctggggctcttaagtgaactccagcctatgtctttcccctggcaggtcctgcctgagggagggcgtgccagggcagggggatggctgtggagggatcggaggtgagggagaaatggtccagaaggtcattcagctcagggtgggaaagcagctgctaacttttcacttttgagttaccttgtagttgggtccactggaggtctttggagcagggggagctaagtccccctctgtcccatcccaggcacatgaggcttgctggttcctgtgcaggttctgaacccttgtccatttaggaacacctttctacagctggggcttctcagatccagaggggctcagaaccatcctgacttagaacacacagaaagggtagggcaggaggggacagcgttggagcgggttctcacacatctgtgagaaaagggaaataagacccagatgtgggctgaggcttgagaactgtgatcggagtcctgctctcaggagaacgttctagctaggctttccagatgatatgaagcagccggagctgtgcggctgcccctgcacctaggcttctccatagaaaccagtgagctccccttagggggctgtgctcattggatccaggcacccacctcttgggtgcaggacctagcagatgtcatggacaattgcatgaccccctccagccggttctgcctctgtcactcccttggctcttccctggggtcagggtggacttattaacccacgctcaggaagttctcccttagacaggaaaatcataacagaagttatggtgtcttttgtcttctcgtatgagcacagactgctcattgggtctaaacttctaggggacatcatgaatgaggacacagcggggaggggtattgcgtgtaccccaagtcctgcagaggtgctgagagtatgtctcggctggagaaattatctacatgtgagaggcacatgcttttcacaaacctggtgttagtattctcacaatggaaaaacaaacaaacaaaccctgttcactgtggaatggatagaattgtgttttatagtgagagccctttagagacaacaaaaggtgattagtatctgacattcaagttaccttgtcctagcatgcccacaacagacaacattcactgattacacattgtccctgactaagtctgtgacagacattgttaatcaaccatgagttcatatgcatctcagagtctctaaaagaacaacaccgggtatcttcacgatgtcactcatttagccaatgacctttgaggtgaagctgactggccaccttctgatctattcccaccctcttatttgataaatgagcaaattagaccccccccccagtctaattttggtgttgtccaaaaatcatagcaccaggggcctggggaggtggtggcccagtggtcaaagagcttgctctgcaaacttgaaggccagtgttcgatacctggatacccacccacatatgtgccaacgagtgtgtctgctcccctgtaacccagctttgggaagcagagatgggatcgccagagcaagctggctagcaaaactagccatgtcagctagtcttgattgacagaccctgcctcatggaatgaaatggaaaagctattagggatggtctatcccccaaatcaacctcaggtgtccacatgtgtccacatccacacatatttgttccgacacacatgtaaatatgtattcacagatgtttaaaaatggaaaaagagagaaagaaaacaaacaagactgtccccaaatcatggcaccaacaagtcagtaagacttgggggtgccccaccccttccccaccccatccccaagcttctagttcactccagttgggatctctctgattttggtgaggagggcgggaactcttgatgccgcatcattgaaggctgctaatgggggggctgggtgcccgctctcttgactgtgccacgagcagaactctccgaggcttctagaaaggtcttcccaagcagtctgaccttgggctctggtgctgcctggccctcagcccacaccgcctccctcttactgaacaacaaacccaagctccaccagggaccaagtctgcgtgagtcagcgcacaccacctgtgcctgcttggagcagcacaccttgtttagctggtgtaaggtgtcctgctggggtgtgtttgggtgttatgcgcagggaggccttggaatgcagttgccgccccacgaacctccctccttggttccaggcccaaaggcttggcctagaaaattcagtttgtcttcactgagcccccgtgtacccctctttggagggaagccggcacttttgcgtaaggaggtggctcaccactccaggctggaggatgaagggaaggaaactctttggtggtcaggtgagtgtgtgtgtgtgtgtgtgtgtgtgtgtgtgagaatgtgtatgtgagtgtgagtatgtgtgtgtatgagagtgtgtgtgtgagtgtgtgtgtatgtatttgaaagtgtgtgagtatgtgtgtatgagtgtgtgtgagagtgtgtgagtgtgtgtatgtatgaatgtgtgtgtgagtatatgtgagtgtaagtgtatgagtgtgtgtgtgtgtgtgtgagtatgtgtatgtgtgtgtgagtgtgatcagttcattctttacctgccagagataatttcatgtctgtcttggtacctcctgaggacctcagggaaagaggccggcctacagctctggtttaagtggaagcatcagccagtggaagatccaagtaggacagagttgccttggtgacgatgcacggagtggagtacccatatgggcctgtgtgctatagcatcccatccgtgcaggtgtttcctatcggagacccagaggtcttgacattctgtccttactagctccagacagggcaaccattagttttgcttttgactctgatggaactatacatagggagcagctaggataagggatgacaacctgagttgtgggcctctagggggagagtcagcttgtcccttgaggagaagtgaactatatcaactctgcttcttagcaatcagcctccagggtccgagcctcagccgctctgcatccctggatctgagggatgcttgttcaagtgggactgtggcaggagttactgaagaactgcttctattaagctggagccagggaaaggcattcgcctccccggagacctcctactgttggatgacatctggctctcaagggcttgtaggattcctggtgccaaattcctgttgtcctgagtgtgtgggggggtggggggtggcagaagctcagtcagggttagactcacttgggtttgggcgttggccccacctcttactgctgatcgtctctaggccattgcttcacttctagaactctgcacaattgtatctgcatcactggtctttgcagaacctgcttctgtggctgtgaaatatttgaagggacaaagcacaggagatccacctcactgagcctggagcagccccaggggcattactattataggactgtgggtgtagattctctggaggagaattcagggtctccaggtgactgccagtgcctgcccacctagactcagggaacagtttccagctacaaaggggtattgggcatttctggcgccggggtgagggagtgttcctgggttggcgaggggatagctttcaaggcagccgaggcttggctctgtctgctaactagggagccttcatctgttgcctggccgaacagagtggccagttcagccttgctggaatgccggaggatgggggaagtggctaggcaccgaggggggtgggcttggctaaatagatgacattcagatttacaaaataaaattgaaaagaaggaaaactcaaacaggaagcatgtggctggtgtctgggccggccgggagatgcttgcagaggtggctctgtgtgtgacaagctggccattcttcccactgtgtctcccaagggcacctctgtgaaggccagcctgtctccctccccagtgagacaggcttcttttgtcttgggcttcctagtgcctctcgtctcaacttggagccataggaggaggactccctagtggaagggtggagagaacccttgggcatgtgcccagtgcctgctggctgtgcccactcctttccccatcagggccgttcagtggagttgcaaccaaagcagagggtctgagtagaggccaccgttccaagagacttgttcaggaggactcagatctatagttgccatctactgcatcataggtttttagtgcatgttgggaaaggatggatgccttcagagggcccttctttctctcccgggggagaatgacggtttactgccctctctggaccatgctgtgtctgggcccctgtgaatgcagcgagctaacagcgacctctcctacttctccctattctgtcctaatgggatcacctacctgttccactgactaacatcttccctgcttctctagtgtcatgcttgtcctcttgctaatttaacttaaaaaaaaaaaaatcaagagtaggcatttgcctagtaaacagagtggctcttggcagggtcaagctggaccccggattcccacagccccttgagttggcagccgcctgtgttgcttggcttcaggagcaggttttcagggtttccttctgtcagtgagtggaagctttctctaggcccagctgctgtcttcacctggagggtgacaccagagggtatttgcggaggactagctaggggcagatcgttgtgtctggatcaggccagagtggagacagctgggctgtagactgacctggaggcggatgacgtgtcaaacccttgtaagtagtacttgtgcatctatggtcccatgctcctaacccagctgttgcctaaacctttccccacatcctcccctctctcagcccttcttcccctcctctcagtttttgcaccatctctcacccagaggagcctcttgtttctcagggccacagccttcttcccaggtttctccagcattctagaaacgtccccgtactgcagtcagcttttttgatggcaaatttccagtctcttctagggctacatagtggtgagaccctgccgcagaaccctgtttcacccctgtagagtacgccaggcctcagtgggcctcttgcctagagctaacacgtggaacattttgctgtgttattgagaagtgtctgtagatcgaatgttagattgccttcctcctgccttgggtggagaacagtggtgggaggttctaccaagcagacagaccagcaggtgggaccaggggtggggctgaggattgtaaccctgagaggaggccgggctcagaggctcctggggaacggaagttcagaagctggggcatcttgggaggtgttgagtgccccctactgttgtggccaccggagtctggatcccagtcaggcctgctgacaggtgccagagatctcactgtccccgtgatggtctacccttgtacttcctcctgttcctcactctgggtggatcgatagccccgccgctgggtcaaccagaaggcagtgtggctactggaggggtgacctctatctagcctgcagggtgggctggaaggtccccaaatgttcaggaacattttccctgtagcatttcctggtacctggcgggaggacttttccctacaggaaagtctctgagccgggcccagctgggaaggtgggcaggcccagctcactgagtcattccccgggcaactccacccagctttgattttctctccgggatttctcttttcccatccgagttccattttccccccaactccccccacccccagtgtggacagactgcaagcagcccttgctgaagaagattccagagggagatgactggagactcctgtgggccggagatcagcctctgtatgcagagaagcccttaaatgcaggatcagcacagcttcgaagccatcagaccagctcataggagcccctgaggaatggcaagggattcaaggccatttagggaccacacagacccaggcagacaccaaaggcccaacacaaagacagctgcctcttcctctcagaccaccctcagaagacggtgcagctctgacggctctgtgcccacccaggcagctttctgccaaccacacttctcctcctcagagtgacagaggctgtgtcataccatggaccttcgtataaccattctgtgagacctgctgtcgtttcagaacgaactcttaaactcctgccccaaccccaagtgatcagttcatgtgccatttctaactgatcctgtttcttctactgtcccccagatcctgcgcatgtgcactcaaacacacatataccacacacatacacacacatgcatgtacacttgagcacatacacgcatgcatgtgtatacatgcatgcgcacgaacacacacagagccattgtccagacatgggagcccagcactaccccagagccttcacccctgcccccgctgtactctctcctctaacccccttccccacatcttacagtggaccccctaagcactgaggccttgggtcctatgtcctgtcagtgagacctcctttgaccacatctgcctaccttgccttcaaatcacttgtctcagcctgttatcccatcagccatttgcttactctgattttccccacaacgtgggaacttcaggagaagaaatagccccaaagctttaattttttttatttttccattctctagaacagtgtcagctgggaaatccttgtcagtgacttctagagagtgtgtgtgtggtggtggtggggtatggggtgtgcagagaggggctgcaccctcttccaccttcaaaggcaggtgtgttcagtttccactcctccgggcagctcttgactttgtctacgggcagctcccaagtcacttgttagagagctgatggaatccttaggggtgaagaacattagggttcctcaagttcgcagcgtgtggaaccactcaggccgttctgcagataccggtttaggtgtagcagtgtgcagggtgatgctgcatcttccaggctcttagctgatgtccgcactgctgttctcaggaccgcatcttgaacagtgactggggtccctgaaggaccaatccaagcccctttctccatcctttttgttgtttcttttttctgttcaagtgtgctctttgggcaagctgattggttgatcgtggtgataaggagggaattggacctgggggacctgggggatctagaggctgcccagggaagatgtggactgccttgcagaaatggtgggtcacacatcaggagtgtggtgcctggctgaggaggaaggaggtggccagcccctccctccagttcagctttgtgtctcagtgacaggcttgtcagaccaggttctccagctgtggcgtgttcacatctggaggcagggcaggcaggggctaggggaaggatgtctggccttgtgctgaaggaggttcagtacaggcactgtgctgcctcattgctgtgggtccagaacatttccagaagaattctctacatttcccagtcttcctgctttcaaagtggtttcgggggaccttgattaaactccttgtgttgggataatccaattgctttctaacaagtttttagtggcttaccataagaaacattcattttctgttcacatgagtcaacggagggttcagctccaggcagccatctgcagatccatcttccaggtggaagttacaaaggagaatgtggggaaatcctgggagttttactggttgtgcctgggggaggttgtgtggatctcacttctgttcaagttccaccaatcagggcaaagtcatgtgactgtactgccagcaagggaagatgggaaatgtgggttagttgtgtccagttgtgttatggccaatgtggtggactttgggactttcaattctgagacctaggtattgacaggtggacaggcgtgtgaaccgatccttgtgacaagagtgacgttccaggagcttgcatggccgctctgcagaagccacctgcagagggggggagctgtggggcagtgtgctaatgaggaccctaaacagccatgcagtgcgagacgcatgggaggcaggatacatgacaacgcacgccagcggtgcagaggtggcaaacatgctatgttggtgccacgtggatgctgggagcccaaggccgcagcctgaagagctggtatttacttggcaccgtgattactgggacattggtgacatttgtgtggttgtgaagtttgtaatgggagaaaggggagcattggagaggtggcctcctcaagttactagttcagacagtggccctggccagaactcagatggcctatgtgtccttcactggacccccctgtctgtacagacaataatagtgtctttgaggcagacttgaaccttatgctacaaccccggcgcttttgctgcctagaaaggcttggttgggtctaactcaccgccacagctgctttctaccccaaggcaaagagaagcgagctcccggaaagctaaggttctcgtttcaaggggagagatggtgggagctggcctctgcccattccacccttgccctctcttcagcctgttcttcgtttttccttttgcaccggacatttgtggggaaagagctcttaaagcctggaaagacctccacccttgcctttaatctcagcgctcggggagctagagggaaacaggtgagttgaaagcaaacctggtctacatagtgagttctaggacagccagggctacaaattgagaccttatctcaaaacacacacatgcacccccccaaaaaaatttggacagagttacagcagggggaagaagccacttgaatacagaaagaagttgttttgtcatttaaacatgtcctgccttggcctcttcccatcagggggcatgttacagaccaggccagaatgtcattgccctggacagcagtttgaccccagggattggccttggcttcatctctgctctctgtcccaaactctgggcaggatttgatcctgtggtacccagggcagtttgggaaccacagtcttggccatatggaaggtaaggatcagaaggtagggcttggggagggctccatgccattcaccaccacccccttctcccatcctcagggcctcttttacttttactttttttggcaggggtagggaatattctggaaggttcatgtgggagagggaattgttggcaactttgggaagagttaagagaggtctctggcaggttaagggactgcagacccctgggggggggtggagctgggtgaccacagccttcacccagcagacttcactctctgtgtgcttgtaaccagccttaccctgacctggcacagcgttcctctggccatctgctcccttcccccaaatgtctcttttaccgccccccagcctatgaagaagccagatgtgtctttctagaattccactttcagtgtgttcctcctccgctccgagtcctccagggactccctgctgccttgagcaggaagtccaatttcctcctctcagattcagccctgtcctcaccctgcccagcgcacccctgcctgcctgccctccttaggatcaggaccctccagcacgggccaccttcctaggattgaaggaggaagagcctgggagtgccagcagtggctcactgcaggcttgggagcggggagggtgcatgctctctagtggttagccatgctgtggcctgctctctcctcccaggccaggctggaagctggacaagtccacacctctgcctaccagctttcctagtgctctactgccctagcattatgcctgcccttccctcttggccaaggacagctggagttgtgtagactaacgtgctgggatgaagctaagagttttaggatgctaagggttgtcaagtcatggaggattttcctgaaagctaaagggttatactagaaatgggatggcaccaaggaatcaggagtcagtcttcaaacagcccagtaaatctgcagtagctcacttaacccacacaccactctgatgctggctagttttatgtcaacttgacagaagccagggtcctcagagaggagggaccctcaagtaagaaaatgcttccataaggtcacactgcaggcaagcctgtagggcagtttttagatcagtgattgaggggggagggcccagcccgttgtgggtgtggccatccctgggatggtggtcctggttctatgagaaagcaggctgagcaagccatgagaagcaagccagtaagcagcaccctccatggcctctgcatcagctcctgcctccaggttcctgtcctgccctgtgttcctgcctgcactgcttttgttaatgaactgtgactgactcggaaaacctctgctgctcaagggagagggaagggataagataatgtgcctggggttcagcagctctttctggaatgtttctgttacagcgtggatatggacacagcagctcaccagtggggttcaccagtggggctcaccagtggggttactgatgcccagagaggtatccggggtcagcaagtcctctacaggctggagctggaaccctcctcttctcgactctttctcctgcatgtatgcagggaaaatgagcccacgggagtagactggggtagccagcctgcttgggtaccgtactttaggctccagagcgaaggctcacagtctagctgggataatactgtcagctagccattgatgtccttcttctcagcaggtgctgggggattggcccagcctccaccatgttaaatgtaacacatgacgtggccaaccctacacactggctgaactcctgggatgcgctgaggtctcttctcttgagtctggcccacacacaccagctgggcagctccctggggccctggatactcacagctaagtagggcctggcccagacaactcccaccatctgctccccagtctacccattgcctcctggacctcagattggagactactggtcagactgcactgctgtccccgcctaacagacagggagaccaatctgtgtgtgcctaccatcgcagccatgtttattcttcatgttaactaaattgttgtgccctaccacggtgactccagccaggcctgtgggaggatgaggagcaggccaaacgttccctttagtggttacacattgtcttaaggttgtgtgtgtgtgtgtgtgtgtgtgtgtgtgtgtgtgtggcggggagatgaagagtgatctgtgcccattctgtacactgatgcgtaaaccgcaggacctcaggacgaccgtgtctggaactagagtccaagtaggcgtgattcattgagatgaattggaataagtcaggcctcctgtgcagcaagactggcaatctcctaaagggacactgggccacaggcagaggcatgtgaagacaaaggtcttcgacagccatggagtgtcttgtgtggcctgaatcaccggaaactggcagctgagtcttcctcagagccctgacaaggccaagtcctgatggcaaaataacacagtcaggcctggtggcctggtggcctgggggcgtaactcagttagtggagagattgcttagcacattcggtgtcctggcttaaactccagcacaatgtaaactgtccgaggttgcccttgcctgaactgagaggtggaggcaggaagagcagaagttcccagccatcctcgattacatcacgtggtttagaccaagccaggcttggcctatgcaagactctgtcacaacacactaccacgttggaggtgacatgggggggagagttatgtgtgaagtgagagtggcctctagaagctgacaagacatgggaaggttgctttctggagcctcaggaggcgacagctccgttcagctccgcctgactgggtggagatagctgttcagtgagccttgctgctccagcaggctctgaagtaagtctcctactactctgaacccccagagcccccaacagtgagcagcagtcccctctagctgacttctggcaatgacttcctctcatctcttcatggctagagtgggtctctcttgccagtggagaatgttctagtactctgtattttgtatttcgactttagcatgttatgggcctatgacccaacaaccaggtcatccttgccagggcagaaggaccccctctgctctttcccctttccctggcttccttactgtttgcatgagtgttaggccagctgcacgaagtgctgtaataatgttgagtgcttgtatccaccccacccgccataccatcctcagccctagcatctgggaactctgagtgacagctccacttgaggctgcccctttctgccctacagagcacccagcactgccatcttctccagtcttttgtgagttgcagcatcttgaccatttcttggactgtagagggtcacctggttagccagtgtggttctggagcccaggttacacgtgtctgttctcctttgcgtatatgtcttaaagaatgggggctggggtatttataaatacacctcagggagaggcagtgttagcagcgttccctccactccacttgcccggttcttctgtcctatggccttgctctgcctggctctcattctagtcagtgttaagatcttacttcctccttcccttcctcctctccttccccctatcctttcctgcctcccacttcctctcttcatttttactgtattgtggtgagatatactaagcacaagatttacccttgaacctttgcgagctgcatagttcaggggtgttaagcgtgtcccctcgtcgagcatccatcatgttgtcttcctcaggtctttttcttattttcacctcaagggtttcatgacttatcctatccagggattaagttgttcttcaatgagaaccctgacaaaggtccaaaggtgtgcatctcttgagacatctctgagtctgtttataacttcatattggttgtgaagtcaacagtttcatttcttccttcccagccttttcaagaagcccgtgctgaaggctgaacccagggcctcacactcgataggcatgttcttcctttttacactttgttttgagactggatctcactaagttgcccagcctggccttgaactcatgaagtagcacaggcaggccttgaactttcaatctttctacctcaacctcccaagtatctgtaccatcagacccttctagagtttaatgtctctcaacaactcaacaatctcaatctctttctctctctctctctctctctctctctctctctctctccttccttccctcccttcctctctctctccctctatgtgtgtatacaagtaacataacaagtgaaactatgtaaaatcttcattgacaatactagctgcccaaattaaaaagtggaatctcaattgttaagataactgttatgagggatgtgatagcacgcctttagtcccagcacttagggtgaagaggcaagtggctctctgagtttcaggctacctgctctacagagcgagttctaggctagcctgggccctgttttacaaaaaaaaaaaaaaagttatttcccctgaattggggtgtgaattctatgggttccttcctcccccacctcaggagcttttattttatgacagtggttctaaacctgtgagtctgaccccttagtcacagggatgacctaagacttatcagaaagcagacatttaattacaattcataccaatagcaaaattagttatgaaggagcaatgaaaataattttatggttggggggtcactgagacatgaggaactgtattaaagagtcgcagcattaggaaggttgagaaccactgttttatagagattaatcaacctaaatttttttaattgcataggatctagaatgactaattttgaaggagagagacttattttaagacttatcaaaattctacagaaatcaagaaaataatatcaggccatggaaagcacaaaatcctgaaatagacttgagttaattgatttttgacaagacttgggctaatttagaaggcaagagagccttctcggcaaactgctctgaggcagtgggataacgaattctgaaatgtatgttgacatttgatgtcagatctaattggagcagagaattcttctgcactcccttgtctccccaataagaggatttgtggataatcactttagaggcactcagtccctccctgtctgctgtttgtatagcttcagtgggtcaacaagggtgcctaactgttcaggggcaaagagtattccctcctcaggacttaagtcaacaagagcaaaccacaggctgtaactcagttagttggtagagaatgtctcacatgcccaaatccctgactttgatcccaagtaccacaaaacaaaacaaaacaaaacaaaacaaaacaaaacaaaacaaaacaggattggttgtgcatgcttggtaacctcagcaggtggagacaggaagatcagaagttcaaggacagcctcaagtacatagtgggttccagtcttgattgatctctataaactctgtggtctcttaagagggatggggggtggggggatataaatcacaaaaggctgtgtcaattagtcaactaggataaacaaataggaagtactatcaaagaggggaggtggtaacctttgcctgggaccatcctagagggctcttagggcaggtctcaccaggaaagctgcacttgctatcactgtctgatctaatttgccctggagtttttggagctagccttggtaagtggccaaggctggccttgaggtttcctgcttctaaagtgctgggagcctctagcttgtacttcctaccgctgtctctgtgattctcagagaccccagcatctaacattggagctgccaagtccacagtgggcaccacagacagacaaatggaccctcaaggcttctttgctcttttttttgtattggaatttgtgggtcaaagagctcagtagctcccagcaatgttcttttcgtcccttaggtagaagagggactaaggttgaaacactggagtttaactgggcaaactcactggaaactcctccctcccagcaggcgggcgagcagttgggcctcttaggttacaaacctaagttgggtgggacccacctcctcctctctccccagtgtttattgctgcagagccctgcccaaagggagctgtctaatcagctttcccaggctgagacagctcctggaaccagactgtccagtatctctcacgacctaccccttagataaacagtcctggctaaagaggttgcagctggttgcaaaggctgcactagccaggaacctctctctccaagaaggacccaggcaatgagatctgcttttcttccggcctgactcagggccttctgggagacgggggaatctactagcctggaaagatggtcacagcagaactccaggctgagtgaaacccttctccctgtccatgttcctagacttcctcctcatgaaagcctggccaggtctgtccagggcatagcccctcagtatgcttatctccgtggagttcaaccttacacatcagacactgcagcttggctatctagcacagatggccccactgcctaccatccagccatcttaagcttagacctttaactgctgccgtttgagacagcacactgtgggcgtcacatgctgctggcttaactccattaggctgcctttatttggtttgccctggactcagggccagggcttttgacttctttgaaaggcaacctgcaaacagtgggcatccctgactggttatctgggctttgcgttcatggcacatggactgtgtgattcggtgactgggagagcccactccaaggttctgttagcttagctgaggtggattaggtgtcgggtacctgggctctatacctgagggctaccagtgtggagtgagcctgccagaggctcacagctttggggaagacctgtggacccagaactcagcagacggtctcatcttggccggggtgccaagtgggtgtgctggactaagccagaggtataccaagaggaagagctgcttgctatataggaagagggagccagtgagcccctgcaagggtaccctcaccccctaaagccatcgagaggaaacctcaagtctgtccctactcttgccaggctatcagatgaccctgcatccctagaaggtacataaacccccagtggaaatttagattgcacttcagccgggaaggcaaccgggatgtggctctcattgtcaagactgagtcagtcttcttcacccagaagccttctcctcagcagttgtagagctctttccctggagccgcctccccagctccagtgtatacttttgagaatcctgtaccccggaccagtgctgttcaacaggaagtacgacatgagacacatacccaataaaagtaactctggtagctagtgaaattaatatttaaactagttttatttgggagctggaaaggtggctcagtggttaggcatgcttgctattcttgcagagggccagagtttgtgttgtattcccgcaagcatctgtaactctaggccaggagctctgaagccattggtctccactgacacgtgtactcatttacacactcacatgcacacgagcacacacacacacacacacacacttaaaatacaacaggtgtaaatattttatttatatgttctggaatattctcgacatacaatcaacatcaaattcttcttttaaaaaatgatgtatgtgtgtgttttgcctgaatgtgtgtctgtgtatcacatgtgtgcatgcctgaggaagccacaagaaggtgttggatcccctggaactagagttacacatggctgtgagctgtattgtgaatcaaacccaggtcctctgaaagaacaactgggacctttaactacagatccatttcttctgccccagtataaaagtcttaattttataaannnnnnnnnnnnnnnnnnnnnnnnnnnnnnnnnnnnnnnnnnnnnnnnnnnnnnnnnnnnnnnnnnnnnnnnnnnnnnnnnnnnnnnnnnnnnnnnnnnnnnnnnnnnnnnnnnnnnnnnnnnnnnnnnnnnnnnnnnnnnnnnnnnnnnnnnnnnnnncagcgtgttttacatgtacagcccatctcgacctgtgctggttgcattgcaagtgggcagtgtcatgtgtggacagagtcccctgtgggtaatgcaggggtacagctgtgtaacagacagtccgcacatcagccacttccatggcacactggagccggagagaggggcctgggctctgaaccagggctgcatcctcctggctcacagttgcctcctctgcctgcacaggcaaggctgtgtaaccccagcgtgagagctccctgctgacatctgactccagcctaacatagagagggcctgtcatctagaaggacaggaatgaaggcatgaatatcctgtgtccctccctgcccacttctcctagccccacattcccagtgcacagttagcgtgagtcagaatctgagacccaaaagacaaggttggagtcagagactctacaagtggtagagctggagggtaatttaagtttgttccacaaagagaaactagaacttacaaaaattggggcacagaggagaagggcagtccaaagggaaagaaagccaggaacactgagagttccaggccagtctgggctgtataatggccaggcttgctgtataagaagaccctctcacttttctcagtggtacagccacttaaatgagatcctacatcttattgtgacccgtgcacaccctggatccagagagagtcagttcagagaagcatatccctccatacccaggtgtctggttgggccttcctgtgtcctcagagctccacctcagacaccttgtggagtcattacctggaggccccaggtctggtctatgcatggtattatctatcctcagtattttgggggaaaaatcacttataaatacgcagaggatgaaattgaaaagaatattaaggaagcatttcaagacatgtggtacaaagatgtttattgtaatgctgtatataataacaagaggtgagaaacagcatacagcaatggggtgatgggtgaaatgagctgtgagccagtcagacactggaattctctgtcataatttaaaaaggcagtatgatcaggcattgtggcatatactatatacacaggtaatcttgtatttgactgggtggctagcctgagctacatagtgagaccaacagaatgttgggcgcttggagagatggttcagtggttaagagcaccactgactgctcttgtagaggtcctgagttcaattcctagcaaccacatggtggctcacagccacctgtaacaggatctgatgctctcttctggtgcgtctgaagacagtgtcagtgtactcataaacaagtctttaaaaaaaaacataacccaactggaatgttgatattgacataagaactgggcatgtagcccagaggtaaagctcttgcttagcatgaacaaaaatgctaatatagaagtatgcatctgtgtggaaaaaaatgttcaatgtgtggcacaggaggattgatgaggtcatcttagttacacgcatagcagtgtgcgtaaaaggatacatgctgcccccccccaacattagtgttggtttttaggggaactaaattaagtgactctttttcccctttaaattttcttgatcaatttttgtttcttcatttgtgttttcctgagacacaatctcgttatacagcaagaccggccctgaactctcaatgctcatggcttggcctcccgagggctgagattataagcgtgtgcggctgcatcaagcttccttcaccacagaccccacacatggctgcttttgtaatttctagtttctccacactgagcaagaacgactccggtggtacagagggaaatgcacaaaagcacaagaggggtgcagaaatcaagggttcgagcctgcgatatccatttcgaaacgtatcccagaactcccacgtacaggcttataatgctgtactccgacagttgtatttaaaggcagcaacaaggaattattaaatgttccagagctgaagttagagcattaaaacccatgagccagctttggctaaatacctatttgggaagtgaaagttgactatggtacaatcttgctctgagtggaatccacctaactcttcctatgtgggctctaaatgctccatggagattaagtaatgattatgaaagagacagtcctaaaaccatgtgttaaagctgataaatgaatggacattcatgcgtggggcaagcatgctcgcgcaggcgcacacagacacgcatgcacccggtcctgcctcatgcatcctattgccggtccctctgcccgcctcacaccatgccagccacactggctttttccagtggtttgcactaagggttcccttcctggaacgcatcttacccatagtgctctgcttcctcacctcctgggggtctttgcctgtggattggtaacatcttcctcagcaccccaaacaaaagggccatgtcttacatagatatttcaactgtcttccttcttctttatatcttccctgacaaatgaccgatttgtttattgtcggtcttcctgcaccagaatgtaaaacaccctgcgggcaaatactgctttctctaatgtcccgtgtccttagtccccgatcagcgagcatctgcagacttgggaggagtgaatggaccttagggacgagtgacagatcctcaccctgccaaggaggaacctgatccaggtcacgcagctgccatccgggctgcagccctcagcatcagccgctcacagggagggacccagccttgtctgtcctgcttccctggattcttccagttcacacagaacgtgagcccagaatagcaaagggagaaacagctgttcccgcagggtcctggaagccattccagagggctcgtccctggaaaaacagtagtgagctcagggtgggaaggaagaagcggagaaaaggggtcccaagccgcgagggccatgcaatagctcaggttctgtggttaaaataacatctgctcctggggtttcagagcagctctggaaggtgggtggtctgtctggagtatcaggtgggcctttcctccattcctggcccaggaaggtttgggatatgcaggtggctgaagtattcacccaacagacggatgcagtaggaaggcactgggcccaaaggcgcatctggaaaccccagtctggcctacaggcctgttggtctccggcccaacctcactctccggcgtctccagccccctcccctttgctgagatggtgcaggcatcctctttgatgcatggagagctctggccttctctcaagctccatgtggtttgttaatgggccgtgaaacgagggatttttttttttatcatccgtgtgagcacactggtggggtgctgatgctgctcagtgttctcaagcctgtctgtctgtctgtctgtctccccagatgcagcttctggataagtttcctattgaaggtggccagaaggatccgaagcaaaggattattccctttcttccaggtaagctccccgtggccccgtggagggctggcagggactgggagaagcctcccccagcaaggccagaagaggccgcctttggcaggggttagccacttcacaaaggatctgcaagcctcaggtttgaagaccactgtcctccatctcggttccctggccactccggaatcatttctgccagcccctggtttatactttctggggagtttctgaggctcttgaacttgttatcttcataaaaaggctctgtctgagaggatgggatgtgtgtataatcccagtactcaaaaggcaggcagaggcgggaggatgaagatttggaggccactctgaacttcatagccattcctcagcaaaacaaaacaaaactcccaagctgagcatgggcccagtgaggtggctttggtgaggatacttgccaggcgtggtggcgcatgcctttaaccccagcacttgggaggcagtggcaggcggacttctgagttcaaggccagcctggtctacaaagtgagatctaggacagcctgggctatacagagaaaccctgtcaagaaaaaaaaaaagacacttgacagcaagcctgacaacctgagtttgatgcacggtggaagtagagaaccaccttctccaagctgcactctgacctccgagggcgaccccacccccaccccatgcacatacaatacaaatgaaatagtagtttaagatctgccttaggaacatagtgggtcccagactgggctacacgagagactccttctcaaataactaagaacactgggtattcttccagagggcccaggttcaattctcagctcccacagggcagctcacaaccatctgtttcagatgtccagtaacgtccctaccctgcccccatgacatccagattctctcccagcatccttgggcttgaggcacacagatgtccatgcaaacaaaccactcatactcatgaaaaaatattggtgattcagggtttttctgtgtagccctggctgtcctggaactcgctctgtagaccaggctggcctcaaattcagagatccgcctgcctctccctcccaagtgctgggattaaaggcatgaatcaccactgtctggtgcatatgtctgtgtgtgtctgtgtgtgtgtgtgtgtgtgtgtgtgtgtgtgtgtgtgtaattttaaatatattttatatgaaatatatattatatatacacacacatatatataatgtatatataattttcttaagttaaaaagtatcataaactaaccaaacaatgcagaatcatagagagacttaagttcacctgggaaaggattgctaatcacaagaacaactgctaccccccttaaattgagcatactccccaattcttgatctcccataggcctgatgtgttgtacttccctagcacacctgtgaggtagcagagacaggatttgaacccagctcggtctagccagtcactgcaacaccgtttggaacctgtttcatgcaatcaattatgtgtattttagaaaaaaatgtctctggtaagccgtgacctgctgttactgggatgtctagagtctgagtagaggcctgtaatgtgattatagcacacttcctcatcattactgcagagagctgttcctactgagagctgtattatcgcttctcatgatgggggatgctgctagaatccagacaggttaattaagtacccttgaaaatggcagagctaggcatgaactcagggctctgccccaaaccacgaggggacactgccctctggttttctgggacctcaaggcagtagattctgctggttctcaggacagttcccttcacggaggtcttcctactagattaatgctgaccctggaccctcacaggccagccacctggatgagttgtcagttagacattagtggcccacggtcattcccttctgttgattgagagcaggtacctcacatggggagtggcctctaaaggccctctgaagggtgttcttacccgacccttacagtgggaaaagctacacatcttcagggcctcatactaggcttatagagaaggaaccggctctggggatccggagctaagagcctatatagtttgggcaagacaagaactgacctttgagagcaagtgtctcacccctgcttcctccatcggcctctgagtcacaagaccagacagcgactttgcactgagtccagggcatttagggtgtccaacatctgggtctgcaacatccttaaattcttgcaacagtttggatgctacacccacccagggcagggctgtccagctagggtgttataggtgaacgtgtcccataggaacatgaggttatcagtatcacacgagtgctggacttggccctgggacctgaagctgcctattttctcaggaaggattgggggtgggggacttctactctgtctctggccaatactacaaggaaagagtttgtcattctgccagtcatgcttaggaggggagctgactatgccgggctgaggggctagggtgagggtatcccagctacttcaaagatttttttttccacccaaggaacccttgaaatagtgagagacacgagcatttctaccataagaatgacttaaagtggagagtggtggcgcacgcctttaatcccagcacttgggagggaggcagatgcaggcagatctctgtgagtttgaggccaccctggtctacagagtgagttccaagatagccagggctacacagagaaaccctgtctcaaaaaaaaaaaaaaaaaaaaaaaaaaaaaaaaaacaccaaaaagactcaaattaggatgtgactctcactgttgtgtcactatgtgataccgagtgtgaccccatgagaagcacagagggaaagaacctgtaagctgcgtgaggaagtcagaagaggcccaaggaaggggcctgagacttgatgtggggctggagggcatggcttgagtaccaccaacttagttccatgtctcagactgcctgcattcatccttggaaacttaagctctgccagttaccagctgtagtaactttgtgcctcagtttactcatctggaaaatggggtgataatggcatctactccatgtggcagtgggaaagggaagaatggattaatgcagcccaggtgctcagaactgtggctgtcccctagcaagggtcaataaatgttagtccttattgttaccatgccccgcattgcctaggctttcccacctcgcagtcacatacataatttgatgtgacctgaagttattgtttctgttttactgactaggaactggaagctaaggcatgctgagcggtttgtataaggactcacagtctggttagccaacaccaggactcttttgtctgatcttttggtggtccttatttgagataggatctcactttgaatcctaggttagactctaattcactaggtagctcaggctggccttgaactcaaagcagtcccgtcccctcatccttctaagtgctaggactacagggatgagaccccatttctggcaaacgccagactcctttgtccctcatgctgggggaacccagctcaactgaggccccattgaagtccagttccattcttaggacttgagtgaggactcaggtcacgtgaggctcatttgcatagtgcctgcctcatggttaattcccagagaaggtggctctttaaagagaaagggagaggtacagccaggcacctttagtcccagcgctcgggaggaggcagagacaggaggatctctgcgagtaccaggccagccagggctacatagtgagaaccggtcactcaaagaatacattataaaacaagttttagaaggaggtgggtgttgtagagatggtcttgcagggacccaagttcagttctcagaacctacgtggggcagatcagtaactcgagttccaggggatccaaaacctggcctctgcagtcacctacacacagataccccaccccgtgagcataattaaaaataaaattaatctttgaagaaatttgttaatttcctgtgagggggtgggtgcatgccatggtgtgcctgtgggatcggaggaaaacgtgaactggttgtctctttctagcatgttcttcccaggtagtgaacgcagtcttggcagcaggtgccactacctccctgagtcacctcaccagaaaagtcacacacaagatacctttcaaccaccatataaacgtgaccatgcatagtagggagtgttgtcgagagaaatgggggttgaccagttccctgaaggaaacactgccttttcttagccctgctccctctgagcccacctttcattggctctgtgccttggactcctggtctttgtgcactcagtctccagggcttcagactgggctagcccctgggcagaggccactgggaaagggcctatttagtagctggatacctgttttagcttgagaggtggattcaaccgcgggcgactcgggaatgctctctcttttgtgaatttcccactgtcgcgtcacccgtctcattgtaagagtaggtcttgtgtgtgtctctgaacaccaagttgtttctcctccttaccttttgagacggtgtctgaggtcaccgctgattctcccagagttgggagggtgggtcatcctattggcaaaggcttaacaaaaccgtaagggtgcacacaccccgtgcgcttcggacggccacaaggagggctctggcagcattgtgtctcacctgggatttcatggtaaggattcatggttaggaaagctccagggaggagctcagttctagttccagagttgctggggccggggcataccaagcatttgtgctgcccgggaagggtttggagtatatatactccaagctccagtccagctacctccttctggcccacctgactgcaggctcatggctggggacttgaagggtctggctggtagctgcaaaaggagaggaactcaaagaactcgaggctttgctaacatgctcactcagctaccaggccaatggtaggaagtcctgcacaggagcaatgcatcttgggatcgggacttaggctggggatgtgtccggccaggtctggcacacctcgtgttcaggccagtctgtgggtttgcaaggtggtgagcacccagtgtgcctatgatagaatcttcatccgagagaagttggctcctgatggtacccagtgcctcttaggggacaggcaggacattatacagcagcaccaggccaggaatagggtttaggggaaggaggtccgtgagtagagccaatgatgtggtagaggcagggtttggccagtgcctgatatttgaatatcaattaaatcctgtataaaggttggaggtacatgcattgcctgtaaggctccccaagttgttttcacctgcgttaaaacctgtttgctggattctgggaatgaagagcccatggaaggaactagaaggtgtggaacccacaaacaaggggcagctctccggtacgtgtcccggggagaaatatgcacagctcaggctgagaaagggcagagtgttatttggaaacttgggcatcctgagaagggggtctgaggatggactcccctaagctgaacctccaaactgaattgtgagaatgagggagccactcctatttcctggctgacctctgtggcttgctctgagccaaggccctgtcctctctagctcttaccatgtttctgttgttgggcgggacacgtggcatatgctgcatttagatttgttcatcagtttccttatttacacacagtttaccaactactaccgtatgcctggacctgtactggccactcctcatcccttcctccagggtcactgatggctttcatccctaggttagagaaaaatcaactctgggaagaaggctcagtggcacctgccaccaaaatgagtttgaaagacccacaacgtgaggactcccccacattctgactcaggagaggcgacaccccaaaatcaccaacgagaaacggtcttgctgcaaattgcaagaggatttttattcaagagcgctctcaggcccacggtcatacaccacgcagggtagaggaccgtggcgccccgagtagctgagtaagggggtatttaaaggaagaaaccacaactcaaggaggtgggaagggcgttgttggaaaataccaaaaataccagttaagagtcacaaggaagtgcaaagttacaagtgtcaggttatctctcaagaaagtttctaagagcccctaacaatagcacatttgcattgcaggttccagtaatggtcagggtgccattctttgaattgaacccaggaagcgggtgggtggaggaatgtggctatctgttttatgattagcataccttggagcacagagtttactactctttcaagttcaatccctgggatcaatgtggtggaaggaaagcgtgggcgctcatgagcacgtgtgtgtgcacacacacacacagacatggaggaaagacagacagacagacaggcacagacacataggcagacacacacacacacagaggcttacacaccacacacacatatttaaaaagagagaagtcctcccgatcctgccccacgtggtagagcttcaccctctgattcgctgtctttccccggctaaggagcaatctcacggcctgcctcagcgaggctccgctctgtcttcccctgctgcctctgtacctgccaagtcaggcccaagaccaagcacaagtaccctcggcccctccctcagctgtcactgtcactcaagtgttaggcatatcctgtttggggtcaggtgacctggaagggcctcccacgtgccttaagcggctgaggtccttggcaccaagtaattattttgtgtgtgtgactaaactatttagtgtttttcattttgtatcattacacatgcagaactctttggggtccgagagcgccatagtccttcagttatgaacctgacaggactggctattgactttcttttataaaatacccttccctcccttctttttgaaatagggtcttgtcttagggtttctatcgctatgctaaaacaccatgaccaaaaacatcttggggaacaaagtttagcttatagctggcaggtaactgtcccatcactgagggggtcaggacaggaattcaagcaggatgggaacctcaaagcaggaagggaaacaggctgtgggaaaacactactcactagcttctaatccaggacttgttcgcctgcccccaggaccaactgcccaggggaacaattgactatacacacacaccctccacctgcctaccacatttataactgattaaaatgtccggtagacttgcctaaagaccagtcttacagaggcactttctcaattgtggtttcttctgttctgataactctagttagtgccaagttaacaaaaccaaccaggataggcctgccggagcctgtactactctgagcttgccgtgtagctaaggatgacttttcaactctttcccttcttgcctttgcctcccgagtgctgggattacagggatgcacgactgtacctggctttaacttttaattttgaaataattacatgctcatgaattgttgcaaaaataccaggcaccatactccctctctggcagttccaacaactgcggagtaggtagctttgttacattgtaaggagggtcaggccagacattctccaccaccaaattacttcccacagttttttttctttaaaattatgtgcatgtgcatgtgtgtgtgtgtgagtgtcagtctggcgtatgcatgcagtgcctccgtcagattgccctggaactagagtcagaggcagttgtgagcggcgcagcatgggtgctgggaactgaacttgggtgctgtgctctgaacggccgtgcaccttcttcagtcctgggacatcttagataaataagatactgagtatgttatcaaaagcagagtattactgttggcaccttaattgagcttgccggttgccctgagcgactgattttcgtatgaagcatatggaaatgctagtgagtgtgcatggcagctggccggggaggagggcagctgcccatgcgaagctactccacagtcaagtgccagcactgctgtttccagcaaagagctatgggaagaacttgatttgtgtgaagaaactggcttgaagcctcctaaacaaattctgtgggataaatgccaccatttcagttgccctcgatgggtttttagtttttttgtttgtttgtttgttttggtttttttttttttttggttttttgttttatttgaaataaggtccctcgatgtagtcctgattgtcctggaattcgttgtatagaccaagctggctccaaactcacagagatcctcctgcgtctgcctccccagtgatggaaattcaaggcacgtgctacatgttttattaaaaagaagcctatgtgccaggcggtggtggcgcacgcctttaatcccagctctcgggaggcagaggcaggcggatttctgagttcaaggccagcctggtctactgagtgagttccaggacagccagggctacacagagaaaccctgtcttgaaaaacaagacaaacaaacaaaaagaaatatgtgataaattgttacaatacctctgaaagaaagttcttgaattgaggtggtgcttgcatgttaacccatcactttatgaggctgaggcagacagatgatagttcaaggttagcctgaactacatatgagttcaaggccagcatggatcatgtattgagatactactagtagtcatgataatatcatttattgttattattaattattattaatagaatctgtggcctctgggttgctgaaaactggacagatctggagctgggagactaggaagtcaccttgacctcaggctttagggataggaacagcgtcgtagagaactgtgaatggatcaaggtgtggtactacaagcctgtcccagcacttaagcagcagaggcaaggggatcaagacttcaaggccaacctgggctatgaagtgagatcaagaccagcctgggctacatgtgacatggtctcaaaaaaaaaaaaaaaaaagcaaaaccaaataaacaaacaaacccacacagggtatctggtcgcaccctatttgtgagccagtttatcttactgacttcatggctaaccgtgtaaaatataacattcttgaatcagagacgtcagactttattacagcccacgtgagtggcgggggcatctttacatctgttcatcctccctccctccaagtttctgtgaggtgacaagattgtcttgagacgtcatgtgcacgtgccatgggctgcaaactaggaagggagcctagacattggagacattagggaaccctcatttttattacaggcaggaagcaaacctgttttttttttttttaaaaaccatggggggggcggggcacaggctgttatctctggaaagataatccaaaacaaaaagtctgctgcctgtttaggaggcctccacctgtggcagttagagagccagggacagtagtctccagggtatatccggctctgcttggaggggtaggcagaagtgttttttgggtacttacctcttgatgcagcctgaagtttacatggaactctctgccttgtttgaaaagactactgtggaaaacccatctcctgttgcccatcctggggctggagtctatttcctgtatatcctgagtttgctggcccaaggagcctccgggggaggaaatggtcactgcagagcagggaggagtgaatatagccactgatgtaaaaagcaaacaactgtgaccagggcccagggacctcagaagccaggcagtggagcagaaagagctgtgcttagtctgcccaggtgatgctagggtcaccttcaacttacgagctgtctgtgactctatgccagctcactttacctctggcctccagaaagccctgtggtcctgaggactgagtcagccccctcccaaggccccttgcatctcctggtgaatgagattatggagctataagatggcttgggccaccaagcaaccccataactataaacaaggtaggaaccggcagcctgaaggctgcatgctgacctctttggctcacaggatggtatttttagacagcagccgtgctcgctccttttgtactggctggacagtttacataccagttcctcaataaagaggccgtttggagccagagtgcaggagtgtgctgggtgaaccagagaccctggcttatgtctcccttacccaggagccctgtgcaacagatccggtgtttattcagcactaaaggaagcaggggggagggacaggttttagcctgaggagggctgaccctcttgcttaggtctagatgtttcccttcgtctccaccaggcactagtctaagaagcctttccccaaaggatctgggagccaggacaagcaatgactgggctctggcagggacgtgacatctaagaagtttccagaccctgctggtagcctgaaatggcaggggaaagacagacttctgtgatgaggataggacagacagtgtcttctgggaacactgaggtataaaagctgtcaacagaattacaggtctaaatcatgcacctccatacttctgggaagcgctgggtctcctcttgtaatcacagctcccactctgtatgctgaggcccgtggctcccaaagcccgctgtaagcgtaagcgtgctgctctgagcttggctgtgttcatccattcctttcctgccgcaggtatttaatcaagcacctactgtgtgccgggatcagctataggcacttacatagccaagaacaagtgccaacaggaagtttatcttctggtgggggtgtggggatggtccagaaaacaaataaatgagcaattcccaatcgtgacaggaatcaggaagaaacagaactgtgagtgaggtggcccaggtggtctgagatttgttagccaagaaaggcctctgcagaggtgacatctgaactgaggcaggcatgggtaggtcagggtccagggatgccaggctgggaagatgatccaagggggactaaggagtgtgtgtgaaaatcagcatgaagcagtggagaagggaccaggccagctgagcactgagagagttgggcagattgaggtggggccaagaaggctacccctgaagaggggtaccagctccacaggagcgtgtgaacggtgagagccctccgtgtccaggcaatgtgacaggccccagaggcttccagccccaggtccccgaggtctacgcaggcagcgatttcacagggggtctttctgctcttgaaaatgaatgtggatcgggccctaagccctgcccctactgcatctgcactttcagggccaggaagaactagccactttgtctgaattttctgtttccttcatcccttgcttagagtccccttcagaagggagtcagcctcccgagcacctgccccaggtctgtagtcctgggctgtctcccaggactcttccccaacaacgttcggttgaagcagatgcccacactctcggacagcccgggccattggacatgcaggaagtgtgctctagcctggaagcagccttgaggtgcagcccggtcacctcaaggacatgaggtcactactcatgtctgtagctccataattaagctaagccaccagccctccccttgcttgctggcaacaccatccaaagtgatgggtgtgacttcaggcccctgtcacactcatgaccttccccaccctttcagcctggaaataaataatttccttatggaagcccagcgttcttttacaaggtcaaaccgttttcctctgtgcttagagataacagttacatgccggtgtccccgggagtggtggtgtcggcaaactcacattcaaacaaagttactcggcctaggtttgatggtgtcagaggggaaactaaggcaggagaaaggagatgggcttcatggggtctgtgagagcagggatggactaagctgagcctgcaatgtcgggccacacagagtacaaggtagggaagggaagaaggctgatgacctccacagggttgagcagagcaagtccccagaggtcatgctacgggctggggatttatcccttctcgctgagatgttttaggccgagagatttctatcttgaaaggctccttcagtgtggcatgcggaaagactggaggtgactaggcaggcaagggatgaaggcggcttgggagaagccgagggaagaagacagttctcaggtgtatattacagggagcatcagttaaggaccgcaggtggggatcagggaggggtcaagggtgatgaggtcatagatcagggtcagggtcagccctggtcaaaatataaaccagcatgttacaatggccccatttcagacctaccctgtgtttaccataaagggggaagaagatggcttcctctcctctcccttctggtagccactgcctttggaacgtttgaaaggtgcttttgtgactatgttgttcagttggcagagtacttccctggcactcacaaagtcctgggtttgattccctgcactgtgtgcgctgggtgtggtggttgtgtgcccgttgtcccagcactcaggaggcagaaagatagaaacttaggctcattctcagctacatagcaagcatgaagctagcctgggtcaccctgactggacccaggcccaaagacagagccccagccttccctctcctctggcagggtctgagttggctcttagggtcccatcctaccatataaagtgactcaccattcatcccgggctgcttggcatcatcagaccctggaaacctccaatactggcatccactgaagaggcttaggctgtcaggctgcctggtccccaaaccacagatctggccgagggggcttggtatggcctgaagatggagcctgttcacctgaatgaatgtgcttccaggagacagggaggagcctgggccaggctgttacaccaggtttatctctaccatcacaggctgagtagcccagaggagaaagtcctatttgtttccctctgggacagagcacaaggtaccaggttccaccttagagagaaagagcttggaaggacttggggctcagatctgctcttaaacctggggttccttctcaatgctactactggtctgagtataaaacacgacttaaagggcgtgtgtgtgtgtgtgcgcgcgcagaaatgggcaagcactatgaagtaattcatcacggggaaacttagagtcaacatacttggggttcaaatctcatcccggactcttcctagctttatgaccctgggccagttccctgcagcatccctgcaccttcagggtggcccagcctcaaagggaagtccgcagtagaggcacagtgagcacccccaatgccgtggtgagcgtggttatgaccgtgtgctgagcctgctctctgggccagtgtcaatgcagccttctggaatcttctccaggcatggtggctcttctgagacgcagacctaggcacttgaacattggctgctcaaaatgtggttggtctcttgggcgttgtccgggagctcattagacatgcagtctccaccccagacctgctgaatcaggcctgtatcttaccaagagccgggtaagggatgagaaacacttatttaaggccctcggagcctcttggtgggctgcccacctgcattattgttaacacactcttggtgtctagctatgttcggtcccttcatgtattataaactgctcacgagcacagacagatgtagctctgagtcaaatgctcagggaagcagggcctcatgttcaacttgaagaggactacgatttggcctgtggtcctcacacatcctagagatgtttacccgcttaggagagctacatccagggagaagggttcgtgtaacagcacagccactgttcatcatagactaagcaggaggatgccgggggcctgttactctgcattctctccctcctatccaaggcagggggaaatgtggagccagggatattgatacagttttggttttagaggcttctcctgctagccagatgctgtaatcccagcacacgagagcctgaggccacaagactgaaagcattaggccagtgtgagctttatatcttcataagacctggtctcccccaccccttctccctaaaaatgtgcctgtggaaatggggaagcccagcccccaagtctccaggccctctgtgggggacgtgtaaaagtaagaacagtgttaggcttcctaccgtgtggacgccaaggattatttggcctggaggcaagtgcatctacccactgagccatcttgccagtcagtggcatgtatgagattgactcaggcctaagcattcactcatgtactgcagagagggaaggaggctgttatgggagtctggggcagtaacattaagatgagatttttttttttaaaggaatctgttttgctctaataggggcatggtagtgaatatttgtaattgcaagactctgtctcaaacaatccaccactatcacaaatcagaacttcaaaataatgaagccctggaagacatttaagaccaggaagtagctggcagcatggtggcctgcccactctcctgaccttgcacttctgggctgggttgggaatggcatcagtggatctagtaggtggtaggatcttcttgcttactgaacaagtacatatgcttgcaagatagagcgtagctgttgttcagagcctgtgcttgggggaccaggggtaacttttattgaattgactaaatggaaaaaggtctaaatggaaaagccttccaagaagctgtggatgtggggatacacacacacacacacacacacacacacatatatatatatatatcacacgcccttcctagcctgtgagtcttcatctgtagatttattatcattaaattggatgatattgggggagatatacacttattaagtagtaactgtaatcctttggcattaattttctcatatgtacaattgttatacacacacacacacacacacacacacacacacacacatataaccggcctcatgtgtcctggaagtgcttgctaccctatgaaacaactgagattatcagttgaggtttggtgtaaaacaatgggacattccttactggagggctttcttaattatgtaaaccttgtttcaagttttatcctgtgtttttagaaatatagaaattagaggctgatcggagccttcttttcagtcacgtcacatgcctacagttaattttgtctgattacatttttttaatttttattcaccacttagtggcagatccttaaattgcaggtatagtaccccacagggaatacttactaactttctgtaggaaattatataacaccacaactgctgttcctaaacacagtttcatatagattaaaaatgggggtaaaagtaacgctcagagtttaagagcactgactgctcttccagaggaccagggtccaattcccagcacccacagggcagctgaaagctctctgtaactgcagttccatgggatctgacacctttacacagatatccatgcaggaaaacaccaatgcacatgaaataaaaaaaccaaactatttaaaagaaaaagaaaccctttttacctttgtttttctgtcggatggtaaatccccaaatttccatttggggcaccaaatagaatcttgggaaatattcaattcttgtttttacttgttcattcctaaacctcgaaggggcctgtttttctgtgtctggtagcatatccgtcgacagggacatggcccctgtgcctcgtagattcccattcattaagccctcacatgaggatagtcccagcctgagaccccatgaccgtgaaatacaaggatcgacctgttagtatatgacttttttctaaaagccattaagaccaaaggactaagtgaccagtgatggaatattatgcaaaaggaaaaacatgtcagggagacaggggtcttctagccccgcctcaaatccaaccatactggcagtatgtggctgcctctgcataaggccagctttgtgcccctcttagccccctgtccccagtcactcccatttcctttgaaaggtgcagaaagcccccttgtctggagtgttttcctgcaaagagcccctactgaaagactccacacacagccaaggctctggccttcacctttgcccccaacttattctgacaaagagttcctctcttccctcctaagctttttgggagacgtggctaaggctagcaagaattgaatgaaaatataaatagaagtgtaacgcataaccaatggtgttccccaaatatctggagacatgattgtcggtcaagcagcaggcagccaccaaaccatgcaggcgtggtggctagtgtgggccattcagtcagttgagtgtctgcagggtgcttccagcatgtgaacggcacggcggcatctggtgaaaaccttgctctcggttacctagaacaccctccttgtctgctctcttggcacccatcagccacatgaccaggcgcagacagcaaagttaagccacaccacctgggcccagatcagccagtcatccgatcagccgtgtgactccgggacatctagaagctgcctctgaggttttagtctcttcagcgttggtcatgaaaactttagaagcttggtttgtagagagcaggagccaaaccttatctcatcttgtgaagtagctggggatctgggaccgatcgcctggggcggatttgttcttggctctccgaaacaatgtccttggttgtagttctcattgctgggtgaggattgagataggatttggacagagggaaaaaggccaagttggagaccctgggcaatgtaacctctaactgctccagcctgcctctcaccgactttgtgaggttggttaagtcatttctataaaccaagctttgacctaagaagtgaggctagcatgagatggcttttggaccctctcagtttttacagccaagatccatggggtcactgtggacaatgccgagacccaaactgagctctgtagtgtcagccggccccatcccaggcttcggatgcgacgtgggagaactcggaaggaactctctcctgttaggtgaaaagtgtgattctgcaggcatgatgctgcgtgcgtgtgtggaatcccagaactcaggagaccgaggcaggaagatggagagtctgaagccgtcttggagcaaaataataaaagttacaacaacaagaaagaaaggaaggaaggaaggaaggaaggaagaaagaaagaaagaaagaaagaaagaaagaaagaaagaaagaaagaaagaaagaaagaaagaaagaaagaaagaaaggtttttaatgtgttgagacaaccactcagtagtacgtgcctttttagcatgtgtgtgaggctctgaattcagtcagaggtataaaaacaaataactagtggtccttggtcttaaaggtccaggaattcaggtgttttcactctcggtggccacctgtgatcaagctgttacccatccagcttgttcttacacattcatgacccaccccaggatgttaccctagtcctccctttcctcaacgtaaatgtaccccactctgcagccaccttgagcttacttcagcttcttagatgagcctggtcactctcatcattggacttttttgatggggttcctgcctctccctggaactcgcttcctacttctcttcctagctccctctcatgtgaccccactaaagctaatctctctctctctctctctctctctctctctgtctctctctctctctctctctctctctctctctctctctctctctctcacacacacacacacacacacacacacacacacatgaacctgcagcaggtcactcagccttagaccgtcaatgtacccatctgtaaaatgggagtaactacagtatcttgtacctaactaaattataaggttatatgagctcaaataacaatcagtagaaaacatggcgtgcgcacatagcccagaccacgtctggcctgtcttcttcctatccatccttgtagaaggggtgtattatgtaggtttggaagttactgaacagaccgactgtctgggatctgtattgcagctgagccagaccccagagaagtaggccttggggtaatgctctgccccaacagagccaagcaaactcccttctggctggccgggtctagctgtggtcctgaggtttccttgcaagggaattcagaccaaacctcccaactgctcagaggctcagtagtgaacaaggccactgctgagcagggattgcggtcccctgctacagaaggcaggccattctcttgtggccctccaagcctgatgcctggccacacactgtaggccatgccacaaagagaggcagccaggaagctttggccaatatccctccacccgcttctggaggacagctccccacaggggtggagttgaggcagtagagctgaatggggccctttatcccctgctcccactgggaggccgagccactgccctccacacccaccacacccaggcccaggaggacactgtgacctcagcaccagcctctctattaagcaggctctctggccccactgtgtctgggtcctggaagatgagtcccgcccttgcgtccgagatggcagccccagtgtgaaaggaaagagtgccgtgtgtgtacatacatgagtgtgtacacgagagagaggctcatagcaggactgtgtggacacacactcattagtgtattggctgcacttcagtacaagtctgttgcctgctgctgcatgcaaggccttgtgctgagccctagagacacgtctgttagtgttgtgcttgtagtctgttctgcggcaatactacaaagagtggcccatctgagcatgaccagaagtggtgcactctgggagtgaattgactcccgcaaggtttagtctgacctacatgcatgcacacacagagacagacagatggacggacagacagaggcagagagaatatagtactagtattattctgaagctgggcatgatggtacagatttataatccaggctaattatgaggctaaggctggagaattaccaccaagttcaagctagcctaggctacataatgagtgctggcctgggctacaaagtgagaccttgtcacagcaacaacaaatcaccacagcaaaagattattctggccgctagaaagtggaaccagagacatgggctcagtgcagcatgcccagctgctggggaggctgagatggggagacattggagtccagaggtgtgaggaaagacagactggcttgaaaaataaagaagatgggaggagggatgaaggcaaggaaggaagatggacacaaaggttggctctgcaggattcacataggcactggatagcaagttagccctgcctagcatgacagcactatgtctatactctgtaatccattgtctagtggtcctactgggtggacgagaaggctgatatatagaaagcatcctgtgtccaagaacatagtggtgtgacagctgacacccagcttggtggtcctaagttgtaaagcctcttgtgcccttgagcccagttctgggagctagaaatcatcaccccacttcccaagatgccacagcccttctagccgtgcacgctgtgacaacagcaaagtgaagcagggcctcactctggagcccggcctggcctggaacccacggcagtcctcctgcctcaggggtccagtgctgtggtccagacttgtgctatcactcccagctaatgnnnnnnnnnnnnnnnnnnnntagggtttctttgtgtagccttggctgtcctggaactcactctgtaggccagggttatcctttcaatccatagtgaaacgtcaccatttcgcaagtctgtttccctgtgtgtaggaaccagggagttggacaaagggctcgcctcgcatgcataacgctctgggttgatccttgacaatacataactgggtgtagggacatgtacctgtaaccccaacatttgagaggttctcccctgtaattttctatagaggattcattgtaacctccaaagacacatgttcaagtcctaggccgtacaacctgtgaccattatgttcatttggaaaagggtctctgatgggtgattaagtgaaggacctcaagaagaaaccagggcaggctggagaaatgatggctcagtggttaagagcaccgactgctcttctgtaggtcctgagttcaaatcccagcaaccacatgttggctcacaaccacccataatgatatctgatgccctcttctggagtgtctgaagacagccacagtgtacttacatataataataaataaatctttaaaagaagaagaagaaaaggaggaagaggaggaggagaaggaagaaaccagggcaggcaagatggctcagtggttaaagacacttgcctctgagcctgatgacctgagcttgattcctggactccatgtggtccagcttctgagtatcccctgacctcccatgacctctgcaatgtgtgcatgtgcaatgtgtgtatgctcatgttcatgtgtatgtgtgt

SEQ ID NO: 74 - DNA, 3728 bp, Mus musculus
cgggcgggcaggctagcggagccggcggcgcgcgagggaaggggcgccccccaggcccacgggagcagcctgggacgcacggagccctcgtgccctccgggacagtcgcctgccccggagcctcagctgtaggcgcccggagcctcggcggcgagtagcgcgtgggacaggggtggcgtgtaactgcaggaaccggggcaaccggagaaggagccggaacccggccgggatgagaaggtgacgccgccggggggcgccactcgctttgtggggacgatgctcgcctactgcgtgcaagatgccaccgtggtggacgtggagaagcggaggagcccctctaaacactatgtatacattatcaacgtgacctggtctgactccacctcccagactatctaccggaggtacagcaagttcttcgacctgcagatgcagcttctggataagtttcctattgaaggtggccagaaggatccgaagcaaaggattattccctttcttccaggcaagatcctcttccggagaagccacatccgcgacgtggctgtgaagagactaaagcccatcgatgaatactgcagggcgcttgtccggctgccgccccacatttcacagtgtgacgaagtcttccggttctttgaggcacggcctgaggatgtcaaccctccaaaagaagactatggcagttccaagaggaaatcagtgtggttgtccagctgggctgagtctcccaagaaggacgtgacaggtgccgacaccaacgccgagcccatgatcctggaacagtacgtggtggtgtccaactataagaaacaagagaactcggagctgagcctccaggccggggaggtggtagatgtcatcgagaagaacgaaagcggctggtggtttgtgagcacatctgaagagcaaggttgggtccccgccacctacttggaggcccagaatggcacacgagacgactcggacatcaacacctccaagactggggaagtgtccaagagacgcaaggcacacctgcggcgcctggatcgccggtggaccctgggcgggatggtcaacaggcagcacagccgagaagagaagtatgtcactgtgcagccctacaccagccagagcaaagacgagatcggcttcgagaagggtgtcaccgtggaggtgattcgaaagaacctggaaggctggtggtacatcaggtacctcggcaaagagggttgggcaccagcgtcctacctgaagaaggccaaggatgacctgccgacccggaagaagaacctggcgggtccggtggagatcatagggaacattatggagatcagcaaccttctcaacaagaaggcatctggggataaggaggctccggctgaaggcgagggatccgaggcccccatcaccaagaaagagatcagcttaccgatcctctgcaacgcctccaatggcagcgccttggccattcccgagaggaccacatccaagctagcccagggctccccagctgtggccaggatcgcccctcagagggcccagatcagctccccaaatctgaggacaagacctcccccgcgcagagaatccagcctggggttccagctgccaaagccgccagagcccccttctgttgaggtagaatactacaccattgctgaattccagtcctgcatttctgacgggatcagctttcgaggcggacagaaggcagaggtcatcgacaagaactcgggtggttggtggtacgtgcagatcggggagaaggagggctgggccccagcctcatacattgacaagcgcaagaaacccaacctcagccgccgaaccagcactctgacgcggcccaaggtgccgccgcctgcgccccccagcaagcctaaggaggctgaggagaatcctgtgggtgcctgtgagagccagggctccccactgaaggttaaatacgaggaacccgagtatgacgtccctgcctttggctttgactcagagcccgagatgaatgaagagccttcaggggacagaggttcaggtgacaagcatcccgcccagccccgaaggatctcgcctgcctcttccctgcaacgggcccatttcaaggtgggtgagtcttctgaggacgtggccctggaagaggagaccatctatgagaatgagggcttcaggccatacacagaagacaccctgtctgccagaggctcctctggggacagtgactcccctgggagctcctctttgtcccttgccgtgaaaaactcccctaaatcagattcccccaaatcctcatcactcctaaagctcaaagcagagaagaatgcccaggcagaactggggaaaaaccagtccaacatctccttctcctcctctgtcaccatcagcaccacctgttcttcctcctcctcgtcgtcctccttgtccaagaacaatggtgacctgaaaccacgttctgcctcagatgcaggtatccgtgacacccctaaggttgggaccaagaaagatcctgatgtgaaggccgggctggcctcctgcgcccgagccaagccatccgtgagaccaaagccagtcctgaaccgagcggagtctcaaagccaggagaagatggatattagttccttacggcgccagctgaggcccacaggccagctccgggggggcctcaagggctctaggagtgaggactcagagctgcctccacagatggcttctgagggatccaggcgaggttctgcggacatcatccctctcacggccaccactcccccgtgtgtccccaaaaaggaatgggaagggcaaggcgccacctacgtgacgtgcagcgcctatcagaaggtccaggactcggagatcagcttccccgaaggcgccgaggtgcacgtgctggagaaggcggtaagtgggtggtggtacgtgaggtttggggagctggagggctgggctccttcccactacttggtggccgaggagaaccagcaacctgacacagctagcaaagagggagacacaggaaagagctcgcagaacgagggcaagtcagacagcctggaaaagattgagaagcgtgtgcaggcgctcaacactgtgaaccagagcaagagggccaccccacccatcccctcgaagcctcccgggggcttcggcaagacctcgggcaccgtagcggtgaagatgaggaacggggtccggcaagtggccgtcaggccccaatctgtgtttgtgtctccgccacccaaggacaacaacctgtcctgtgcccttcggaggaacgagtcgctaacggccaccgacagcctcagaggtgtccgcaggaactcctcctttagcaccgcacggtcagcagccgctgaggccaagggccgcctggccgagcgggctgccagccagggctcagaatcgcccctgctgcctacccagcgcaaaggcatccctgtctcccccgtgcgtcccaagcccatagagaagtcccagtttatccacaacaacctcaaggatgtgtacatctcgattgcagactatgagggggacgaagagacggctggcttccaggagggggtgtccatggaggtgctggagaagaaccccaatggctggtggtactgccagatcctggatgaggtgaagcccttcaagggctgggtaccctccaactaccttgagaagaagaactaatagcacagggtccttccagactcaacgtgctgccttggctgccactggatgagctgcggcacgccagacacgggccg

SEQ ID NO: 75 - DNA, 3375 bp, Mus musculus
atgctcgcctactgcgtgcaagatgccaccgtggtggacgtggagaagcggaggagcccctctaaacactatgtatacattatcaacgtgacctggtctgactccacctcccagactatctaccggaggtacagcaagttcttcgacctgcagatgcagcttctggataagtttcctattgaaggtggccagaaggatccgaagcaaaggattattccctttcttccaggcaagatcctcttccggagaagccacatccgcgacgtggctgtgaagagactaaagcccatcgatgaatactgcagggcgcttgtccggctgccgccccacatttcacagtgtgacgaagtcttccggttctttgaggcacggcctgaggatgtcaaccctccaaaagaagactatggcagttccaagaggaaatcagtgtggttgtccagctgggctgagtctcccaagaaggacgtgacaggtgccgacaccaacgccgagcccatgatcctggaacagtacgtggtggtgtccaactataagaaacaagagaactcggagctgagcctccaggccggggaggtggtagatgtcatcgagaagaacgaaagcggctggtggtttgtgagcacatctgaagagcaaggttgggtccccgccacctacttggaggcccagaatggcacacgagacgactcggacatcaacacctccaagactggggaagtgtccaagagacgcaaggcacacctgcggcgcctggatcgccggtggaccctgggcgggatggtcaacaggcagcacagccgagaagagaagtatgtcactgtgcagccctacaccagccagagcaaagacgagatcggcttcgagaagggtgtcaccgtggaggtgattcgaaagaacctggaaggctggtggtacatcaggtacctcggcaaagagggttgggcaccagcgtcctacctgaagaaggccaaggatgacctgccgacccggaagaagaacctggcgggtccggtggagatcatagggaacattatggagatcagcaaccttctcaacaagaaggcatctggggataaggaggctccggctgaaggcgagggatccgaggcccccatcaccaagaaagagatcagcttaccgatcctctgcaacgcctccaatggcagcgccttggccattcccgagaggaccacatccaagctagcccagggctccccagctgtggccaggatcgcccctcagagggcccagatcagctccccaaatctgaggacaagacctcccccgcgcagagaatccagcctggggttccagctgccaaagccgccagagcccccttctgttgaggtagaatactacaccattgctgaattccagtcctgcatttctgacgggatcagctttcgaggcggacagaaggcagaggtcatcgacaagaactcgggtggttggtggtacgtgcagatcggggagaaggagggctgggccccagcctcatacattgacaagcgcaagaaacccaacctcagccgccgaaccagcactctgacgcggcccaaggtgccgccgcctgcgccccccagcaagcctaaggaggctgaggagaatcctgtgggtgcctgtgagagccagggctccccactgaaggttaaatacgaggaacccgagtatgacgtccctgcctttggctttgactcagagcccgagatgaatgaagagccttcaggggacagaggttcaggtgacaagcatcccgcccagccccgaaggatctcgcctgcctcttccctgcaacgggcccatttcaaggtgggtgagtcttctgaggacgtggccctggaagaggagaccatctatgagaatgagggcttcaggccatacacagaagacaccctgtctgccagaggctcctctggggacagtgactcccctgggagctcctctttgtcccttgccgtgaaaaactcccctaaatcagattcccccaaatcctcatcactcctaaagctcaaagcagagaagaatgcccaggcagaactggggaaaaaccagtccaacatctccttctcctcctctgtcaccatcagcaccacctgttcttcctcctcctcgtcgtcctccttgtccaagaacaatggtgacctgaaaccacgttctgcctcagatgcaggtatccgtgacacccctaaggttgggaccaagaaagatcctgatgtgaaggccgggctggcctcctgcgcccgagccaagccatccgtgagaccaaagccagtcctgaaccgagcggagtctcaaagccaggagaagatggatattagttccttacggcgccagctgaggcccacaggccagctccgggggggcctcaagggctctaggagtgaggactcagagctgcctccacagatggcttctgagggatccaggcgaggttctgcggacatcatccctctcacggccaccactcccccgtgtgtccccaaaaaggaatgggaagggcaaggcgccacctacgtgacgtgcagcgcctatcagaaggtccaggactcggagatcagcttccccgaaggcgccgaggtgcacgtgctggagaaggcggtaagtgggtggtggtacgtgaggtttggggagctggagggctgggctccttcccactacttggtggccgaggagaaccagcaacctgacacagctagcaaagagggagacacaggaaagagctcgcagaacgagggcaagtcagacagcctggaaaagattgagaagcgtgtgcaggcgctcaacactgtgaaccagagcaagagggccaccccacccatcccctcgaagcctcccgggggcttcggcaagacctcgggcaccgtagcggtgaagatgaggaacggggtccggcaagtggccgtcaggccccaatctgtgtttgtgtctccgccacccaaggacaacaacctgtcctgtgcccttcggaggaacgagtcgctaacggccaccgacagcctcagaggtgtccgcaggaactcctcctttagcaccgcacggtcagcagccgctgaggccaagggccgcctggccgagcgggctgccagccagggctcagaatcgcccctgctgcctacccagcgcaaaggcatccctgtctcccccgtgcgtcccaagcccatagagaagtcccagtttatccacaacaacctcaaggatgtgtacatctcgattgcagactatgagggggacgaagagacggctggcttccaggagggggtgtccatggaggtgctggagaagaaccccaatggctggtggtactgccagatcctggatgaggtgaagcccttcaagggctgggtaccctccaactaccttgagaagaagaactaa

SEQ ID NO: 76 - DNA, 27827 bp, Homo sapiens
  misc_feature (17205)..(17256): "n" at positions 17205 through 17256 can be any base.
tctgggggtttgaaactgtcatcaggatctgggactctctcaccacctctctgcttgttggcaccattctctcatgatgacagcagtttcaagtacctttaagggacatcaccaaagaaagagcttctcctttaacacaagtcctaggattgtttccagctgacccagtagggtcacttgccatccataaaaccagtcacggtgggcgggagttgcaacactttggccaggccagggtccgacacctactccttccctccaggaggtggtgagcttggcctcacctaagccatggggacaaaggctggtagcaccaccagaggaagggcaaatgcacgctcgggaggaagcccccgcaggcctgcagtctacagggtcttccaccctctgctgtgtgtgcaatcactgagcaatccatggatgccagagagggactcgggtgatagaaaatccatccatggctgggcgcgctggctcacacctatagtcccagcacgttgggaggccgaggcgggcggatcacgaggtcaggagatcgagaccatcccggctaacacggtgaaaccccgtctctactaaaaatacaaaaaattagccgggcgtggtggcgggcacctgtagtcccagctactcgggaggctgaggcaggagaatggcgtgaacccgggaggcggagtttgcagtgagtggagatcgcgccactgcactccagcctgggcgacagagcgagactccgtctaaaaaaaaaaaaaaagaaaaaatccatccatgcaactcagctgaaggatgcaggaccccaggagtccaggctcagagaactgactgcactctttctgggacccgggtggcaccctttcccacctggaccaaacagaacttctgtgcatctggggttggattcttccctccacccctcccagcccagcagcctagcctgcagcttccgtgaaggaggggaacggcggactgtgctgagcacaggatatgtgcagcttgagtcagctcggcccccgccgagcaggtcagcaggctagatcaataaataaataaacgccctgtgtgttttccgcctccctctgcaccagctgggcaggccgcggacggcatgtggtattttcccaaagagatagcgactgcagcagcatattaaccatgacacgaggccacagctggctcaggcactcaaccaggggcggaaatgtaaccaaaacaggagagccctctcctctccttgctgggctcccttgagacacacatccatttttctccatttcagctgccagagcagataacactgggggtgggagctgttctagctctgtgggacaccctgccagagtgcagcgatgagcaacccgccctgccgagcccaggccctccagggctactgtgggagggacgcagctgggggcagctctcagggaggagggtgaggccataaggatggtcccacagtttcaggggtcgggggaccgcagagagtgtggtagaagacatcccagtcacacgaatgaaagttgaagcttcgagcatggttggattcaaagacttgaacatgattaataaaaagtgaagatcagctgccggcaaggtaatgaaaattgtgcaccgtgtccgcagtagtgatttcagcctgaaaccctccactgccaaagttcagcttctccctgaactctccacctgcaagagctagtaaggagccacagacagcttaacctcctctgtgtgagcaaggtggctcccacccagccttcaggtcttgctcatttactgcatattgactgatttgctaaacattccaagcaccatgcccagtgctgaagacacaggaatgaacaagacagacaaagccctgccttcctggagctcatattccagcagaggaaacagacacacactgaacgaaacacaataaataagccaaatacatgtcgtgttacaaggtaattcctagtatgggtggggggcaataaaccgggataaggggcatgagaatgccatgcatggaagtactgtataaggtggtcaaggaaggtgaactcgaagcacagattgaagcaggtgaggctgagtgtgtggcgctgaggagtttcagagggatcgagatctaccctttgtcctgtgttctgttgctgcttgcacagggctgtccagggctaggtcagggccagggggggtgcccagaaatctctgaaggaaatcctccctccgacgggcaagggcatcacggggattacggcatcccaagcctcttggtgtcctcttctgaccccagcttccttttgtccccacagaggagaagtacacagtcatctacccgtacacagctcgggaccaggatgaaatgaacctggagagaggggctgtggtggaggtcatccagaaaaacctggaaggctggtggaagatcaggtaccagccgctgccccccacggttgctgggtgggtttggggtcacgctgggtgggtttggggtcacagggactctggcctcacagaggtcggtaagtgattgcatctgggcgaagtttccgcctgaaccataaaaggatacttctcctctgtgttgtgtggcctccctccctacccatatccttccctaaaagtccatgataagcaaaactttctccaaacacactgaaccacagatagcagcaaccccattaagcaaggctagtttccacctccagatgtttctcataatgaggagttggaggccaaagctgccccatgtgagtgacagccccctcccgccccattctgagaacaagatggtgcataaacactcatggactgtaattcatcctaggctgataatctgccctcgtctctcaaagtccaatggtaaaagcagggcgtctgcattccaaacacctttcacagccctttcacctatgtgatgatatcagagcctcccaggcaggcagggtggccagctcgtcctgccttgcctggttttagtaatgaaagtcctgggaacccctccttgatcacccccaataggcaggatgtgaccatgggaaattagggcaagagaggaagccgaggtccctgcaatctagtgtctgcgctgtgatgtgtggcgggacattcgggccatttccaggaggctgagcatgtagcactgcattcattcattcattcaacaaacgcacaccaagaatctctgttgggcccagccctgttctgggagctgaggagtcaacagtgagcaagatacaatagctcacaccacctggtacagaagacaaactcataaacggtgatagagcagagggttggccatgttggagggatgcatggggactttggtacacagaagaggggctcctcagcctgggggtcaggaaggcttcctgagggagatctcagaacctaaatttgaagacggataatgatagtaatagtgtattagtctattttcatgctgccgataaagatataccccagactgggaagaaaaagaggtttaactggatttacagttccacatggctggggaggcctcagaatcatggcgggaggtgaaaagcatttcttacatagcatcggcaagagaaaatgaggaagaagcaaaagtggaaacccctgataaatccatcagatcttgtgagacttattcactatcacgagaatagcatgggaaagactggcccccatgattcagttacctccgcctgagtccctcccacaacatgtgggaattctgggagatacaattcaagtcaagatgtcgatggggacacagccaaaccatatcaaatagcaggcatgggcctggcacggtggctcatgcctgtaatcccagtacttgaggaggtaaggcaggaggatcacttgaggccaggaattcaagaccagcccgggcaacatagcatgatcccatctctacataaaaatcttttaaattagccaggcatggtgatgcacgcctgtagtcccagctacccaggaggctgaggcaggaggatcactcgagcccaagagtttgaggctgcgatgagctatgatggtgccactccagcctaggcagcacaacaagaccctgtctctaaaatttaaagacattagtttttttaaactttttaaaaaaggataacaaacatatattgaatagtatgttatcttgctgcataataaattgtcccaaaagttagtggctctggaattcagcagtggcttaattagactcaaggtctctcccgaggttatagttaggatgtcagtaagggctgcagtcatctcaagatctgactgatgctagaaagtgacagtcaggatttcagcccattcccttctcaccccagagcccagtcagcactgcacatcgcctcccatcttatggctctgtgtccccaaacaatgaactatgtcaaactgagcgtgtgggttatatacagcctggcactttctaattaggatattccctctcagagcatattttaagattgatagacactaaactgcagatttctacctccttttaaatttgcttccagtcaagagagaccttttttttttgcattaaaacccaatgctatttagttcttaaattaattcttgacaagagattcagccctgccattgggtctgttcaactttccccaaaggtctggccacctgtttttttgggttctggtaaatgtttaacaaccagctctccaaggaaaaatactctgagttacagtgtttgccagttgccatggtgcaaatactgccaccatggtcaatttcaagctatcagtgtgatgtcactaaatgtagagattgggagagatgtgcccaactggctgtcacagctggtgtgactgactgcagcacacccctggtctagattggcccctctggtcattgctgttaaactgaattctggccaagcgtggtggctcacacctgtaatcccaacactttgggaggccgagacaggaagatcacttgagtctaggagctcaagaccagcctgagcaacatagcaacaccccatctctacaagaaataataaatagctgggcatggtggtgtgtacctgtaattccagctacgtaggagactgagttgggagaatcgcttgagcccaggagttcaaggctgcagtgagctatgatcgaaccactgcactctggcctgggtgacagggagaccctatctcaaaaactgaatgtctcctgcagaggattaagagatgatgacactcattgaagtcccttttgggaggacactgagctgctctgtcagggtctcgatcactctgcggtttagtgatggccagctgccacttggcgagccctggacccagccctcaacctgctaatcccatatgaaagcatgtttaatctccacgttcatcagcgtgaacagatctccatctgtctatgccaggctttggccccagagctggggctgctgggaagaggcagcaaagcacagagattcagagcccaggctggtgccctgctggctgggtgggacatggtgggtgctgtaagaggggcaagtagaggccgggttggaaaggccttgaaaataccaagctcagggcttaggcatcatcaagaggaaatgcacagtgtgtgccaacctcttgccctgggcagtcacaacccgtcgttcctgctccctgggacctgtcatgtgattcccagtaggagcaaggcttcttcccttgggcctggcggagcagtttgacagcatccttcctcctcttcacaggtaccagggcaaagaaggctgggcccccgcctcctacctaaagaagaacagtggggagcccttgcccccgaagccaggccctggctcaccctcccacccgggtgcccttgacttggatggtgtttcccggcagcagaacgcggtgggcagggagaaggagctgctcagcagccagagggacgggcggtttgaaggccgcccggtgcccgacggtgacgccaagcagagtgagtgacacccgcccaagctcctgataatcagggcccctgtgtgccagctctgtgctcaaggcgtctcacatcgtccctcatcctcacagcagcccagctgctcccccatcctccagataagaaaacagaggcccagaaaccccgggtaacttattccagatcattcagcccgtgaattgcagaatctgagtcaagaggcattgctggccgggcacagtggctcacacctgtaatcccagcactttgggaggccgaggcgggccgatcacctgaggtcaggagttcaagaccagcctggccaacatggtgaaaccccgtctctactaaaaatacaaaaattagccaggcgtggtggcagctgcctgaaatcccagctacttgggaggctgagataggagaatcgcttgaacccgggaggcagaggttgcagtgagccaagatgcaccattgcactcgcgctccagcctgggcgacaagagtgaaactccatttaaaaaaagaaaaaaaaaggggaggcgttgctttcccatcccaggttgcattctttctgctatctcacagtggtcacactggctactctttttcaagcacctgctacatgccagaaaccttctaattagtctaatcgactcctcataactacctttgagggaattactactttttctgttttacagattgggagtctgaagggtgagagggtgtgcccaaggcccccagctagtagacggcaggggcggggacttgaacctggggagtgctgtgctctctattgctccatgtggcctcgtttctaagccagaggaagaagatggccttgtgggctctactccaacacagtgcctctcccatcttgcttttcaaagcctcctcgtgtatattttaccatttaatgttcccaacacacctgagagtagagttcattactgttgtcggcctggtcacactggctaccataccatgtctgcatgggcacgctggtgcccaggacttacgcacagtgcccatgatcctgtcttggccgtgcagggcaggtgaactctgttgagaaaggacttccagctacccacagagatgaggccactgcccctggcggggcttctccagctgtttttaagtggcagtgaacttcttgagtccgtcaaccaagtttcgtactttgctcagctgccctgagaagtcactgatcatgttttctcacatgctgtggcaggggttctggccatccccgagtttgtgtgattctaatctgtcaatcatggccaagaggttagatgtattcccattaactctagaggagcaaatgaaaatctgcagcctcaatgtctttgttagtatataggttcaggctgggcacagtggctcacgactgtaatcccagtgctttgggaggctgaggctggaggatcacttgaggccaggagtttgagaccagcctgggcaacatagtgagacccccctatctacaaaaaaaaattttttttaattagctgggcgtggtggcacacacctgtagtcccagctactagggtggctgaggcgggaggatcacttgaacccaggagattgaggctacagtgagctgtgattgctccactgcattccagcctgggcaatagagcgagaccctgtccctcaaaaataaatagatagatagatagatagatagatagatagatagatacatagatagatacatagatagattcagatgctaaaacaaagacacccccctaccaccactgaatatacacatatacacacatccaataaacgatctagatatgtatttctttctcacaaaacagtctgtgtatatgttcagggttaatatggcagctccaggcaatcaagagtcttattactccacatctatcttgttgccctcatccctcggtccagaacggctcactactagtccagccaatgaaaagcagtgcattgcactccagcctgggtgacaagagcgaaactccatttaaaaaaaaaaaggcgttgctttcccatcccaggttgcattccttctgctatctcacagtggtcacactggctactgtgtacacagctcagaagccacacactttctactttgtcttacatcccactgccagaactgagtcacgtggcaatacctggctgcaagggtgactggaaaatgaagtctatatagacagctaagtgtcttggccaatactctgttgctatttattctaacagaagacaggtaaatgggaatttaagggattagcagtctcctccgcaccccaacgccaaactacccttctgtatggacccgtgctgaacctggccaacattctgcctttagccaggagccttggaccactgcaaagtcctcatcctcctggccctgagacccagagccagggcagctgcctcgagagtataaacccctgagtcatcggcccaagtgtgtttggttcagtgtgtttgtgtattgttgcgtttgggttgttctagagcacaaaaccaggtgcagataacattcactgcatgcctgccacatgccaagagcttcacagatgtttcctttcatcctcaccgctgccctgggtgacacacattatgccagttctacagatgagggccttgtggctcagagaatccaatcatctgtccaatgccagcagctgtgagcctcagagctggattgggacccatctctgtgttattctgaagactttgctttttgccctttctggagaatttccatgacttgaggatccagcaccatcccctttcattcctgtgtagaaaagatgcaagaaaagctacgtcgagagagtcctgagccaactatgagccacgcgtgagcagctccttcctgcccaggctgttctcacagggagggttgcagcagcatgcagacgcctgtgttcaatcttctgcaggagaaaatagacccgacctggcacccagctcaggaatctcatctgtagcacaagatgtaataagctctcatttctccataggatcaccaaagatgaggcagagaccccctcctcgccgggacatgaccattgtaagtggatcctcgctactggggagtggccactgacttgagggctgtgaggggtgtccactagcccctcacacacccctcgcccttccagaaatgctctctttcctgtccacacaacagccttgtgaagcaggctgtagaaatgctagtcccactcgcaggtggaaagacggaggtgcaggcaggtgaaacagtttgcccgcggggccagagtgctcctgtgacagttgggcctcaggacctgccttctgctccctgggcccttctcttggtcttagatcagtcttctcaggcgacttgaggcccaagctgagatgagacacaaatatcatctgtggtcccattctgatattctgcgctcataatccattatgtaaaattctctaggtacctttttagccaatactttgaacccaatgggttgttgttgggttttggggttttttttatttgtttgcattggtttttgagacggggtcttgctcttttggggttgtatttttttaatgtctgctatttatcaagcacctgttgcgtgccatgcagcgtgccgattgcctcacaacattaactaatttaatacttgaagcaaccccaccaggtagacactgttatgcccactctgcaggagagaaaactgaggctccagaagggggtgatttgcccaaggacactcccaccatcagtgtttccaacccagatagatctactaataaacttaagctccctccacaaccctcactgcctcttatttcagagaatattgtcttgctccaaattctcatgattgtacccaaatgtcccgtgtttcttcccatcaccctaaagctgatgggccagtgaggtctcaccgaggagtgacaaactgcgtggtcctatttgtgttgtcccttagaatccaactaggtccccagcacccccttaagggtgattgcatgccccaggcccttagactccccctgacacagggtcgcaggagtgcacttagccttggagataaccctgtgtgtgatcgtaccagcctcgaggcctcaacctgccgaagccgcccatcccgccccaagtggaggaagagtattacaccatcgccgaattccagacaaccatcccagacggcatcagcttccaggcaggcctgaaggtcgaggtgagtggccctggtgttcctttgcctacttgtgattcctgattccaggcatcacctcctacttctcccctgtcacctcctacttcactgggtgggtggaggtggggcggagattaacagctttatggttcacataccatacagtttacaattttaagtgtaaaattcagcggcttatgatattcacagggttgcacaaccctcaccactgtctaattccagaacaaaaagaaactccttacccatcaacagccaccctccatttcccctcaacttgccagcccctaggcagccaccaatccactttctgtccccatagatgtgcctgttttagacatttcatatagatgaaatcccacagtatgtggtcttgtgtgactggctgtatgcctttctttaccacctcccacctccgttcttgcttctcctctctccttttcttcccactctctctgtttgtctactttgttccccagattctcttcctgcatttctctttcctttcctcatggggttagagcttcaagatatttctttctcatatttgcaagaaaacctgtaagtaaggggatggcagctagggccagggtttggaaacctttggcaaagatggttcttgagacactttcaaaagcaggtgagccaatcacaggtatcaccaaattcactctgtcatgtgtaagagttggtcagaccctccccacctcaccttgggaggccaaggttcaatttattcatctctgcaacaaataaaatgctcctggatctcctactatggttgtgtgtggcggctgcttttctaggccctgaagagttgtcgtcaccatcctctttcctttaaagaacacagctctggtccctggcacagagcactgtctgatggcacagggcagtagacaccattgatcagttcactccagcatacctctttagggcccctcccttccttcctggctatattccaggaaggactatagcctgcctgcctgcacgccttcattccttccttccctccttccttcccttcttccttccctccttctttccttccctccctccttccttcctccttcctccttcctttgttttccttcccttcttcctttcctccctcctttccctccttctctctttcctccctccttcctccttctttctttctctccctccttccttcctttcctccatcctccttcctgcctttcttccatcctcctccttccttttcccttactccagcttgccagcagctccaccaggcacaacatctggcccaggccttgctgtgtactacagtcgagaggctagttctgcatcctctggcccctgcttccagaggcattgaagtatcttcatgtttcactagaaggaaatccttttgtgttttcactttgctattatctgagtgaagggctaaagggatgagatttgggaaaattctgaattgtgttttaatccattatagaaaaatctgccccttcatactctttcattgtatacacatgtattgagtgcctccttttttttttttttttttttttttttttgacagagcctcgctcctctgttgcccaggctggagtgcaatggctcaatctcagctcactgcaacctccgcctcccaggttcaagtgattctcctgcctcagcctctctagtaactgggattacaggcgcccaacatgacgcccggctgatttttgtatttttagtagaaacagggttttgccatgttggccaggctggtctcgaactcctgacctcaggtgatctgcccacctcggcctcccaaagttctggcattacaggcgtgagccactgcacctggctagatgttgttttcttatgatagatccatatgctctgtttttctcttctccagttttgcttcctggctcattgcaacattatcttagccttcaaaattcattaatggaaccacagcattctagcagtagggctaccagtaacaccttagttacttgtctaggctgtttatcttcaggatgtgttatgataatgatgatgatgatgatgatgatgatataggcacctcttctgtgtcaggtaccttacctccttgataactgatcttcacagaagtcccaagaggtcaaaataccagcatcatagggttggttggttagtttgtttttcttttttttttttctatcagcatgttttatagatgagactcaggggggttaggtaaattatttgcctctagtaacacagctagtaagcaatggagttgtgaaaccaggtctttctggttttaaagcccacactcttttctttcccctcattcttgtgatctttttttttttctttgagacggaatcttgctctgtcacccaggctagagtgtaatggcatgatcttggctcgctgcaacctccacgtcctaggttcagacaattctcttgcctcagcctcccaagtagctgggattacaggcgcctgccatcacacctggctaatttttttttgtatttttagtagagacggggtttcaccgtgttggccaggctagtctcgaactcctgacctcaggtgatccgcccgcctaagcctcccaaagcggtggaattgcaggcgtgagccaccgcacccggcttctgatcttgcatttgcttttattcctagtagttcttggcttccctctagtaaatgaaaacgcccattcctcatggttcagaacacacatgttcagagcttctaccacaatactttgcaaagagtgtaagcttgacaaatcttactgatacatctaatattgattaccctattttcagttcctcacatacagacttaagtattagtgttgttgaattcatggatgtgctgacgatgactcgtatgcccagtgtggcctgtaatttttaccagagctatcaagcgttgataagatgccagtcatcctcacataaacagcttacatttatcagtggcctttcctggagattccagtgggactcattaagtgctgcctgtcaagtgcatcccgctggctcagtgacctccactctaatttaatcgcagcagcattatttaccaagtgctgttgtatgcattagctcttgcggctgcaaaaattctacaagtgggtgttaaattgttcttaccattttccttctgtgatgtggaatctgaggcacgtggcttgccccaggccactcaggcagtaagtggcagagccaagactagaacccaggactgcaggcccaggagcccagcatttgcgtcctggcgctgagtctgtggctgccatccctctcccagaagggccacaaagtgcccgcagccatctttgctccttctgcaatttcttaccccggacacagcccttctccaagcagggtctttttttttttcgagacagagtcttgctctgtcgcccaggctggagtgcaatggcacgatctcggctcactgcaacctctgcctcccaggttcaagcgtttctcctgcctcagcctcccgcgtagctgggattacaggcgcatgccaccacacccagctaattttttgtatttttcgtagacgcagggtttcaccatgttggccaggctggtctcaaactcctgacccaggtgatccgcccgccttggcctcccaaagtgctgggattacaggtgtgagccaccgcgcccggccaggggtttcttttctgagaggcaagattaggtgactctgaagcccaccccgctgcctttgactctcctccgatcgacggcccttctacaggacccgctgtgtgttcctcagctctcctgaggctccgttctgcatgcgtaaaatgaggtgacagttccccactcacagggtgtcatgagcgttcatcagatcttccgagtccagagagagcctaccagggaattgcagtgtacatctgtgatggctgccataacaaaataccagactgggtggcttaaacaactgcagtttattgtctcacagtttgggaagccagaagttcaagatcaaggtgtcagcaggtttggtttctcctgtgtcctctctccctggcttccatatggacaccttcttgctgtttctcacgtggtcatccctcagtccctgtgtgttttctaatctcctcttcttatttggacatcagtcatattgaactagggcccatgtattaggccattcctgcattgctataaagaaatacctggctgggcacggtgactcatgcctataatcccagcactttgggaggccgagatgggcagatcacgaggtcaggagatcaagcccatcctggctaacacggtgaaaccccatctctactaaaaatacaaaaaaaaaaaaattagccgggcacggtggcaggcgcctgtagtcccagctacttgggaggctgaggcaggagaatggcgtgaacccaggcggcggagcctgcagtgagccgagatagtgccactgcactccagcctgggcaacagagcgagactctgtctcaaaaaaataaataaataaatacctgagactgggtaatttataaagaaaagaggtttacttgactcatagttgggcatgctgtacagaaagcatggtgccagcatctgcttgccttctggggaggctcagggagcttttactcagggcggaaggcaaagcaggagtaggcacatcacatagcaagagcaggagcaagagagagtggcaaggagacaccacacacttttaaacaaccagatcccatgggaactcattaccaagggaaggacaccaagccattcatgagggatctgcccccgtgacccaaacacctcccaccaggccccacctccatcattggggatcacatttcaacatgagacttgggtggggacatacatccaaactcagcccaccttaatgatccattttaaccttaaccacctctttaaaggccccatttccaagtacagtcacagttggaggtattgggggttagggcttcaacatacgaatttgggtagggggacacaattcagcccataatagcgagcacacctttcacctgtgtgaattcagccacgcagtgctggacaaaaaagagacagagaacaagatcttagacaacatgagtgattccacccaccattccagccaacaggcgtgtatcccacagggaagtagggacacgatgaaaatctactctactccaccagctccaggtcccctgtatataaacacgagcatctctttgagctgactgtgattcctgtgttcaaagatagatatttttcaggccaggcacagtggctcacacctgtaatcccagaactttgggaggccgaggcaggcagatcgctagagaccaggagttcgagatcagcctggccaacatggtaaaaccccatctctactaaaaatacaaaaattagccaggtgtggtggtacatgcctgtaatcccagctacttgggagactaaggcatgagaatcgcttgaacctgggaggcggaggttgcagtgagctgagatcatgccactgcacttcagcctgggtgacagagcaagactctgtctcaaaaaaaaggtaggtctctttcatgtgttgtggactctataaatgccagctaacttcttcatccgatgctcagccaaagaagccaggatcaagggtagctctgacttctgccttgtctttagaattgtagcagacgctgccggtgcctctgatccacctgaattcacctgcgcctacacacaggtccctgcaagccgacagcttcccagaaggggagaggagttaataccctgggtagggaggagctgagagtcaatagataaatgcacgcatccccagagggacccgttctgaggcactgtctttgtggtctctcagagggtccctggcagatcaagccccatggccccgagcaataacttgctcataattggcctctccctttcccttctttctctgtctacttccttacttgtatttcctaggaccaactctcaaattaagtacctatacccaaggccacatctcatggactgctttagggggagtcccatacgacaagactctccccccatgtaagatattcccggaacatggtaacatctccattggtggtccctgtagaccttgtcagaggagctgctgagtacacagtgacagcttctagagctccagttgcacatgggttctgccaaaccattccatctgctggccctggcatcgtagccaagtgcctttctctatcctcccttgcaggtgatcgagaaaaacttgagtggctggtggtacattcagattgaagataaggaagggtgggccccggccaccttcattgacaagtacaagaagacgagcaacgcgtcgagacccaactttctggctcccctgccccacgaggtgacccagctccggctgggggaagcagcagcgctggagaacaacacgggcagcgaagccacgggcccctcccggcccctgcctgacgcaccgcatggtgtcatggactcggggttgccatggtctaaagactggaagggcagtaaggatgtcctgaggaaggcatcttcagacatgtctgcgtcagcaggctacgaggagatctcagaccccgacatggaggagaagcccagcctccctccgcggaaagaatccatcatcaagtcggagggggagctgctggagcgggagcgggagcggcagaggacggagcagctccggggccccactcccaagcctccgggcgtgattttgccgatgatgccagccaaacacatccctccagcccgggacagcaggaggccagagcccaaacctgacaaaagcagactgttccagctgaaaaatgacatggggctggagtgtggccacaaggtcttggccaaggaagtgaagaagcccaacctccggcccatctccaaatccaaaactgacctgccagaggagaagccagatgccactccccagaatcccttcttgaagtccagacctcaggttaggccaaaaccagctccttcccccaaaacggagccacctcagggcgaagaccaagtcgacatctgcaacctcaggagtaagctcaggcctgccaagtgcccaagacaagtaccttgttggannnnnnnnnnnnnnnnnnnnnnnnnnnnnnnnnnnnnnnnnnnnnnnnnnnncctcccaggagaggggcctggccgcgcccaggacaggacgggcaaacaggatggtctcagcccaaaagagatttcctgcagagcccctccgaggccagccaagaccacagatcctgtgtctaagagcgtgcctgttcctctccaagaggctccccagcagagacctgtggtcccaccccgcagaccacctcccccaaagaaaacctcttcgtcatccaggccgctcccagaggtcagaggtccacagtgtgaaggccacgaaagcagggcagctcccaccccaggccgtgctctcctcgtccctccaaaagccaaaccttttctctccaactctttggggggccaggatgacacgcgaggcaaaggcagcctggggccatgggggaccggcaagattggagaaaacagggagaaagcagctgcagcctctgtccccaatgccgacggcctgaaggactctttgtatgtggccgtggccgactttgaaggagacaaagacaccagcagcttccaggaagggacagtgtttgaagtccgggagaagaacagcagtggctggtggttctgccaggtcctgagcggagccccttcctgggaagggtggattccttccaactatctcagaaagaagccgtagccgactccctttctgcctagagggcccgctggtccttgctggctttacccacgtatttaatacgcctcttaatttatcattctccacgcagcttccaaggcagacagactctggggtactgtgacttcttgcctcccatgggtggagagtgagtttcggacacctcgggcgcccctgggcctgatccctcctatcacagcatcactggaggctcagaacccacagcctttgctttctgtccatgtcagcatccctgccttaagagaactcctcctggccaatggcattgccacccagcagtgggaccaagactctccaagacctccaggactggatcccattgcctggagaaactccagcaagggtctctcatggcttggacatggcacagtaaggggcagccaacccagtccatgatgacttttgctccaacttcttcatgtttctaaaagcccagtggctttattcactcctcctaaattgcctgctaccagaaggaacttcatcctgaagaaatgcattccattaccagttccagggaaagtgtccccttccccaaagcctcaggcccgtgggcctctgaggttccactggatgcggctcccccaggagtgggcctggagatccgctcagccgccctgcctcccaccttctatcttgggaccgtggtcagccctgaagggtggttccagccccgcgtatgctgcactttgctgctgcaggctccggtccctccagggcttttcaatgagagttcccaccccaacttggagcatttcatttttgcctacctaaagcaagaatctcaaagtttgtttgaataagaggcccattcacaagtcgtgcccttgtgagcacccctttgctgagtgcctcgtgggtgccaaacactgtacttggcgctttgcattcatgctttgaccctcacaacctccctttatagatgaggaaattcacgctccatgtgcccaaggacacaccagccaggaggaagagggaagaggatttgagtccaggcctgcctgacttcagtgcctgtgccctcccctctgtaaaagacaaaccaggcagggaagagatagaagctggctaagtggtggccaagtggcttcattgtgaggggggtgagggggcattcgtggctgctcccacacccaccatccctccagcccacagcagcctataccaaaggctgccccggactcaacagctgcgtctccatgacaggagaatgccagggtcctggtggttggcacagagccctgttccctgcttctaagctgttgccccctggggaatagagcttatggagcaacgggagctgaggtggcctcgagggccagcctggagggctctgagcatagcatgcagcggtcccatagggaggcaggtaaccaagggccaggcagagctgcttcctgtgcctctccggcatttgtaatgtttttttcttttttcacgcactgccaaatctgttttctcccttgaagaaacccagggcagatgtggtcgtctgtcaaactgaggtctggagaggcatgactaaatcactgcagaagcaaaatcaggacccagcatttctagctcccagcccagagtaagagagcagagcagaaccccttcccattctacccgaccgaggcagccctgccctgccctgccccgcccctccccaccctgccctgccccagagatctccagttcacagtgttcatcaggcgagatacttttggacccacaaagccagttttttggggggatgctcagtgtctacctgcagtgccaaagttttgcttgaacagccctcttctgccgcgcctcccagctccaccccctatcaacgtgggtgctggctgcttctgcgtgaggagcttcctctgatcacctgtagcatctttagtgccttcgtccagtcggcctgcaaatcccatttcccagagaggcttgggcagggcccacttgccacttggccctgtgcccagagcgttgggggcagatggcagccaggggaagaagggaggtggggaagggccgccaccgcttgagggtcccctcccttgagaggaggccccatggcagttttcctgagttcttgatccactttggtttaaacaacttttgtgaagctatgtgagatttgactgcatttcaaaagacaaaacacatgtttttttctgatttgctctttgcctttcagcgacgctttcagatactttgtgagtgtctactctgtgctaggtgctgagtagactgggatgtgtgtggctccatccctggctggaagagctttgagtcctgtctgctgacttcactgaaggagtttctctcttgcttcattccttcctcccgggggtcagctgggtaggagcagacttgccctgccttcctctaggcagaaagttttcctgcaaatgaaagaatctgccattctcttttgctatgatgatgatgattattctgacatgacccgcgggtactgaagccacagtcctctctgttcactgttctctccttgagtcatatctatggcctgaggacgtctgtatccagctccttttcctacaatggtagacacttccccaggcagtgggtgggtcagggtggccagtcactctcctagctgtccttgcctggggacttagatttaccccatccaggactgtggtcgctattctgtgagcgattgatggcgcatatgcagaactcccctggagtcatggctctagaaagtgtccaggcccatcgtgacaatggtgccaagcaccgggctggtgaccagtgcctaaacacacacgctcccttaatccttacggcaagcctgtgaggcggataggaccagccctgatctatagtgagaaaattaaggttcagagggagaaggtccaaatagtggccaagctgggactgagatctcgagtttgggtttgtttgggttttgttgttgttgttctttccctcgtgtccatgacttttctctgccattagcagggaagtgtgcggagggcttccagggaatcaagtgaccctccctctgaatttcggtgcctcttccccccgccccttgctcacacatttcagtaggtcacaggccaaatggcagcccaaaaggtgggcagagatttttttttcttcccctcacccctgcttattaacacaattgtgacaactactttaccttacatcccagggcaaacggacagcttgcggtacctccaaaaatttggaaaaccctgagtctaagaccacctcttgataaaagaggcctttgctcacattttctgctcggaatctttctttgccattggtgggtgtatgtcgtcccagctgagactgcgggagagctgagctccagcttaaaccgcttttaatggcccttccctactgggggatcgctggagcccatgccaggttacggtagtcattttaaacctctgccacaaggccacgccatagaatcaatttccaagtcaatgttcttggccctaaaatgtttgcgcccactgaggatttcattaccaggtggaagatgggggaacatatgccacgttaaagagcaagtgctgagtgtgccaggacttgagaaggaccttaggctgaggagtggacagtctggtatttatttcgcctctcccaagtacccagcacagagtgggaaaaagaagaaactgctcctgccttccagtagctggcaacttgacatcaagaacaaaaacattcgtagctggacccccgtcctttcatcgtgcccaagtcttacatgttggcttaagctgcccccttggaggccgtacctttctctttggactgtgacagtggacacctaacagcctgagccatgtgtggctgtcttatcccccaagggttgtccaggcccgttctgcagggctgttgtgtagactgcagacatccatacctcaccacagaccaaagatgacctcgtgtcagactgtgggctgatgagaggtagagcagcatgcatcgaggcctgagggtgcagggcgccctctcttggcctggaggaattgctcctaactagagtaagtttccacgagggtcccaggcagagctgcagagctggaaccggaggctccacagtccttgcctgctcatggacctccttcagagcacctttctacagactggactgcccagctccgtggggtggcatctggtttctggtgctattctgccaagttatcgagctcctcctcatgtttcaacattccatcttcccgtttctatcctcgactccaaagtaagccttcttagctccaatcagggatgaggggctcaacctcttctgtcctcaaagaggccaaacgcagtgccacagtcggtagccttcacttttagatgtcctattcatgtaaaaaagaaggtgcccccaccaggcttacatcagcaataagcaattctaatgcaacgatggtgtccacattttaccccagtgtgtgcccatgtatgcctttgtgcccgtgtaattattgttagcgcccctttcacttagaggggtgatgataaactgtggccaccttgattacaacccacatttcctgctttggggagcttccaagtaacaggccatttcttacctccctccaggaacagtgggcactgcccaccacctcgtgtctgctcataggatgacgctggagatccccacacttactctaccctcttggcaaattggcattccggtggtggtttttgtttcctttaacacattaaataaatgagtatataggatgtgaggggaggggtgagaacaactagctgtagcatgtgtaggctatatactttaccattcgacttctttcctttttttttttaaaataaaaaaagtgcttgactggtttcaagcttcatcatgaagatgcagtgtctatggattttatttggcaggagaaagggtacatagctttgtggcctgggatcttcgggatcaaggaacagaaacctatgccagctatgtttgggaactgtggagaaataggggcgacccctctctgggccatagtgcaccttcattctcttaactacaatgtccacaaaccaagggaaagcttcctttatgtccaaaggatggtgaacctcttgccggcattgcctcctgatggtcaagagtgtgctatggaggtccaggcccagtggctcacacctgtaatcccagcactttgggaggccgaggcgggccgatcacctgaggtcaggagttcgagaccagcctggccaatatggcgaaaccccatctctactaaaaatacaaaaattcgccgggcgtggtgtcgggcgcctgtaaccccagctacttgggaggctgaggcaggagaattgtttgaacccgggaggcggaggttgcagtgagtcgagatcacgtcactgcgctccagcctgggtgacagagtgagactcggtctcaaaaaaaaaaaaaaaattgtgcggtgggggtttggggtgggaaatgcagccacatttgggccgcagagactgcccaagccatctgctcctgggaggtggagcacactgcctaacgttttactactttcccaaaggcagtgcccaagcaaaatcaaccccagtgtggagcctccttgttcccaggtgactaacaggacaccaccaccccaccttcctaaggagagaagaaaaccagcagagtccccgaacaaaagaacttggagggaagggatatacatgcaatattcatgcttctttagaggaaacaatataacaaccttcttgcagaccttgcttaggaataatggtcattaatatattaatctgtgtccccattagaaggagaaaaacagaaggtgtggtggctcacccgtaatcccagcactttgggaggccaaggcaggaggatctgttgaacccaaaagtttgagaccaggctgggcaacatagcaagacctttcctctactcaaagtttaaaaaaaaaaaaaagtagccaggtgtggtggtgcacacctacaggcccagctacttgggaggctgaagtgggaggattgcttgagcccaggagttcaaggctgcagtgagctgtgatcgcaccactatgctccagcctggatgacagagcaagactgtgtcgcaaaaaaaaaaaaaaaaagaaaggaaaaagtcatgcggtgttctgggcccccataggagcaggttcacccaagttcttgcaaaccaagagtgcttaatcataacaggactggcaatggtatgggctttgcggctggggctggaggggcatccgcctcatgggatgggacggcaatgggaccatgatcagggaccaaacctggctttctctttgcagtctacttgccctctcactacatttctgtcccgtgaccttccttcaggtctcacctggaagtgtcacactcgccattccctatcatattgttttttgttttgttttgttttttgagacagagtttcactcttgtcacccaggctggagtgcaatggcgcaatcttggctcactgcaacctccacctcccaggctcaagcgattcttgtacctcagcctcctgagtagctgggattacaggtgtgtactgccagctaacttttgtattttttatggagacagggtttcaccatgttggccaggctggtctcgaactcctgacctcaggtgatccgcccgccttggcctcccaaagtgctgggattacaggcatgagccaccgtgcccagccccgtcatactgttttaaccacgccaaacatgatccagctgcctcaccttctcatacctgcaaacactccctcatctaaggtgagtttctgagtccaagattaccatcacgggggcacgcttctccaagtccttggtcttcaatgtccattccttctctcattcagtattatttgggccacatgagattcttcggcgtcttgcaactcacgcttcctaatcaatggctctcaaattttaatgaccttaatgattcaccagggagcttgtcgaaagacagattcctcagcttcactccctaaaagtcaaactcagcaggaatcagcatcctgagaaatccattctgaggaaataatccgcatgctccaccctgagaaatggccgggctttgcaccttacctggtatagtctacatgttcaaaaattatattctgtgctattattattattaccatttatttttatttttatttttttggacaagagtctcgctctgtcgcccaagctggagcgcagcgatgcagtcatggctcactgcagcctctgcctcctgggttcaagcgattctcctgcctcagcctcctgagtagctgggattacaggcgtgggccaccatgccaagctaatttttgtatttttagtagagacagggtttcaccatgttggccaggctggtcatgaactctggtcctcaagtgatccacccaccttggcctcccaaagtgctgggattgcaggcgtgagccaccgcgcccagccaggatctaacttttactgagtacatgctaatagttgagaagtttatagatgttatctcttttaatcttcactacagttcttacagataggaaatattacatccattttatgggtgaggaaattaacagtctgagagattaatttacccatggccacagctagtaagaggatgaacttgggcatctgagccccttaccataagttcccgaatctataatcttcccacttagcatttcccaaaatgtttttcagaacaaatgtcgataggaatttggaaataagtgttctgaaggtacattagtttgagaactgctgtttaaagtctattgcaggacttcttatgtaagcataatcagcctcttacatactagtgtgcaatgtgaatgtctgagagggggtttacttacactgggtttctcaaatgtatttgactgtgataccattcacagagcatctatcaggggcaacgtttcatgtaataaactctggaaaatgtccaattttaaatttcagctctgccttgcattctacctgaaccataatgcctgtctaaccttagccacatccttcacccaaattctgtttgtaactcactgcaacagagagctgctcactgacttcaagctttcctacttgctattgctctaccttggagttgtctgtaaggattttcccatacaaattgagcatcccaaaatataaagacccaaaattgaaatactccaaaatctgaagcaatggcatgacattcaaaggaaatcctcaatgaagcactcagattacagattttttgattaggagagctcaaccggtgtgtattctgcaagtattccaaaatatgaaaaaaaattgatacccacaacacttctggtcctaagcattttggataagggaaacacaacccgcagtgagattgccacatataggaaacttcagaaaacagccaccaggcagggaatttttctatctcctaaacacgttttcctttagagacttgtaaattaatggcagtgtacagaacatacatattttattaataaggcccaggttcatcccctcttaagatccaggaggctggccgggcacagtggcttacgcctgtaatcccagcactttgggaggccgaggcgggcggatcacgaggtcaggagatccagaccatcctggctaacacagtgaaaccctgtctctactaaaaatacaaaaaattagccgggcgtggtggcgggtgcctgtagtcccatctacttgagaggctgaggcaggagaattgcttgaacccggaaggcggagcttgcagtgagccgagatcgcgccactgcactccagcctgggtgacagagcaagactccatctcaaaaaaaaaaaaaaaaaaaaaagaataacaaagatccaggaggcccagatcctacaataaactatgtcctcattcccttccagctgcgtgaaacttggcctccaatacttctacagtatagtacagaatagtgaacttcagttttcattgcatacccctcaataaaaatgttaatatgtgaccaggtgcagtggctcatgcctgtaatcccagtactttgggaggctgaggtgatcggatcacttgaggtgagaagttcgtgactagcctgaccaacatggtgaaacctcatctctactaaaaatacaaaaaaacttagctgggcatggtggcacgtgcctgtagtcccagctactcaggaggctgagtcaggagaatcatttgaaccgggaaggtggaggttgcagtgagctgagatagcaccactgcactccagcctggacaacagagcaagactccatctcaaaaaaaaaaaaaaatatatatatatatatatatatatacacacacacacacatacatatatatacgtatatgtatatatgtatatatatgtgtgtatctatacatgttaacatgtacaaaatacatggattaataaataaatgtcatgtacaatattgttacgtgggaaactcttacatacacccatgcttggtttgttcccttccatgtgaatggagctgcaatcacagtaaggctccagctctctctctccctgggaaagagtgactgatatttaggggagcaggaagcaggtatgcacagctcagcctctctcctactagggatcagatggcccagggacgcatattccactgggcccctagctgtgggaggaggcctgtgcctgggtcagtgagcgtgtcttaattcttggattcgagcttgagacaccatgactgccaggcaccacacctaagccagattctcccacggccctctcaagaataaagctaacattttgttctctatctctcggatcccactctctcagttaattctgaactcaggggaggagaacagggagctatttattaggattcttaaaaactgtctactgaggatggaagtggtggctaacacctgtaatcccaacacttcgggaggccaaggcagg

SEQ ID NO: 77 - DNA, 5504 bp, Homo sapiens
cacaaatctgtgattacctggcgggtgaaccgctccggtggcggggagagcgggctcccagcgctgggtaggggccgggttccggcgagcgccatcccggagcgtcagtttcccagtttgggaagtgaggagaacctgcctcgcccttccccgccaaggcttagggaagggactatggcagttccaagaggaaatcagggtctcgctctgttgctcaggctggattgcagtggcgtgatcatgcctcactgcagcctcgacctccctgggctcaagcaatcctcccacttcagcctccagagtggctgggaccacagtgtggctgtccagctgggctgagtcgcccaagaaggacgtgacaggtgccgacgccaccgccgagcccatgatcctggaacagtacgtggtggtgtccaactataagaagcaggagaactcggagctgagcctccaggccggggaggtggtggatgtcatcgagaagaacgagagcggctggtggttcgtgagcacttctgaggagcagggctgggtccctgccacctacctggaggcccagaatggtactcgggatgactccgacatcaacacctctaagactggagaagaggagaagtatgtcaccgtgcagccttacaccagccaaagcaaggacgagattggctttgagaagggcgtcacagtggaggtgatccggaagaatctggaaggctggtggtatatcagatacctgggcaaagagggctgggcgccagcatcctacctgaagaaggccaaggatgacctgccaacccggaagaagaacctggccggcccagtggagatcattgggaacatcatggagatcagcaacctgctgaacaagaaggcgtctggggacaaggaaactccaccagccgaaggcgagggccatgaggcccccattgccaagaaggagatcagcctgcccatcctctgcaatgcctccaatggcagtgccgtgggcgttcctgacaggactgtctccaggctggcccagggctctccagctgtggccaggattgcccctcagcgggcccagatcagctccccgaacctacggacaagacctccaccacgcagagaatccagcctggggttccaactgccaaagccaccagagcccccttctgttgaggtggagtactacaccattgccgaattccagtcgtgcatttccgatggcatcagctttcggggtggacagaaggcagaggtcattgataagaactcaggtggctggtggtacgtgcagatcggtgagaaggagggctgggcccccgcatcatacatcgataagcgcaagaagcccaacctgagccgccgcacaagcacgctgacccggcccaaggtgcccccgccagcaccccccagcaagcccaaggaggccgaggagggccctacgggggccagtgagagccaggactccccgcggaagctcaagtatgaggagcctgagtatgacatccctgcattcggctttgactcagagcctgagctgagcgaggagcccgtggaggacagagcctcaggggagaggcggcctgcccagccccaccggccctcgccggcctcttctctgcagcgggcccgcttcaaggtgggtgagtcttcagaggatgtggccctggaagaggagaccatctatgagaatgagggcttccggccatatgcagaggacaccctgtcagccagaggctcctccggggacagcgactccccaggcagctcctcgctgtccctgaccaggaaaaactcccccaaatcaggctcccccaagtcatcatcactcctaaagctcaaggcagagaagaatgcccaggcagaaatggggaagaaccactcctcagcctccttttcctcatccatcaccatcaacaccacttgctgctcctcctcttcctcctcctcctcttccttgtccaaaaccagtggcgacctgaagccccgctctgcttcggacgcaggcatccgcggcactcccaaggtcagggcaaagaaggatgctgatgcgaacgctgggctgacctcctgtccccgggccaagccatcggtccggcccaagccattcctaaaccgagcagagtcgcagagccaagagaagatggacatcagcactttacggcgccagctgagacccacaggccagctccgtggagggctcaagggctccaagagtgaggattcggagctgcccccgcagacggcctccgaggctcccagtgaggggtctaggagaagctcatccgacctcatcaccctcccagccaccactcccccatgtcccaccaagaaggaatgggaagggccagccacctcgtacatgacatgcagcgcctaccagaaggtccaggactcggagatcagcttccccgcgggcgtggaggtgcaggtgctggagaagcaggagagcgggtggtggtatgtgaggtttggggagctggagggctgggccccttcccactatttggtgctggatgagaacgagcaacctgacccctctggcaaagagctggacacagtgcccgccaagggcaggcagaacgaaggcaagtcagacagcctggagaagatcgagaggcgcgtccaagcactgaacaccgtcaaccagagcaagaaggccacgccccccatcccctccaaacctcccgggggctttggcaagacctcaggcactccagcggtgaagatgaggaacggagtgcggcaggtggcggtcaggccccagtcggtgtttgtgtccccgccacccaaggacaacaacctgtcctgcgccctgcggaggaatgagtcactcacggccactgatggcctccgaggcgtccgacggaactcctcctttagcactgctcgctccgctgccgccgaggccaagggccgcctggccgaacgggctgccagccagggttcagactcacccctactgcccgcccagcgcaacagcatccccgtgtcccctgtgcgccccaagcccatcgagaagtctcagttcatccacaataacctcaaagatgtgtacgtctctatcgcagactacgagggggatgaggagacagcaggcttccaggagggggtgtccatggaggttctggagaggaaccctaatggctggtggtactgccagatcctggatggtgtgaagcccttcaaaggctgggtgccttccaactaccttgagaaaaagaactagcagagggcctgggctcttccagcctcagtgtgcctctctggccgcccactggatgagcggtgagacgaacaaaagggaaaggaaaaaatgggggtggggggtggggggtggacaacattcaacactgcagaatgggtgacctcaaagatgccccctgtccaagccatcccacagctggaaggtaggggatgggggtgcccacactgagtgaggaagggaatggaccagggagtcccaggcctgggacccagagccaagaaagctgagatatcctgtgcaccatagggacttcaccaatggattacatgccatctgggacaggccatgtgggagaccccagttgtgcctttgctacagatctggaaaagacaaggtcatgggggcctccagtgtcctgcccctgcttggcccagttttgattgctggcatcttgccaccccaggtatccctggtattgtcctaagctgtatttgtgaattgtgctggtttcctgggcattgccacgcctaccacaggtgggtacattagaagccaccactggctttcaggcttgggggtgtcttctgagctcaagcctgcttctgggccaggccattgtcactgttagttgaagaaaaagcagttcccaggtgccagcaaagaccatctttcataactgtcactgtcttggccttgagaagagagcccgctctccgtggggcaccccatggaggacacagtaccagagtttacagagagggtgggcgaagccaccggtctcttcctaatctgcacagactattttgggtatttctgggcgggcagttcctttgcatgtttcgggagaggtttgttgatttggggcttatatgtcaggcctttggtttgcgtcttattttaggggttgtttgggggcctgggtggtcggcctcacatgggaaggagatgggtagtggatggggtttctgttgtatcttgtgggcgggtgattttgcttttgtttttgtttcacattcttccccctccacaagccaaagtcgtttcatttggtttccactgtgtggactgtgctggagcttggcgcctgccagaaaaatttggggctaggcaagccccaggttgcagacatggtgaagcagagaaactgttcttctggttcctgcacaacctcagaggggcaaaaaccctccccaggaaggaggagggtgttcaggagccagacttttggagagaaggcagctcccagcctgctgggtgaccgccattctgcgtgtgttccccagctgggcagggctggaagccttacgtatgaagcatggagaagcagccattgtccccactatgggcagaggggggacccggctggccccttgggtcagactggagccaacaccgccagccaccccctctggcctgctggcaatgccacaggtgcccaagaagatggaggatccctgtgccaggagccaacctggtcttcccgagggtcagtgccccagtgaagacagaagcgagagaataaagttccctgtaggtcctctgtcacctttgggttgtgtttttcaattgttgacatttcagaggggaccctccagaagcccagccggcttcccccaaggactcccccttcgctgggagtggatttccacacgtgcctttgatttcggacagattgggcctcacagccaccgattcagctgccagggtccctggactgggggttggtgttttctatagaggaggaaaggccctccctcaccctgctccccacccaggcagggcagcatgggacccagtgtctcagtgccttcaaaacccacccccacccctaccctaccccaccacaccccatcccagaggccttgcctgggcaaccctaagcccctgtccctcgccatacactgatgcctggcagctagagcaaatggctcgtgttctttgtcgaaggcctgtggtgagattgttttgtttccttttgttttgtgagtttgtttaaaattgaaattagttattttcttctgctggacagtattaaatagagcaggatgttgagttaatctgctagattgcagtactaatggtagtggtttagtgtcttcatgttaatattatttgtacttatttgaacaataatgataaagaagtggttcattattttttaattaatgcactttaaataaggtagaatggaaaaaacccagagagcaaagtgcattacttaaagatgcagtatatacttttctcatttttaaacagcacatatttattaagagaaaaaaagtaatttatgactatttaaaataaaatttaaaagtag

SEQ ID NO: 78 - DNA, 2823 bp, Homo sapiens
atgatcctggaacagtacgtggtggtgtccaactataagaagcaggagaactcggagctgagcctccaggccggggaggtggtggatgtcatcgagaagaacgagagcggctggtggttcgtgagcacttctgaggagcagggctgggtccctgccacctacctggaggcccagaatggtactcgggatgactccgacatcaacacctctaagactggagaagaggagaagtatgtcaccgtgcagccttacaccagccaaagcaaggacgagattggctttgagaagggcgtcacagtggaggtgatccggaagaatctggaaggctggtggtatatcagatacctgggcaaagagggctgggcgccagcatcctacctgaagaaggccaaggatgacctgccaacccggaagaagaacctggccggcccagtggagatcattgggaacatcatggagatcagcaacctgctgaacaagaaggcgtctggggacaaggaaactccaccagccgaaggcgagggccatgaggcccccattgccaagaaggagatcagcctgcccatcctctgcaatgcctccaatggcagtgccgtgggcgttcctgacaggactgtctccaggctggcccagggctctccagctgtggccaggattgcccctcagcgggcccagatcagctccccgaacctacggacaagacctccaccacgcagagaatccagcctggggttccaactgccaaagccaccagagcccccttctgttgaggtggagtactacaccattgccgaattccagtcgtgcatttccgatggcatcagctttcggggtggacagaaggcagaggtcattgataagaactcaggtggctggtggtacgtgcagatcggtgagaaggagggctgggcccccgcatcatacatcgataagcgcaagaagcccaacctgagccgccgcacaagcacgctgacccggcccaaggtgcccccgccagcaccccccagcaagcccaaggaggccgaggagggccctacgggggccagtgagagccaggactccccgcggaagctcaagtatgaggagcctgagtatgacatccctgcattcggctttgactcagagcctgagctgagcgaggagcccgtggaggacagagcctcaggggagaggcggcctgcccagccccaccggccctcgccggcctcttctctgcagcgggcccgcttcaaggtgggtgagtcttcagaggatgtggccctggaagaggagaccatctatgagaatgagggcttccggccatatgcagaggacaccctgtcagccagaggctcctccggggacagcgactccccaggcagctcctcgctgtccctgaccaggaaaaactcccccaaatcaggctcccccaagtcatcatcactcctaaagctcaaggcagagaagaatgcccaggcagaaatggggaagaaccactcctcagcctccttttcctcatccatcaccatcaacaccacttgctgctcctcctcttcctcctcctcctcttccttgtccaaaaccagtggcgacctgaagccccgctctgcttcggacgcaggcatccgcggcactcccaaggtcagggcaaagaaggatgctgatgcgaacgctgggctgacctcctgtccccgggccaagccatcggtccggcccaagccattcctaaaccgagcagagtcgcagagccaagagaagatggacatcagcactttacggcgccagctgagacccacaggccagctccgtggagggctcaagggctccaagagtgaggattcggagctgcccccgcagacggcctccgaggctcccagtgaggggtctaggagaagctcatccgacctcatcaccctcccagccaccactcccccatgtcccaccaagaaggaatgggaagggccagccacctcgtacatgacatgcagcgcctaccagaaggtccaggactcggagatcagcttccccgcgggcgtggaggtgcaggtgctggagaagcaggagagcgggtggtggtatgtgaggtttggggagctggagggctgggccccttcccactatttggtgctggatgagaacgagcaacctgacccctctggcaaagagctggacacagtgcccgccaagggcaggcagaacgaaggcaagtcagacagcctggagaagatcgagaggcgcgtccaagcactgaacaccgtcaaccagagcaagaaggccacgccccccatcccctccaaacctcccgggggctttggcaagacctcaggcactccagcggtgaagatgaggaacggagtgcggcaggtggcggtcaggccccagtcggtgtttgtgtccccgccacccaaggacaacaacctgtcctgcgccctgcggaggaatgagtcactcacggccactgatggcctccgaggcgtccgacggaactcctcctttagcactgctcgctccgctgccgccgaggccaagggccgcctggccgaacgggctgccagccagggttcagactcacccctactgcccgcccagcgcaacagcatccccgtgtcccctgtgcgccccaagcccatcgagaagtctcagttcatccacaataacctcaaagatgtgtacgtctctatcgcagactacgagggggatgaggagacagcaggcttccaggagggggtgtccatggaggttctggagaggaaccctaatggctggtggtactgccagatcctggatggtgtgaagcccttcaaaggctgggtgccttccaactaccttgagaaaaagaactag

SEQ ID NO: 79 - DNA, 24080 bp, Mus musculus
  misc_feature (8547)..(9492): "n" at positions 8547 through 9492 can be any base.
  misc_feature (20171)..(20641): "n" at positions 20171 through 20641 can be any base.
ggtggcaatcactgagtcagtgccagcctcgtaaaattgggacaagtgaggactcagaggatggaacggaagaggaatggcacccagaattgcctcccaggacctacgaggtgaagatctgtctgcctggtggcagctcatcaccattagggcactagtccttaaccactgtatgcaacaggacacgagggtacgaacggggtcagtcacagctgtggagatgcaaacagatgaccttaatgataactggccatttgccatcccagttctcagaaattgcacaagccttcgcatgcctaagccttcccaaccagttcccaaccagtacgtggacacccatttctcagactgaaactcaggctcagcggcatcgggaggcatggtgtatagccctaggtaagtcacctgagctctctgggattcatttggcttctctgggcagagggaaggtgaacaaggcttgtcagtatcaagaggttatactgtacatctgaaaagcagtcatgttggagaatgggagttggaaaagtttgaggaacatctaaaaacatactaattagcctttccaatggaggggaagcataggcaattgggaagttcacggtgacactgctttagataggaaatggacccaaaggcccgaatcccaagactgactcttgagaactgggatttttgtctacagggatcagaagggccaagggcaatagtccactctgtgactggttcttgcaaggctgtgactaagccctttcaagtctcccaaggagaaaacaaaataaaattcataatgaaaaggaggtgtagtctatcgctgaggaatgccgtgtgagagtagacaccggaatgagttatcaaagcaagtctggtattcttcctctgatggccttaggagagagacctagccgagtgtgggtggttgaaataggattctggctgaagccaaggggacgacgctacaaactccagtcttcccttttttggttcctaaaacaaacccacaagaacttccagagagtcttgttcacggacacttgccagcactgagcctgttatgtgatctgaagacagaaggcgtttgataaatgaagagattaagggactcagtgagttcacctggctgttgggaagtgttgcgagcctgtgtccctcactcacaggctctggctcacctgtctgcttatcctcagccccttcccacggactcgagagagtgagtcaaatggactaaggcttaaatattgttgtgaagctttgtcctaagcccatatgtgcatgcgcacacacacacacacacacacacacactcaaacacatacacacacatacacatgtgtgcgtgcacatacacacatgctcaaacatacacacacacacacacactcacaccacatacattcacacacatgtgcaaacacacacacacacacacacacacacacacacactcaaactcatgcacgtacaccggcacacatgacacacatatggcatacatatacatgctgtctcttgagtgcacacgcatgtccgtgcgcgcgcgcacacacacacacatccacacacagagcttccagtggagaggtgaatttgtcattatctgcaaacacagggtgatggaacacctgtgtaatagggcacagtcctctgtcaaggccttactcatctctagtgtttctgagctaacagatgtggggccaaatcaaccacgtgcggcatgtcttcagcgttccttcatgagatgcaatcagagaaagagatctaaattgcaaaaaaaaaaaaaaatattttcttcctttcaaagctcccatggctgttgcctggggaaaaaaaaacctgtttataaaaagcaaactctgggctggacctcaccaggtccctggggtaaacactgcctgtgtgcttacaagaccattgactgaaactgttcggtgactcaggaataagcctggtggtgaacccgaagagcagaaattacacatttttgtcagttgctaggagtgtgactgtgtgtctagcctgtttgcatcatcaagagaagcaagagagattgggactgatcccaaaggccccaattctccagggaacccccccttccacgctatgaaaaggagtactcagatgtggaccaccccctaatgtgaggaggaggaagagagaccatttggaaggagctttgggatttgacaggaagcaatcaggtccaatccaaagatgcgctgcctctcttctagcctcaactgggtctccttccctgccctaatctacattcacctcttgcagcctagcaaccactcagagagacagcaactagagctctcccacaatgcccgagccatggtcagtagagtcagacacatcagtctccatcttaaagatgggaaaacagagcctctgagaagagaggtgccacatctcagtacacaggctaggtaggttagatcttggtaagcctggagttcgagtgcctgggttcatagctcaatgacttccactgaattaaaacagggcgtcgagctttggcgacttggtttctgcacctttaaagtaacaagattaacggtacctacttcataaaatgagcagaacaaaaggaatcaggcaccgccagccattttggtgctccatacatacaagccattattattgttgtgttgttattattattacattcttgttttggacaggtagccaacaggtgcagtttctaacctgtttcccctttatccagttttgcaccgagggccagggttttacactgcctttccacaccatgtctctgtgtccctgatattgttcccattcaaaacctcgaaggcttaaactctttcctaagccagtggccacatgggctgttattcagtgttatggcaggcttgagggaatgtcacgcctccttacctttgtggtacatgattaagaaccatcaatagatatgggagtgaagagcctgtctcccatggaagactagggtggtgcgatggcagaaagcacacatggcctctccctgaagcaaccatcaactctaaataataccattaccaaatgacagaaggaattgggaagatgtttccggattctttgccctctgtcctttgcgttcttcccggttccttgcctgtagcaggtgggaagaagaaccagaaagaaagaaacggcctagctagggcttcaggcagatttgtccttagctgttctctgctggtggacatggcattcagtggtctctacactgactgcagagggtggtacttcagagaaagagtagcctttgctgcatgcggggggtggaggggtatctacattctctttagatgaggctcctggaggtccttgctcggcagtgtggtatctctaagggaaactgtttgacatagcatgcaggaaggccagcagaactaatgaggagttatctctgaggttctctcactgcctggaagacactgtgttcccatccagaactctactggctggaacacggagagcaatcacacttctgaactcaggtgatgggcatagtttaagaaaatgctagtaacagaaaatgtggacagatcacacaagacaagttttgttcctagggcatactgaggcaaaaatgccctatggtgggcttaaatttgctctacatctcaggcatgaaactgggcatcttcctgcctcagctttctaaatgtggaccttacaggtgtgtaccatctgtctcctaaatttccaatcactttgatagtcccaaccttttccttgaaaaagcagtcattcggtattttgatccttctgggggtgggggacaggggagggtggaacttgtatcttaattaggttactttaaacgtgtaacttggctttctgagcttagaccttgtttttcaaaggataaaatctgttttaaagtgtattacaaaaacttctacctcgagggttcccgttcttccccccaaccttccttctcagtaatggtgaattcattattcttggaagcagaaactcagaacttggagagaaataccatgaatcctcccttcctccatatctgaagaaaagctgttctgcttttatttgatgtgagctgtgcatcgcatgagctcaaaacacacagctctgaggccaatgcaacaaagtccatattctgggtctgcatcttgctgcagagacttgggcatgtcatgtcccctccctaaggcttcgcccccacatatatgaaacagaagagattagccgtgttctttcaggttggttatgagggacacagtgatgaagctagaatgataaagttgtgtctggtgcatagcattaagcaatgaaagtcatttaataagtaacaattattgcatatttaatatgcagcaatagtgtgctggcagcttcccattactgtatttaatcatcacaataacttgatggtcattccattcactttccagatgaaggaaccagggcagagcagctatgaaatgtggtgaaggtacacacagccaggagtggcaacgttgggatttgaatggaaaaccagaacccaccgtcttaaccctaacaaatggtgaccaccttggtgagattattgagatgaaaccccaaatgtctgtacttagatgttatgagacaattgctttggcagagatgccctgcctgacccttttgtgaacatgaaaccaaaagtttcgcgaattcgacattagtcggaagagaaaaaagaattatttcccacaacctggcaatataaacaggctagtaaaatagacatgggtgggtttcccagttgtaatgaccttcatttctcatgtgatcatacataatacactcaatacagaagctcaaagcaaatttggaaaggaggcgttggttttaagctcttatcaccagacttaacatctgttgaattgggcctgggttgaagtaatcgtgcaaatagttaacagccatttgcctgctcatctggttttcaaaagccaggtttagtaaagtgatctgtacgtttgacaggatgtctctctgctgccctgacgcatgctttcattttatacgggacaaagctcacactctcgttttcttattgaccgccgaggaatgtacttcattccaggattgaagccttttaggatgctcacaagaccgttgcctgtatttgctctccttggccccaatgccaggcatggaagatgatctggaaatctctacccacactggactttctcttcacaaatgtaccttgctttctcctgccccaaggcccgtcctatacctacattctccccgaaaccttctttccagagatcatacccccccacccccaatccttgcatgtccttcagatctgtgacaggtgaggtcctcagctggatattttgttttgttgggagcaaacacagccaccgtgatggtgcctttgagtgatgtgctggacaaactcggtgggattcggagctggacctgggtctaggtaccatcatatccctcagagtgtagcacatgctggaatcacggttgatcatcaagaaatagttttaagactctgcccatccactgcttgaaccagtactgatacatctctgaaatatggtcctaagggtcttgtccatattatctatgccactgggatgtcattaactttggctccacagctctgtcaggcatagcatgagctcagctaaaacccataggtcctcaagtttgtcctgagatactaggtgtggggagctatttgtcagttagcatttgtctggtttttaaaggccacgtgctttgtgccatcagaattgcagatctggtccttgcttgcgtctatggttaagggggatgctaaccttggctgcatctcccattctccaccagcagtcgcaggtgggaggaaaatgacatcacatgtgaagatatccaaacacgtttcttggcacatcaaaatgcatgtggtaaatcatttgacgtgtctcttgagtaaccatcatcctgttaacacactttgtagaacagctacgagaccgaccgaaagaaagtccaaaaccaccctgacaaggcattccttaggaccttctagccatctcccaactgcccacagtgctactttaccctcatcccaggcagcctgcatcaaaggaatctcctgggttttttttgacctcctctggaaaaagcaaatgagtctggcagcaaattgttcctgacttgatatcttttggagtgtcttattcacatgtagtgacaactctctctctctctctctctctctctctctctctctctctctctctctctctcgtcatttgtttgttgcatttttatctaaacactaacagttcaaatgctccaaagtagggaatcctggtctcaccttggtattccactcccacatctcagggttcttcctctccgtagaacagaatcacaccccctgccttcctcttacccctccttgcctccaggaaggataccatggggttgggttctcttaagacagcagcattaatatgcttggtcattccttccctggaacaggtctgcagagtcgctacattggaattctccctctccctgaaggggtctgtctgtaacagccccctctctcttgccttgtagccaccctctactaccacctcagcttcactttcctctgaaatgccaaagcaagatgaaattgatgaagtcggcgtgttcttccctaatggggtgagccaggctttctgagcaccccgcatagtgaccagggcaagggacttggatcctgaagaccgggcagcagatttgaactggaccaccaatcaccagctgcgagactttaggcaagttcttttagctttcctgaacttatctgtctaagctcgctggggctggcttgaaatatgtgctcttgattttgttccattatctacgctgactacatttaaaggtttgtactttttttttaaaggggggaggaagaaagtggggtatgggggggtaagtaaggctatcaaagactggttctcctccgatgttctggaaaggctgagagagggactggccccgggcatccttcagagcctggcctgcctcggggcagctagcctctattagcacctgcctcccctcccccatgtttagccatagctgggtccagcgaagctcttaagggtaggtgagagagttcttggaaggctcagcttccacagggttcccccccacccctctccccctttctagactccttgatggtatggaaccacttctcttacccccactgtcctcctctgcgaaggttggtagcggcaatccgccagcttcccgcgctccagtcagttctaccatcatcgggcgtcttgccctgggctggcttccctgctccccattctctccgccgcccgggagctccccctcggggcggcgcgaggcggcagcctgcggggttggcgacagcgcgggggagaggggcggctgctgcaatcctcccgcccacgtgcaccgacggcagcgaagcgccagcagtcgccagggcccgcgcctcccgcgcgggtgggtgcttcacctctggggctggtgggggacccgtaacctgagtcccaccgccgggacctctatttgcataacccgaccccccatttcttccctacccaggctggagatgagagtcgggctccccaccgaggcgtcgtcttgcctgtggtcagcgcgggggccgcgggactggccggagcgcaggcggagcgggctggcgcacgtggtaagagcaccactatttcttccttttctcccccctctcccttcgaaacagggctttgcagggtttttaagagggtgggatacccacagaggtttcgctgagcgttctctcctgtcccctttgaatttgatccccaattggaaaggagatcgcgcgcagagcacgatcgagaaactttcccagataatgcttttgggcgtttgaagtaatggcgaggaccattcccgggagaacaactttcacggttggcacgaggagaacagcgctgctcagagagcggcgacaagccggctcctggtggcactggggctcccctgaccaccgtactccaatagggcaggagccggcgcgctgcggccgcgggcatcgcaggtgatgggcgggagagcgcctgcagcgccgcgctccctccacggcgtggcgccgtggctcctgcccgctggggatcctcgctgctccgggtagcgtgggtcaagaaagagaacagcctagcccggtctgaatcccttttctgcgggactttgaagctgagaagggcagggcagtttcccagcttgcgtctgctatcccaggctacgtagatcccggagcctcgggcttgggtaccctgcagtagccagagcgcatcggaagagggctgggcgcgtggggaaggtgggaaccgagtgtccggagggccagcagttttagctctcttaaaagtttttggtcatttagcaggaagctttctcctggaagggcttgtttatttattgacttatttatttgccggggaaaacacgtgtgggggccatggctaccagaaactgtgccatttgttgtcactcagcgcagaggaagctctaagcaagggnnnnnnnnnnnnnnnnnnnnnnnnnnnnnnnnnnnnnnnnnnnnnnnnnnnnnnnnnnnnnnnnnnnnnnnnnnnnnnnnnnnnnnnnnnnnnnnnnnnnnnnnnnnnnnnnnnnnnnnnnnnnnnnnnnnnnnnnnnnnnnnnnnnnnnnnnnnnnnnnnnnnnnnnnnnnnnnnnnnnnnnnnnnnnnnnnnnnnnnnnnnnnnnnnnnnnnnnnnnnnnnnnnnnnnnnnnnnnnnnnnnnnnnnnnnnnnnnnnnnnnnnnnnnnnnnnnnnnnnnnnnnnnnnnnnnnnnnnnnnnnnnnnnnnnnnnnnnnnnnnnnnnnnnnnnnnnnnnnnnnnnnnnnnnnnnnnnnnnnnnnnnnnnnnnnnnnnnnnnnnnnnnnnnnnnnnnnnnnnnnnnnnnnnnnnnnnnnnnnnnnnnnnnnnnnnnnnnnnnnnnnnnnnnnnnnnnnnnnnnnnnnnnnnnnnnnnnnnnnnnnnnnnnnnnnnnnnnnnnnnnnnnnnnnnnnnnnnnnnnnnnnnnnnnnnnnnnnnnnnnnnnnnnnnnnnnnnnnnnnnnnnnnnnnnnnnnnnnnnnnnnnnnnnnnnnnnnnnnnnnnnnnnnnnnnnnnnnnnnnnnnnnnnnnnnnnnnnnnnnnnnnnnnnnnnnnnnnnnnnnnnnnnnnnnnnnnnnnnnnnnnnnnnnnnnnnnnnnnnnnnnnnnnnnnnnnnnnnnnnnnnnnnnnnnnnnnnnnnnnnnnnnnnnnnnnnnnnnnnnnnnnnnnnnnnnnnnnnnnnnnnnnnnnnnnnnnnnnnnnnnnnnnnnnnnnnnnnnnnnnnnnnnnnnnnnnnnnnnnnnnnnnnnnnnnnnnnnnnnnnnnnnnnnnnnnnnnnnnnnnnnnnnnnnnnnnnnnnnnnnnnnnnnnnnnnnnnnnnnnnnnnnnnnnnnnnnnnnnnnnnnnnntgctcgcgccttcttcccgctgaactctgcagtccggagtccccgctgcaggcaggggccgagagccccagacccgggtggttgtccaccggctgcaaatcgttcctggcgagctcagcggagcccgcgcagccaagcccgtatgcaaattggccatgtgacggcaaaagctgccaggcccagccctgttcctcagtccatatatgggcagcgacgtcacgggtattgaagacctgcccataaatactccgagcctaacactttccgtctgagagagcagcgattgattaatagctgggcgaggggacacactgactgttataataacactacaccagcaactcctggctccccaacagccggatcacaggcaggagagagtcagtgacggatagacttttttttttctttaagaagccaacaacttggttgctagttttatttctgttaatttttttcttttttttggtgtgtgtggatgtgttgtggtggtcttttctaagtgtggagggcaaaaggagataccatcctaggctcagttcaacccctctccaaaaaaaacggcttctctggcgctccaggtagcgagggagttgggtctccaggttgtgcgaggagcaaatgatgaccgccaaggccgtagacaaaatcccagtaactctcagtggttttatgcaccagctgcctgacagcctctacccggtggaagacctcgccgcctcgtcggtgaccatcttccccaatggtgaactgggaggcccctttgaccagatgaacggagtggcgggaggtaagccgcgtgtcttcttcggagcttgtgggtggggagcggtgggtgtgggggggcttggaggggagaatggggacttgaggtggacggcgctgaccacactggctctgaagactggaagtaggcgcagggggagcggaaaaagatagactagggctgcctggccgtgcgcgccagcagatgcacctggtcaccaaaagccacccgcatgcctgtagctccgggcgcgcccagctttggctaggcgcagggttgaagcatcatctcctggtccttgaagcaggtccatcagccggactctgcgctactgggctagggtcaaagagatgggaaagttcatcagtcgggttagagctgcgcgtctggagagctcagtgtcaggggagcgcttagggagcgcgcgggcagcgctctctgggcagagcccactcccggaggatctcccgagcgcgttgtccttctggggtggctgggaggcaccacccaacttgcgcatcgccccaaagtgaacagggttaacaagccgaggcggcggagcagggcaagtaacagcgagaagcggcaaggagaatgcctagggaggcccgcgctggcaccggtgtgcgccggttccttggcgatgctgtgtaaagtcgtcttcctcagcccccgcgccttcctagaagcgcagcctcttagtcttaggctaagacagggatgcgcgggtgtccggcttggccgaggatgttgggagggaagggaaccctagactccttcctccgctgcccgggttcacactggcagtcttcagctgaagcgcagcgggagagggagggggaggtggcaccaggaattagcttcaagaacatcacccacccacttatccattctggggttcccctctctcgcggctggcaccttctctgtaccgcctgggattgattggtcggctctttttattggtgtctgtatggttgcctcggcggtaagaccacaaggcaaaggagtgggagagaagtcagaggcagatgggaaattgtttgatattgttgctgctattgggtgtttttattgggaactagagtcacagatggccgggagatggaagcaggaaggggcatgccctgcttcttggagatacagtttttgagttccagactctgcctaacttcttactgtctctccaggcctcagtttccccacctgttgctctgtagtgttggaatcatgaaatggggattgccgtgtgtgtgtgtgtgtgtgtgtgtgtgtgtgtgtgtgtgtgtgtgtgtccgcgcgtcagcatgcgtgtatgtgaattagttcttgcctgtattctcattgtcccacctcttccctgacttttccctccccagatggcatgatcaacattgacatgactggagagaagagacccctggatctcccgtatccgagtagcttcgctcccatctctgcacctagaaaccagaccttcacttacatgggcaaattctccattgacccacagtaccctggtgccagctgctatccagaaggtatcatcaatattgtgagtgcgggcatcttgcaaggggtcacccctccagcttcaaccacagcctcctccagcgtcacctccgcctcccccaacccactggccacgggacccctgggtgtgtgtaccatgtcccagactcagcctgaactggaccacctctactctccgccaccacctcctcctccttattcgggctgtacaggagatctctaccaggatccttcagcattcttatcgccgccatccaccacttccacctcctctctggcctaccagccacctccttcctacccatcccccaagccagctatggacccaggtctcattcctatgatcccagactatcctggattttttccatctccgtgccagagagatccacacggtgctgctggcccagatcgaaagccgtttccctgtcctctggactccctgcgagtgccccctccactcacgccactctctaccatccgtaattttactctggggggtcccggtgctggagtcacgggaccaggagcaagtggaggtggtgagggacctcggctgcctggcagtgggtctgcagcagtgactgccaccccttataatccgcaccacctgccattgcggcccatcctgcgacctcgaaagtaccctaacaggcccagcaaaacgccagtgcacgaaaggccctatccctgcccagcagaaggttgtgataggaggttctcacgctctgatgagctgaccaggcacatccgaatccacacgggccacaagcccttccagtgtcggatctgcatgcgaaacttcagccgaagtgaccaccttactactcacatccgaacccacaccggggagaagccctttgcctgtgactattgtggccgcaagtttgccaggagtgacgaaaggaagcgccacaccaagatccaccttcggcagaaggaacggaagagcagtgctccctctgcacctccatctgcccagtcttcagcctctggtcctgggggctcgcaggccgggggcagcctgtgcggtaacagcgccattggaggaccactggcctcctgcacctctcgaaccaggacaccgtgagatgaagctctggctgacacaccagtttctccaggccccagaggccctctgtccgagctgccaacactaccacccttccctgttcctccccatgatcccgtgatctgggcaaaggaccttgatggagcccagctctgtcccaccttctcacggacggccttccgaaaacttaggccatttgaagggagttgactgtcactccaagaaatgggggagcaaaaagagggctgggtgagggcccctggcctacagggctgcgctctgaccctgactgagagatgtctgactatggtctgctagccctttccgttgaccctggatgccagttgttctgagactttttctacaataggttgggagttgctgattcctttgatcgaggacagcggaaaagactaaattaaagcaaaactgatgtggcactttaatggcttgggactgacttgggggtgggggtggggagttgtacagtgagcagagcctcatcctggctgctgcactctggccctagagcagtgaatggaggtttctctggccatctcaacccttaagcaatatgtcctagaaactcaagagaatggaagtgcaatgtcgggcaggacaaagcaatattggctcctttttttgttgtagttgaggaacaaagattattttttcagtgtatatccatttagattttgtgtatttttgatgtgcactgctctccgagttctgaaccttcgggaaaaaaatgtaaagcatttatgatctcttgaaatgagtcaaaggttaactaacttatttaaagggggacgtacataggatgcatgcagtgagtggtgttgcaagtgtcctctgtgccttgtgtgatgtgggcagtgttaacagggtctgcatgtgtacaggatgccttactatgggaacagaaaaatcactccttgggtttaagtatggctgtatatttctgcctattaatatttggaatttttttagaaagtatatttttgtatgctctgttttgtgacttaaaagtgttacctttgtagccaaatttcaggtgagaatgtgcttcaatgtcactgccgctgatttgtttggttattagctcttaatagttgtggagagagaaacaatctattctaacataaaaaaaccactaactggagttcagataatggatggcttattgactatggtgtaaataaatacttttcaacaatattctggttgcagagatcatttctgaagtacttactgggtggagttaaaatagttattgacatctgagaactaggaacaaacaccgctttagtgaggggttagcacaagccctccatgttcccttgctggcctgtggataacaagccctacctagctaggcttcagggatttcccgctgagttagtgaggaagccttctgactcactgttctgtcccctgtaacagcctatagcttctctctgctcctgagtgggctccggaaaataaatacttacaagcaagtgcccactcagagatgacaccccccagggctgctttcagaactctgaccacggcctggaactctgagttgtggctttgtggaaagtgtggcagcatggtcaaattagaaatgactttctgagttccaggattaatcttacaaccacaggaaactttttcaaagagctatcattccttcagatcaaacctgctcggacaccgctgatgccagctgatgccaatgaaacggcttcagcaattaccccaggactcatttctctccagtcctggcgtctcagatggttgcccatgtttggagggatcatttgtcacaagcttggtggatctagaaatgattctcaaaatagcttaagataggtagacacgaggctgtaaaactccaagacaatctaaacttactaggtaagctgcctcccccaaaacattataaaactctaaggtttcttttttactgggaacattttatcattttcttttaaactcaaaaccatctgacctacccacttgtgttatgcgcgttggcatctttactctgaaaatctggacctcaatatttataatgtccactgctccttatgcaatgtaatctgcgggtgtagccacactgctcagcctcaacagaaaacccctcccttgcttctggtccctgtaaagtccctgaggctgatggctactaatcaagggcttgcattctacagtggtggtcacatctttggcccttaacagcacaaggataagagattcaatttatggaggccactagtgcccctccccagtctccttcctttaaccccctttcatgggtatagaaacttctttccagaactcctaaatagaaatttcaaaacctttagtgtgggatggtttccttataatttcccactggactcgggctgtcaactaccaaaactattattgttacttatccaatactggcaactataaagccacaccacatcgtggtaacttttaaatacctttctcctgcaaaactttcattatttaaagatagtacacacctaaattttgtagtttttagctatctttaaaattttaattttggaccacattcaatcaagatcacccaagccaggattttaaaagcaagactaaacatcacttaaagaacaagacaaaaagaagtctccatgctaaagcacaccggttatgtgatcagttccatcctggtgtggtagcaaacctccccaacaagccataagattcagtacacctgaatggtcagagctaccctttctgcttctgtccccagttacttacatacccgatatctttaaccaactttctcagtttaaaagcattcaggccaattctcctgacatttaaaatttttgcctaagaaatcaccacagaatggtaaatttggttcttttaatccctcccctgcgtcccccaaatgtttcaggttttgtgcagagagattccttaagagattcatgccagagatggtttcatttgtataacaaacagctgatgaaacctaaatgacttcctcaagccaggatatttaatatccgtatcctaattgtttacgagaccaaggcaaatcatttcataaaagttttcaactgttggaacaattcagcatgtgtgtggaggcatgtagatagactcctaaatgctgccagtccaaatggtaaccatggaattactaagacaaaaaaaagagatgaaaacactttaagccttaagattttctttccttttaggataaaaattgactttgtttttcttgctagtttctttagattaaatacaaaagcagccttttctgttacagcaaaatagtgtaattagacagtaaatactctcagatgtattttcagtcggcttgcttcaaagaccactcacaagaaaacaaactaagtttataccacttcttggtctttgggggatctgtaggtcactggcttttgatacaatacaaccttatggaataaactgtgagttttcaacaataattaaaatagtaatagttatgtttcccttctccactttgcaataagcaacattatttctacgtaattttaaacatgcttttatttcccataagtacacacatcttactcagaaacgtaaacacccctgcactgtaagactgggtattgttaagaaatgatctcctttgacagcagaaacctcagcacaatggaccaatctgggttctgtataaccctacactctgaattcaggcctgcggtagaggagcaaacgctgtcaggagagtggcagagtgacgaagtgggggtaactgtctctctgctgggcaggacaggagagctaaagcagttgactcatttgccatcagagcaggtaggttctccccagatgtcaagttcaaggaacctacaagacaatgcaaggatcgagtggggaaggaaaggtgtacattttgacagtcatgttaaaaactcaagagaactcactcctattaacatagaaaacacattacctaaaaggcagggttttttttttgttgttgttgttttttaatgtaatcagcagcatgtggtagtaaacccatcaattctcaaaggagtaggaaggtatgaaaatcttacatcgatataactggtcactgatagaactacaaggttgaaaaggttcagtgtatttagacagacagacagacagcgtctcactcaggatctagttattgcatttattattcatcagaacagttaagtgacttaacaccattgtgctcattggtcttttctaagaaaaggagaaggtaacttttatcctaatttctagaccacaatctatattgtagacctacagggaaacacaacggcagaagttatagctaatagtttatgcatagacgtgcaaggatttttctgcacattttatcttagtaacgagcatattctttctcaagtggctcattaaaacatattacactgttttcaccgtaagtttactcagtttattagtgaaatgacagtttcactgttcctattgaactaatgaggaacacagtattgctgttttagctcagaacaatttcgttactcttttgaaaagcaccttagggtttttttccttccaaactgcttataacaaacctttaatatttctcctccttcttttgcaatgaaggccttcataataattgttattactagcccaattccaggctagacttctacaggctccatgaaaggacctccagagtatgctgtaaagtacacatgactctcaacaatccttgtaaaggaatcaacctttgctgcaattcaaaatctgtatgtggctgaaaaaccatattcattattaatattctatgaaaatagtcaaatttaaaaccatcacttcctatctagatgttcatacgagtggctcaaagagctgcttcgagaggctccaaaggcattttaaagaccatgatcagaaagaacttgaactctagcagccatggtggaagtgtttgggtgttgctcatggtttgtcaggtttaaagcaggtttccactggcctgttgttctcatttttattaaaatgaaacaaacaaacaaacaaacaaaaagccacaagccaagccagcaataatttgctgtctcgtaccactttaatgactgcaccgggaaggacaccccttcagcctggatgtgtatcctggatacatggagccaaaagcagtttgtttccctgccaggtcaacaaacatttgtcactcatgacagtaagtctccatttattgccgatattagtatattctattgccacatgagccatcaagagagcttagaagacagctgggcacatctgatttctacagtttgtctttatgaaaaggcctgtgataaaaaggaaccctacacatagtaaacaggggaaactggtggtccatggtcagaatcgatagacacgtctgtaaacatggtaaaggggctgagcctccgccagccataatactgcagcagcgctagggtttgctgcagtgttggcatagggtttagtctccaatcttggtgccctaaatggctaaattctcaagcatctattccatgtatccatttcatatgtgtgtgtgtacatacatatgtatatgtgtatatatacatattcatatgttatgtatacacacacatttatatgatggtgtcttatgcatccacggttccgctcaaattcactatgtagccaagtctgaccttgacttctgatcctcctgcctatatttcctaaatgctgtgtgctacacttggtttatgtggtactgaggattgagcccagggcttcttgcctgcttagccagcagcctacttccagagcccctcccagggtactacatgctctctacctcttcctgcaagagaaggcagtagtaggcagcactggctcttgtttaagggagtgctgggaggctatctcccggcagcacagctggaaccacacagctcctctgcaggctccctccacagagaacgcaaaaaaacaaaaacaaaaaaccaaaacagaacaaaaccaacaacaacaacaacaacaacaacaacaaacagtcaagagtatctttctcttctttcctaggaagaagctggaagtaaatacgagtatggaattcaacaggtggccagggcctttacattcagttatttggaagcatagcagattccgctcctcggaatcgtctggttagaaaacacataattattgtatcatctttgaagcacgtcaaggaaaaagtcagctgaggataataatcgtctttgctttaaaggcaaatccccaatagcaacaaaaaaatttgtttaaacgacagatcttgagacccaagggaaagacgagctttaagggcctgacaagagaattcgcgtatgtgaccttcttactaaaggttacctgagtacaccagaagtggctaccaagccaggggaggaaagacatcgtcctcaacacgcacagttatgagggtgaaccccagtgctagaaagatgtcttttcagaactcctcactttagatgctgagtagtttgtgtgtgtgttttaaccaaacgaataactaaaaaaaaaaaaaaaaaaaaaaaaaagaaaacaagaacaattcaaggtcatgcacaatcagtaataaattaaactattaaggagcaatcgtgggcaggagagaaaacaaatctgagtcaccgaagggaagagggattcaaaactacttagtgtattttgtagagaatgagaaacaaaaatggtttcattatggctttaggatggaagcgctttagggtccctgcccggttcccttaaatcaaagccttggtggcactgaggataccaggaatcaacctagccttccgcccacccgcccccataaccgtgcccggtggtggctgtactccagtgggccgtgttccccaaggttcctcaagatgtggcgctggtcactccagtaaatccatcgtccaggcgagggggcggagagaagagcccttatggaagatagagggcagccaggcctttcttgagcagggcagggtacatctttggcccacagttccccgggcggcaggagcttcaaggtaggaccttggggcctggatagggctctccctcgcaccagaagtcgtcggcctgtggtgtctccaggagccacacttctcggggaaggtcgcaggcagagccggaagcctccttgggtctgatgggctccactacacggtaatagtggcagtcccggccgtcctccgggtcgtagggtggggccaggatgtccaggaaggcagctggcccgtccacggcatcaatctggtgcaggttgtacccggtgtggagtgagcacgcagggcccannnnnnnnnnnnnnnnnnnnnnnnnnnnnnnnnnnnnnnnnnnnnnnnnnnnnnnnnnnnnnnnnnnnnnnnnnnnnnnnnnnnnnnnnnnnnnnnnnnnnnnnnnnnnnnnnnnnnnnnnnnnnnnnnnnnnnnnnnnnnnnnnnnnnnnnnnnnnnnnnnnnnnnnnnnnnnnnnnnnnnnnnnnnnnnnnnnnnnnnnnnnnnnnnnnnnnnnnnnnnnnnnnnnnnnnnnnnnnnnnnnnnnnnnnnnnnnnnnnnnnnnnnnnnnnnnnnnnnnnnnnnnnnnnnnnnnnnnnnnnnnnnnnnnnnnnnnnnnnnnnnnnnnnnnnnnnnnnnnnnnnnnnnnnnnnnnnnnnnnnnnnnnnnnnnnnnnnnnnnnnnnnnnnnnnnnnnnnnnnnnnnnnnnnnnnnnnnnnnnnnnnnnnnnnnnnnnnnnnnnnnnnnnnnnnnnnnnnnnnnnnnnnnnnnnatgttgtcgcggggcatgcttggcgcttcctgcgcggctcgcggccggcccgttccgcctctgcgccgccccttgcggtctccggcggccgccacggctacccgcgcggacccccgcgccaggcgggagacctccccgcaacaaccggccagcggggcgcgcggggccgccttgcacggtcgcccgcttagcgcgccaatggtcgggcgcttgcccgcgcgcgaaggcgagtgcgcacgcgcacggccgctacccgcactcacgctccggggcccagacaggcgctggcgcgggccgtgccaggcgctgcctcacgcgcggagctccattcacgcggcccacaccaacgactacagccgggcgcggcgggagcgccgcaaggcacgctgggatgtgtagtccgagcctgcgcttgcgcggggcacgaacgcgtcctgcggagcaggggaaaccaggatttttttaagaacttggcagaaagcgagcagcgcgttcgttttgcagagcctcagggtgtttacttgtttgataaaactgaactattattgcaagagatatagccagttaactacaactcccgccatccccgcagtcggggtgacatacttccggcagctggtggaggcttctcgccgctgggaaaaaaacggcacaagagggtcgttaaccttcttgtgccgctagggcctgctgggtcactcggggtcacctttgacccttgctccctaggaatgaggtttcggggtcaaccttagctgctcgtaggccacactgtgtgcgccgtggagatctgtggatggcgcttgtctatttttctgtttcttaggaggtgaatggggtcgggcgggtaaccaaagcggtcacccagcacagctgtgcgcagctgttgtttgcctctgggcctgatgacgctgctccttgactcactgatagcgggaagctttgagaggccatttgctacagccaagggttctgtatactagtggttatccatccgtagggcgcccgagaaacaccagttgaggggcaaggggcgttttgtcagaatagattatcgctgtcatgagtctctagagcaatgcaactatcgggctggtttatgaagttaggtcaccgcagagtgattattctctggactttttgcagacgtaggtggtggctggcaaaggaagatagtagatattatgaatttaaatcttacccttgaatttaaggtcttcttggactttcagaattaaacatgggtttataactgcagtggcccaggaaatccttttcagttaagaaggcaggcttttagtgtgtatgtgtgtgtgggttttgcatcctagccagtaagtgtggtattccaggtaccttgttaaatacattaaataatgagttttatcttagtaataccctcacagaaacttttaagacgtaggcactgactgtattattccccgcctgtacacgagagattaatttgcaggtgcgcatttggaaaagacgtaagtgcaacttaacgaaacacagtttgaattggtgtaaaaggaaccaagggacacaaggacgtagcttctgcagcttattgtggtgctcacaagctgtggctttctgcacagcgtacctttccaagtcctcagttcattcctccaaagaatgctgggtttgatgcatccagacttctgagtcattgtttctcacccaaagtccctcggtagcttaaagggcgattctagacgttataccccagggcttctgattcagtattggggtgaaggatagaattctggttgagaggtgcccactgaagtggttcgaggttcagcacccatgttggggggggtgtcactgtgagatctgtaaatggtgagccaaccccatttacattccacagtaagagcaactatttggctacgtaaatggatccttaagattacttgtgtttgagccgggcagtggtggcgcacgtctttaatcccagcactcgggaggcagaggcgggcggatttctgagttcgaggcttacagagtgagttccagggatagctagggctacacagagaaaccctgtctcaaacaaacaaacaaacaaaaagattacttgtgttttagaagctggtggtgtgccatccttaaatgcactatggaagttcatcatgtaaggaaatcccatgcagtttatttgtaaagtaaggaatatttaagagaaagttcttttgttttcacatacagatttttttgcttactggctttacttgtataaagagtagttagcaggagaaacagacaccaaagagcacagacctaagcagcatacagcctgcttgatttccacgccccccaccccctctttaatagttgtctgcagttacatgaaggaagctgtatttcatctgtcaactggaaggttagatacttatgcaaatgcccaatgatgcctttgggaacagagtaactaccacaggacaataggtattattaagatttttcagtggctacaagttaccctttagagaccaataggtttaggcactcagtgagtgctaaagcaggaatgtggactttaccggtttcagagcagagcttttcaaggttattttatttgctttgacctagtaatggctcctctcaggccctcatttttcatctgctagctgataaaagtttccagacaacctgcataggaaacactgggggtgcttgtccaaagggctcgtcccaaattacattaaaatctgcaggagaatcttttgtgtgttgaagttttggagacccagtgggtgtccgcctgtggtactttataagtcacagggccttcacagttccctttgatgctgtccttcagagctgcaccaaggaaggaggataactgagcctagtgggtttgcccaccagaagggctttgctcggcttttctgtcccactgttagtagcacagctgggcaggagactgtattcatggcctttaaaaatagtctttatttttcatttctccgtcttgcggtatgcagagtgaaaaccaaaggaagggtagaaaaaaaagaaatggtaacaaaagtcaggaaaatgcatggcagggaacaagtttgggatatgtggaatatattgtcaataaatagtatctagtggttacaaaacttagtgtttggaggctcaacaaggaacaaggagagacaaggtgttgtttcccaaggaatttactagcaactgtgcccatctctaagagcatacaatgaacatgcaatacccaaatccatacatccatgatagctggaaagtcctttgggaggtacatagattgatgtgtagtcccatgatgtcatcggtggtgttataagaagatagcgactgagtttgcatgcttgtctttctcactatgtgacactacacttatctcgctaagacatagcatactaccctccgccatgttacgctatagcatgaagggcattgc

SEQ ID NO: 80 - DNA, 2862 bp, Mus musculus
agcgattgattaatagctgggcgaggggacacactgactgttataataacactacaccagcaactcctggctccccaacagccggatcacaggcaggagagagtcagtgacggatagactttttttttctttaagaagccaacaacttggttgctagttttatttctgttaatttttttcttttttttggtgtgtgtggatgtgttgtggtggtcttttctaagtgtggagggcaaaaggagataccatcctaggctcagttcaacccctctccaaaaaaaacggcttctctggcgctccagctgcctgacagcctctacccggtggaagacctcgccgcctcgtcggtgaccatcttccccaatggtgaactgggaggcccctttgaccagatgaacggagtggcgggagatggcatgatcaacattgacatgactggagagaagagacccctggatctcccgtatccgagtagcttcgctcccatctctgcacctagaaaccagaccttcacctacatgggcaaattctccattgacccacagtaccctggtgccagctgctatccagaaggtatcatcaatattgtgagtgcgggcatcttgcaaggggtcacccctccagcttcaaccacagcctcctccagcgtcacctccgcctcccccaacccactggccacgggacccctgggtgtgtgtaccatgtcccagactcagcctgaactggaccacctctactctccgccaccacctcctcctccttattcgggctgtacaggagatctctaccaggatccttcagcattcttatcgccgccatccaccacttccacctcctctctggcctaccagccacctccttcctacccatcccccaagccagctatggacccaggtctcattcctatgatcccagactatcctggattttttccatctccgtgccagagagatccacacggtgctgctggcccagatcgaaagccgtttccctgtcctctggactccctgcgagtgccccctccactcacgccactctctaccatccgtaattttactctggggggtcccggtgctggagtcacgggaccaggagcaagtggaggtggtgagggacctcggctgcctggcagtgggtctgcagcagtgactgccaccccttataatccgcaccacctgccattgcggcccatcctgcgacctcgaaagtaccctaacaggcccagcaaaacgccagtgcacgaaaggccctatccctgcccagcagaaggttgtgataggaggttctcacgctctgatgagctgaccaggcacatccgaatccacacgggccacaagcccttccagtgtcggatctgcatgcgaaacttcagccgaagtgaccaccttactactcacatccgaacccacaccggggagaagccctttgcctgtgactattgtggccgcaagtttgccaggagtgacgaaaggaagcgccacaccaagatccaccttcggcagaaggaacggaagagcagtgctccctctgcacctccatctgcccagtcttcagcctctggtcctgggggctcgcaggccgggggcagcctgtgcggtaacagcgccattggaggaccactggcctcctgcacctctcgaaccaggacaccgtgagatgaagctctggctgacacaccagtttctccaggccccagaggccctctgtccgagctgccaacactaccacccttccctgttcctccccatgatcccgtgatctgggcaaaggaccttgatggagcccagctctgtcccaccttctcacggacggccttccgaaaacttaggccatttgaagggagttgactgtcactccaagaaatgggggagcaaaaagagggctgggtgagggcccctggcctacagggctgcgctctgaccctgactgagagatgtctgactatggtctgctagccctttccgttgaccctggatgccagttgttctgagactttttctacaataggttgggagttgctgattcctttgatcgaggacagcggaaaagactaaattaaagcaaaactgatgtggcactttaatggcttgggactgacttgggggtgggggtggggagttgtacagtgagcagagcctcatcctggctgctgcactctggccctagagcagtgaatggaggtttctctggccatctcaacccttaagcaatatgtcctagaaactcaagagaatggaagtgcaatgtcgggcaggacaaagcaatattggctcctttttttgttgtagttgaggaacaaagattattttttcagtgtatatccatttagattttgtgtatttttgatgtgcactgctctccgagttctgaaccttcgggaaaaaaatgtaaagcatttatgatctcttgaaatgagtcaaaggttaactaacttatttaaagggggacgtacataggatgcatgcagtgagtggtgttgcaagtgtcctctgtgccttgtgtgatgtgggcagtgttaacagggtctgcatgtgtacaggatgccttactatgggaacagaaaaatcactccttgggtttaagtatggctgtatatttctgcctattaatatttggaatttttttagaaagtatatttttgtatgctctgttttgtgacttaaaagtgttacctttgtagccaaatttcaggtgagaatgtgcttcaatgtcactgccgctgatttgtttggttattagctcttaatagttgtggagagagaaacaatctattctaacataaaaaaaccactaactggagttcagataatggatggcttattgactatggtgtaaataaatacttttcaacaataaaaaaaa

SEQ ID NO: 81 - DNA, 1413 bp, Mus musculus
atgatgaccgccaaggccgtagacaaaatcccagtaactctcagtggttttatgcaccagctgcctgacagcctctacccggtggaagacctcgccgcctcgtcggtgaccatcttccccaatggtgaactgggaggcccctttgaccagatgaacggagtggcgggagatggcatgatcaacattgacatgactggagagaagagacccctggatctcccgtatccgagtagcttcgctcccatctctgcacctagaaaccagaccttcacctacatgggcaaattctccattgacccacagtaccctggtgccagctgctatccagaaggtatcatcaatattgtgagtgcgggcatcttgcaaggggtcacccctccagcttcaaccacagcctcctccagcgtcacctccgcctcccccaacccactggccacgggacccctgggtgtgtgtaccatgtcccagactcagcctgaactggaccacctctactctccgccaccacctcctcctccttattcgggctgtacaggagatctctaccaggatccttcagcattcttatcgccgccatccaccacttccacctcctctctggcctaccagccacctccttcctacccatcccccaagccagctatggacccaggtctcattcctatgatcccagactatcctggattttttccatctccgtgccagagagatccacacggtgctgctggcccagatcgaaagccgtttccctgtcctctggactccctgcgagtgccccctccactcacgccactctctaccatccgtaattttactctggggggtcccggtgctggagtcacgggaccaggagcaagtggaggtggtgagggacctcggctgcctggcagtgggtctgcagcagtgactgccaccccttataatccgcaccacctgccattgcggcccatcctgcgacctcgaaagtaccctaacaggcccagcaaaacgccagtgcacgaaaggccctatccctgcccagcagaaggttgtgataggaggttctcacgctctgatgagctgaccaggcacatccgaatccacacgggccacaagcccttccagtgtcggatctgcatgcgaaacttcagccgaagtgaccaccttactactcacatccgaacccacaccggggagaagccctttgcctgtgactattgtggccgcaagtttgccaggagtgacgaaaggaagcgccacaccaagatccaccttcggcagaaggaacggaagagcagtgctccctctgcacctccatctgcccagtcttcagcctctggtcctgggggctcgcaggccgggggcagcctgtgcggtaacagcgccattggaggaccactggcctcctgcacctctcgaaccaggacaccgtga

SEQ ID NO: 82 - DNA, 24370 bp, Homo sapiens
attccaagcatctagcataatacctagcatatagtaggtgcttaataaatatttgctgaatggataaaggaacactatgagctagtctgggcatttggaagtgagagaagttaccctctggttcacctacctgcttatccacagcccctggctcagcataatgtgggctgagcctctaagttagagcagtggccttcaaatcccagggaatttggacaagctgtctgttattagtcagggttctctagaggacagaactaatggaatagataaatatataaaggggagtttattaagtattatctcacacaatcacaaggtcccacaataggctgtctgcaggctgaggagcaaggatagccagtctgagttccaaagctgagtctgatgttctagggcaggaagcatccagcatgggagaaagatgtatgttgggagactaggccagtctctcttttcacatttttctgcctgcttatattttagctgcgctggcagctgattagactgtgcccacccagattaagggtgggtctgcctttcccagcccactgactcaaatgttaatctcctttggcaacaccctcacagacacgcccaggatcaatactttgtattcttccatccaatcaagttgacactcagtattaaccatcacagtgtctcagtcctcttcatcaggaatttgcacagtggggaaggagtcaagtccactcaggttccactacagccacccacccatcttttacctaatatttatacatattgggcttccagatactagtttctatttgtctggtaacagtccactctacttgctattctgtgagagcaatctgtgattttaaaaagcctgaaacacaggaaaagtgaggaataagctcccttgttaaagcaccttccatctctaggatttctgagtaacaggtgagaggacgaaaatggtcactttggacatgtttttggtgccgcttgtttcatgaaattcaaataaagggaagaaaggctgtaataaattgttccagttttcctctttttgaagtgttcatgggttgttgtctgaataatcgtattttaaaaaagcaatctgtctaattccaaaaggctgggggttgccaggtctctggggagactctcttttgagcatacaaggccattgattgaaattgttctgttagtagtgagcacactggcaccacaacagcccttagagggaagcacacaatctagttaattatgaggatgcgagaaggagtatgaccatgtgtctgggcctgctattagtatcaggagaagcagacccaccaaggcctagttccaaaggccccaagactccaagggacatttccccactcccctatctccacatgagaaggaaaacacagatatggaccactctgcactgtgaggagaggaaaagaggccactttaaagggccttaggattggtcagcaagcaaacaagtcacaagtgagttcaatggttgatgccttgtcctggaatcataaacttggcctcccaacctaccccaatctatattcagccctgcctctgaaggcccagcaacccaaacaattgccctgggagacaacaattatatttgcagtattgtcctgcttttcagaatgtggtcttccttggatgtctcgcaatgctctggccaatggcacttagggcaggaatacccagtctcattttcaagatgaagaaacagaggctcagagatgctaagtcacttgtctagttacaccggttagagtaggtactgggaacaccagtaatggagtcagactacttgggttcacgtcttggcacttccacttaatcagctctgcaacttgggctttggtgactcagtttcctgagtataatgatatctgcttcatagtgtgattggtagattaaaacagataaagcatcccagtcatgaaagtgtttagcatcctgaaatgctcaataaatatcaaccattattatgatggagaggcaactattaaggccaattcctaatctcatggtatttccagtacacagtgttgtacccagcaccagcttcttgcattttctttctgcccaatcctctcccctgctccctccacctttctcactcaaaatagtgaagatgtaaaactctttttctaaacattatggcccccttggctgctacttaaaattctggcaggcacaaggggatgtgatgtctctacctctttgtggcatgaggttaagaagcatcactggatacagggaaagaaaagcctatctcccaaggctgtcactaaaggtttgagtgatgtgactgcagcaagcacaggtggtgccttctagcatcaaccacctaccccaaatagcaccatcagccattgtcagaggcagaactgaaactctgtgccttgagtcctttccattccccaggctacctggattgccctgcatctgggactagtagtaggtgggagaggagtcaggaaggagagggggtggctcactgctggctgctaccatgtcagtagcactcactatcctgaagacagagagtggcccctcagaccttaatgatttaaacctctgcaaaaggggatatctgaggacaaacccttcagaggatgctttctagggtccttgcccttgttctgaatacaacatctccctaagaaactgttagacatagcatgcagtgggatgggtagaattaattgggaattatctgacaagatagtataaaaatctcagatgcctctcgtcactggaaaggcatatattggattcctatccagaactttgcttgattggaatataaacagagaacacatttctgatgtccctgccttaaggagatttataataaagttgaaaaagtaatggcatggagaatatgtgagaagatcccacggggacatgctcctacatgggttgtacaaggctaagaatgccccttatggagcactgtctctagatttcgcaggaaatttgctaacacattcttcctaaattttatattttggttctatattcccaaacctccttggaagaacaacagtgctattattatgcattatggtctcactggaaaaaaagatgatatattaattagattattattaatgtggaacttggctttccaagtttagatgacattttccacaaaggtatagcttgttttaaattacatgccaataacctctgccttctgggttcctttttcgcctgctcagtaatgatattatcaatgttcttggaagctgaagctcagaattttggaaaaaagcgacaaatacttcatatatcaatgtttgaagtatggccactgtcttgcttttatctgctgtgggttgttctacattatataatgtacttgaaacatgtgggctttggtgattgagagaacagagttcatattctggttctgtgtgaacttgggtgagctgtgtatcttccctgagctttagttccctcatcagtaaaatgagaataaacagacctgtttctcaaggtggttgtgaggaatgaagcaatgaacctagaacatagtaaagtgtctggtgcagagtgaacagtcaataatagtaatgatttaatagctaacaattactgaatagttattatatactgacaatatgctatgggttttacatatattattatatttaatccttaaaataactctataatcattctgtccactttatatatgaggaaatagaggcacacagaagttatggaagtttttttttgttattttttttcctttttttttttgagatggggtctcactctgttgccaggctggagtgcagtggcgtgatcttggctcactgcaacctccacctcccaggttcaagcaattctcctgcctcagcctcccgagtagctgagactacaggtgcgtgccaccacacccagctaatttttgtgtttttagtagagacagggtttcaccatgttggccaggatggtctcgatctcttgacctcatgatctgcctgcctcagcctctcaaagggctaggattacagtcatgagccatcgcgtctggccagaacttttgactacctagatgtttaagtacatatagccaggtagtgtcaggatttgggtttgaacccaggacctcaggatttaaatccaggccatataggcctccagagcctataatcttaaccgtaatcatgagaaatagtgaccattcttattaagattatctgattgaaatatacaatttgctttcttttttggtttaatgctgcaaagcaactgctctgacaactggatgcactgactggcctggtccttttgtcagtataaaagcaaagcttctacaacaagtatgacatcatttggaagaagaaaaattgctccccgtaacctggtaatataagcaggctagtaatatgtgtctaaaaatccgtaagctcctcagttatagcaaactttattttttatacaattagagataataaattaaaggtataagctgaaagaatagaaaatataaaaaggcatgattttggatgaagattatgctttgagcctttatgatcagactgacagcctatcacttattaaagtggacatcaggtttgtatgtaccttgtcttaaacagtcatgatataccatgcattgatttaccttttgtcttttgccagcaatggtaaagtgatctgtagatttgtcaggatgtgtttctactagataaaactgcacttacaaactctattcatttaaaatgggacaaaattcacacagtctgtcatttccttattaagaaatagacaactaagaaatgtttttcattacgactgtcaccaagacacaatgctaatatcaataagcatttttgtgtatgttctccttgctgaaaccttgtcagcatgttctcatttgtctgcagaagctgagtggtaaaaaatttcaaatgtaaaaattctaatgtcactgtcattagccagaaaaagaaatggcagagcaaagaaagactcttggagaatgaaatctctccggagacactccaaggaggatgcctgtattggctaccttcagccccagtgcactagacatggagatggcctcagaagtttccaccaaccatggactttctccattcttcaaatgaactttgcttccctccaccttggcacctttcaacacctgttctttctccctggaatgctgtctccactgaccttcccccaatccttgcacatccttcagatctctgcttagagaagtcttcctcaacctcctagattcaactgggtcctttgtcattttctttcattgggatcaaacactgtcattgttcatagtcatgtatttgtgtgatgcacaatgctaattccatggggtgggaaccaggcctaattttaggcaccattatatccctggggtttggtgtagtgatggacacctggtagagaggcacacgaaatatctaaagggaacctgagcacccactgcttgggccagtgctgctgcttgtgctgctgcttctacaaaattagatcatagagctcttatctcctcctgtccagattatttgtgccaatgacacgtgacttaagttgtacattggactggtgcaaagcaatgctttcctcaagcttcacaacagttctgattggcgtagcctgggcttggtttatagcctctgggattaccagattagtagtgagatgctgaaacgtagagaaccatttatcactttttttcagcatgcaggggcactttaggtggatggcagagttggcaattgatctgattttcaccgaagtgcacatgttctatgccattcaagtttgaggtccccaccctcatgagtgtccacagttaaggcaaattctgaccttcttttgtcttccactccagtaacagtattagtatggaagggaacaaaaatgacattacaataggtagagcctataatgatgtgcaagaatgttaataaatcaaaacacaaatatgaacaaattatttgtgacatccctcttggctgatggtgatcctgtcaccacactgtaaatgagaatttcaaatctgggttaaaaaaaaaaacctgaaaatcactcgggagactctggggtccagctaggaccctcaggttgccacccctgcttgtcaccctaaacactctcccgcaaccccaggagcaagcctactaaagggtttctctgcatcgttgttattttactttctggctctggaatctggacaaagcaaattggaatctggcatgagtttgctactcttttaatagccctgatacatcttggagtgccccatttagtcgggcatttttacaggtctattttaaagaaagttgtttctttgttggatttttaatcaaaacaaaaaagttcaaatgcttaatagtagggaccatggtacatgtttgtattcaactctcacattctccatccccacacccctccacctccagcacagtatcttgctcagtaaaccctttggagtttttacttgtccgcacttctttcttttctcacctcttcttgtctccaggaaggatactgtggggctagcttctcttatgacagcgcctattagtatgctggctttgtgccagcctggctattccatccacaatctaggtctggagagcccaagaactcaaattctccctttacagtgggcagggggcgtgtccatgacagtcccttcctccttgcctgtagaaagccctgacctcagctttgctctcctcagaaatggcaaagaaaggagatgaaattggcggaggcggcctgattcttccctagtgggctgagtcaggctcccaatcctcaaagaagtgttcacttttcagacctgggttttcctgagggcacgatgtagcgaccactgtgcgctgtacttggattcagaagacccagctgcaagtttggacacgaccacttaccagctacgtgactttaggcaagccactttagctttctgagcttatccacagggtggctggcttgaaagggtgcgccttgattctgttccattatctgcactacccatatttaagggttggtacttcaagagacactcaaaaaaacaaaggttacgagagttatctactgacttgtttcagcggaggttcaataaaggcctcccaggactggccccaggcattccctggcttacccgcagctgccgcccgtccccgcccccactccattccctgcgcaccccaggctgatgcagcgtagctcttagggggaggtgtgagtccttggaaagctcacaagaatttcagagggtcagtcactctcatttactctaatgtgctttcaagactccttgatggggccccctcctccacccgccttctactggcatcctcctccgggaaaggtggcagccgaagacctcgcggttttccctcgctcaggcaccccgccccgcccccagccccggtcctgccctccgcgccctgctggccgggcactcgggcgtccaggagctccccctcggggtggcgcgcggcgaccgccggcgggtttggcagcagcgccagtcgcggggcggcccgggcaactcgcccgcctgccggtccgcccacgtgcgcagagaggagcgaagcgcgagcagtcgcctcgcccgcgcttgctgccggtgggtgcctcacctaaggggccggcgggggccgtaacccgagccccatcgcagggatccgcatttgcataattcggctttcccccgttctttcggactcagggcccgagatgcgagtcggactcccttccgaggcgtcgtcttgcccatggtcagcgcgggggccgcgggacccgccagagcgcaggcggagtgggctggcgcacgtggtaagaacgcagctatcttttcttgcttttcttttctttctttctttcttgagaaataggactttgcacatttttgctggggtggggtatctactagggtgctaaccttgctgcgatttctttccatgtccttttcatccccaattggaaaaaagcgcacagcgcgagcgagaaactttcccaaatgtgctctgggtgacttaagtcagagagatggccggccgctggataccggctgttttggagggagggggagaagcagcgcttcagtggaagagcagagggagagaccgctcccggcagcctcagggccctgaccgcggtgcgctgggcccggcgagagctggcgcacggctgcagcggtcgaggcaggtgagcggctgaagacccgcctgcagcgccgcgcttcctccacggcgtggcgccgtggctcccgcccgccccggcccacactaagctagggccgctccgggcccggggtgaaaaagggacaggacaggcctgcgaggctgaccctgcgcgttatccctggcctccgcggctttggagcgggaaagggctctggggcagttcgcaacctgcacaaacgaccatgaatgagtcatgcaggcggcggtgcgctggacttgggcacccgggaccagcctcctgtggggccccggacaggcccggctatccattgcgggctggggcgcactgggaggtagaagctttgcgcccagcaagccagaacctgctgctatttggactttggaaaagtttttaaaaattgctttgggaacgaaacagaagggtttctaccggggtctcgcaaagtaaaacgagtgggttgggggatggggatggcgtcttgaaagtgattagagatgctttcggccgtcactgaggaccgcgctgggctcaccgaggtgttttttggggagggagagaaaatatttattctagtacgtgtatcttggctcgggtgcgggcagggcgcggtcctggatcctgggctatgggggtcagggggattctgtggctgcagggaccggtagtgaaggttaggccagtgtcttcatagaacctcctgtccagcgagcccggagcccgctctgccgccgggacactgctggcaacgacggcgcgcggacgcagtcaacagggaggtgtgtagtgtaaggtgtgtgagcgggtgtgtgaagagggcagcgggggcgggagtgtgtagcggaagtggagcgagtgtgagtgtgtgtgtatgtgtgtctggaggggcagggtgagtgtccaagcttccatctggacgcccccacgcagccgaccgcccagacgcgccgggaagggcgcccgctccgcgcagcagctgaaggggggcggggagcgcgcgggcagaggaaggagggtgtctccggctgaggatttctctcgaagctccccacagtaattctgctcctcctagggtttaccctcccagtcccaaggtgcccaaaatacttaaacaaacaaacaacccaaacctgttccgttttcgctcctgtataaatagaacagactttccaaaaaagcaatacgcattcactcttatcaccagccacttctttccaccaagtaattcagaaaaaagcagtcagcttccgtgaatgcatgtagctttttttttcttcgctgcctccttttgcttgcggttttgagctgccaagaaagtgagtaggggtttgactgtagtgtctcggctccgctcggtttctttccgaagtttaattttccggaatggctcccaaacaagggctagggaggcggagccgccggcaccggatcttcgccttttttggaaagtcccagagaaccggaattcctccccgccccgggaggctgagccgcagcctggagcagctcgctctcctgctgtggctgtgactgggtccatggcgcgccctctcccccgcgatccctgcgccccggacccaggctgcagctagggccgcgcgcccgggaccccagggatccccgccgcctgcgagctggaagtcgcgagcccggcggagtccgcgcggccgagcccgtgtatgcaaatcagccatgtgacggcaaaagccgcctggcccagccctgttcctcagtccatatatgggcagcgacgtcacgggtattgaagacctgcccataaatacttagagcaacactttccgtctaactgagcgaggagcaattgattaatagctcggcgaggggactcactgactgttataataacactacaccagcaactcctggcttcccagcagccggaacacagacaggagagagtcagtggcaaatagacatttttcttatttcttaaaaaacagcaacttgtttgctacttttatttctgttgatttttttttcttggtgtgtgtggtggttgtttttaagtgtggagggcaaaaggagataccatcccaggctcagtccaacccctctccaaaacggcttttctgacactccaggtagcgagggagttgggtctccaggttgtgcgaggagcaaatgatgaccgccaaggccgtagacaaaatcccagtaactctcagtggttttgtgcaccagctgtctgacaacatctacccggtggaggacctcgccgccacgtcggtgaccatctttcccaatgccgaactgggaggcccctttgaccagatgaacggagtggccggaggtaagccgcgtgtcttcgcaggcccggacctgcgcggcccggaggtggtggatggggtgcagtgggtgtgcgggaatcgcaggagaggattggggctccaggtggacggtgctgactgcactggctttgaagactggaagtgggtgcaggaggaacctgcgacagctgagaccagggcgcgcgggcagatgcgccaggtcgccagcaaacaggcgtgcgtgcgccccggcgcgcccagccccgggcgagcgcagggatgggggtggaagaggcgtccccccgggtttcgaggcttgcgtaggccctctggccggcagcacttcgacctcccctctcccggggcaggggcaaagtgacggtaaagttcggggctctcggggagagctgcgcgcctggagagccgagcggcggagaagcgccaggggaaagcgtcggtagctccctcctgggcagagccgaccccgggaaaatctcggagcgctcccttcttgcggcctggaggcgcgcccccacctgcccgccgcccgcgaagttgagggggttagtaaggcgggggctccggccggcggaggcagcgagtgggtggtggaggagggcgcgcaacggcgggaagcagcccccggactgccgagggaggcccgcgggggcaccggcgacgccggtttccttggcgatgctgtggaaagtcgtctctcgcggcccccgcgccttcctcgaagccgggccactggccttgggctgaggcggggacgcgcggctgtcgggaaaggcggagaagattgggagggcacggaaacctacggactccttcctctacatcccccattcgctccagcagccctcggctgaagcgcagcgggagagggagggagaaaaaggcacaaggcgccggggatggggagcagccgggaaatcacccacccccttctcgggctctcctctcggtttggcaccatcacggcactgactgggataggtcgattcttgggtggtgtttgtcttggtgcctcagccgtggaacccccaggcaaaaaagagggagaaaagctccgggcggatgaggctttttaaaatattgttgttgctattattgggtgttttttattggggactagagccacagatggctgggggtggaggggagttgggaaaagctcattctgcttttttggaggtagttcttgagttccatactgtcaatgggttgccacagttgggctggcctcttcttacagtctgtgggcctcaatttccccaccttttggactttgccacagctctacagtgctgagactctcggccttggaaatggacctatgtgagcgggggtgagaagggagtcctggctgtattttcattgttccacctccattctgcctttcccctccccagatggcatgatcaacattgacatgactggagagaagaggtcgttggatctcccatatcccagcagctttgctcccgtctctgcacctagaaaccagaccttcacttacatgggcaagttctccattgaccctcagtaccctggtgccagctgctacccagaaggcataatcaatattgtgagtgcaggcatcttgcaaggggtcacttccccagcttcaaccacagcctcatccagcgtcacctctgcctcccccaacccactggccacaggacccctgggtgtgtgcaccatgtcccagacccagcctgacctggaccacctgtactctccgccaccgcctcctcctccttattctggctgtgcaggagacctctaccaggacccttctgcgttcctgtcagcagccaccacctccacctcttcctctctggcctacccaccacctccttcctatccatcccccaagccagccacggacccaggtctcttcccaatgatcccagactatcctggattctttccatctcagtgccagagagacctacatggtacagctggcccagaccgtaagccctttccctgcccactggacaccctgcgggtgccccctccactcactccactctctacaatccgtaactttaccctggggggccccagtgctggggtgaccggaccaggggccagtggaggcagcgagggaccccggctgcctggtagcagctcagcagcagcagcagccgccgccgccgccgcctataacccacaccacctgccactgcggcccattctgaggcctcgcaagtaccccaacagacccagcaagacgccggtgcacgagaggccctacccgtgcccagcagaaggctgcgaccggcggttctcccgctctgacgagctgacacggcacatccgaatccacactgggcataagcccttccagtgtcggatctgcatgcgcaacttcagccgcagtgaccacctcaccacccatatccgcacccacaccggtgagaagcccttcgcctgtgactactgtggccgaaagtttgcccggagtgatgagaggaagcgccacaccaagatccacctgagacagaaagagcggaaaagcagtgccccctctgcatcggtgccagccccctctacagcctcctgctctgggggcgtgcagcctgggggtaccctgtgcagcagtaacagcagcagtcttggcggagggccgctcgccccttgctcctctcggacccggacaccttgagatgagactcaggctgatacaccagctcccaaaggtcccggaggccctttgtccactggagctgcacaacaaacactaccaccctttcctgtccctctctccctttgttgggcaaagggctttggtggagctagcactgccccctttccacctagaagcaggttcttcctaaaacttagcccattctagtctctcttaggtgagttgactatcaacccaaggcaaaggggaggctcagaaggaggtggtgtggggacccctggccaagagggctgaggtctgaccctgctttaaagggttgtttgactaggttttgctaccccacttccccttattttgacccatcacaggtttttgaccctggatgtcagagttgatctaagacgttttctacaataggttgggagatgctgatcccttcaagtggggacagcaaaaagacaagcaaaactgatgtgcactttatggcttgggactgatttgggggacattgtacagtgagtgaagtatagcctttatgccacactctgtggccctaaaatggtgaatcagagcatatctagttgtctcaacccttgaagcaatatgtattataaactcagagaacagaagtgcaatgtgatgggaggaacatagcaatatctgctccttttcgagttgtttgagaaatgtaggctattttttcagtgtatatccactcagattttgtgtatttttgatgtacactgttctctaaattctgaatctttgggaaaaaatgtaaagcatttatgatctcagaggttaacttatttaagggggatgtacatatattctctgaaactaggatgcatgcaattgtgttggaagtgtccttggtgccttgtgtgatgtagacaatgttacaaggtctgcatgtaaatgggttgccttattatggagaaaaaaatcactccctgagtttagtatggctgtatatttctgcctattaatatttggaattttttttagaaagtatatttttgtatgctttgttttgtgacttaaaagtgttacctttgtagtcaaatttcagataagaatgtacataatgttaccggagctgatttgtttggtcattagctcttaatagttgtgaaaaaataaatctattctaacgcaaaaccactaactgaagttcagataatggatggtttgtgactatagtgtaaataaatacttttcaacaatatttttgttgcagaaatcatttctgaaatacttactgggtgggaattaaacagtcattcagtctctgtgggaatattttttaaaaacagcactaagcaccagtgaaaatgctttgaccaaaccatggtctccagatcttctttgctagcctgtggacaccaaccccaaagcaggctccattcataatcaaacactagtgttctggggatttcccccatgcattagtgtaaaagtggggaggcgttgttttgactcattgttccgttgtctctaacagcctatagcttctctctgctcctgagtgggctccggaaaataaatacttacaaacaagtgcccactcggagacaacacatttacagtcgctttcagaaccctgaccagggtctagaactcagacgagatgtggctttgtggaaagtgtggtggcgtggtcaagctggaaatgactttcagcttccaggattagtctcatgaccacagaaaactttttgaaaagcactatcatctcttcagatcgaaaatgcccccagacgctgctgatgacagcatgaatgggttgtcaaaggaattaccccaggactcatttctctccaaccttcacttcccaattgattacccctatttgatagaatcattgatctgccaaaggtttggtgggtctagaagtgacgatcaaagtactcagctcattagataagataggtgcctcaagaaaatctcaaagataacctaaactaaataggccaatatagtcctccatggtactggataaaggtttgcaaagaatatactgtagggttcatttcactgcaagtcttttgtagtggttttaaaatataaattcaccaaaaattagttaatttagccacaaagtaaacagacgatgcctttgtgaagttatcatctttactgtaaaatctgggcctaaaaatcatttaagttcacccacttctggatccttacacaaatgtaacatgttgctgcagcgtccactgtttagctgacatctgaaaatccctttgactatttgcccttcagcactgttaagactccctcagactcaacctgtatttcagaataacagatgattacagctactctggaaaccaccttttgcccttaccagcactagaatttgagatccaatttgtggagggaatgaatgcctttcttctgtatctcttctccatccctatttcaaggatgtcgaatctctctattctattactacgaaacaagagttttcagaacttgtttcatatttttttagtgactggtgttttcccattagttcctatttcccagcttgttggcgtaatatcatccttgcttgtccaactttggtaagtataagacaatgccacattttgataattacgtgattttaaagaatacttccctcctaccaagatttcattatattaaaatatacccaaattttgtaagatatatttgtcttgccaaattctaattttagaggattttcaatcaagataatcttaacaattacttacgaagcagtagactaaaagtcatctcaaaaataaaatagaagatattttgatgacagcaaaattggttacataatcactttcaccctgacgtgggcttggtgaggtagcattaacacacataccataaggaacaccacatctcagcattttctcagagccaactttgtggcttttactagtagatttcaacatgtgaggtcagtatctttaatccgattttgctctctgcttaaaatgttcagggtgcttcttgcacgtctcattttttacattgctcaagaaataaagcatagaaaaatgtcttcttctaatcttgtacatacacttttggagaagaattccttaaagattcgtagtgcttttgagatatttcaattcatattaaaaatgggttgataatacctacacaaggcttacaagttttcataaacctggctatttaatttcattatcccagctgctaataagattaaggcaaattgtttcatatatattaaaaatggctgcagtgacattttaaccacttaataaccacttttgtgtgtgtgtgtcggtggggggggggcagggggaagagcggtcagcattaacacaagtcccaaaaatgctgccagcagaagctaaaactaaacaaatactacaggaaaacaaaacaaaaaataaggaaagaaaataagtcctaaaactctttccttccagaatgaaagtatttttgttttcttgtatagtactatcttattttccttaggttaaatacaaagtaagcttttttctgttacagcaaaatagtccaattagacattagcttcagatgtgttttccttcaggctgtttcaaagctcactctcaaggaaataaactatttttaagtgtatattacttgggctttagaaatctgcagaaggccactagattttagtacaacataatcttacagtatatactgtgaacctttcatggtaatcaaactgtagacatcagagcaggtaaggttttccctatctgtcttgcaataatcaagtaagaattatctctaaacaatttgaaacatgtcttcattttccataagtacactgatttttttttcctttcttttttgagatgcagtcttgctcttgtcacccaggctggagtgcagtggcatgatcttggctaactgcaacctccacctcccggattcaagcgattctcctgcctcagccttctaggtagctgggattacaggcgcccactaccatgcccgactaatttttgtacttttagtagagatggggtttcgccatgttggccaggccggtctcgaactcctgacctcaggtgatctgcctgcctcagcctcccaaagtgctgggattacaggtacactgattttaatccagaaatgtaaacatccccagatttgggtttgaagattcaatatctataagggacttgacaaatggtttccttctttgacaacagatgcctcattgcaatggaagtgatcagtgattggcttctgtatatacgcttaagttatttagacctgcaattacaaaagtagcactgctctcaggttagagttggaaagcaagaggcaagccctgaattaaagatatattgcttcttcactgggctgtagagctagagcacaagattcagaatcagtaacagatgagtaatggcagagtcctcccgagatgccaggactgaggcacctagaaggagacaaggaaaagggggaataaaaggtgtggattttggaagaagttcagggttactggtgttaaaagctcagaaaaccctctcctgttgccaaaacacatattacttaaaaagcaggctaccactttcattaataaatagcagttggtgtaaatgcaacccattcaaatcaggcttagtaaaaatcaattctcataaaatagtaagtaggtacacaatactctgcattgatataactggccagtgacagaaccagatactttaaaagcttcagaagcatttagacagacaatttctcacccatgaggcaattattgcatttattattcaccataaaagtgattaatatcattgtgctcattagtctttccaaggggaagataacttttatcccacagttgttattaaaacattatctatattggacggagtatatagaaacacaatagcaacacaccaagtcagtcacgactaacagtttatgcacacaggtgcaagatagtttctgcaccacattttgtctttgtaataagcatattctttcctcagtggctcactaaaacaagttatattttgtcttcaccactaatttactcagaatttattagtgaaccaaaagtttcactgttcttattgaactaaatctgagatatcatattgctgttttggcctgcaacaatttcagttactcttttgaaaagcaccttaggttttttcttccaaattgctcgtaattgaaaactttaaaacttctttttttcataatgaagtcataattcttcctttattactatcctacagccaggatgagttttcgtagctttaatgtactaagttgtattataacacatacattgctattaataatcttggtaagctaatcaactttttgctacaatataatccaaaaaagtatgtgattgataaccacattcattactgtgctatggaaaaaaaaacaagatcttttattttgtgaagttttctaagaaaatcatttgcatatctagaattttattttcaaactaagtggcatgaagaactgcttcaaactgcccccaaaggcattttaaactacaccagaatgtggagctacaataaaacaattttagcaacaatgcaggaaatacttggtactatgcctgtgtcaggttttataataaagtggcatgtcctgtggaatatctttttgtgttttgttttggttttatttttaaatcactcaccaagtatttgcttttttatactatcttaaaaactgggaacaaatactccctcaccctgggtctctgtgtgcataaagaggcaaaggcacgtactgtttctctacatacggggtcaacattccactaataatagcaaatctccctttattatagatattagaactctattgccacttgggcaagtcaatcaagagggcttagacgacagctgggcaaattttaatgtgtttatttctacaatttctttttattaaaagtcttgtgaaaaaacggaatcctataaatagtaaaaagggagaaacagtgctccatggcctgaagcaaatggtgtcaatacatgtgtaaacaaggtaagactgctcggactattaaaagcacaaaaataaaactagtcacagatagcaagacttcatttcaggagttgggagtgggaagtaggaagtgtttaatcccaagttttggtgccctaaaatggctagtagtatagttaattctcaattctctagctgtgatcttctgtgccttctatctcttcctaaggaaaaccacattagatgaacccagggctcagtcattttagggagagggttgagacaacactgccagcaacacagctggaatcacccgagtcgggaacattaaagttcctgagagaatatgaaacaactatcaacataatatttctccctacttttacagtaaaatattggaagtaaataaatatagggaatgcaacaactggctaggagtgttttacattcagttgtttggaagcataacacattcagctcctttgaatcttcccgttagaaaatacagaattactctatcaccttttaaggtacagtaagacaagaaaaaaagtcatgtgaggataatacagtctttgcattaaaggtgaatctgcaacatgaaatctgctcgactcacagatctggagattcatagggaagataagctctaagtgaccatgtcacagagatatgcaggtgctgaatttcttagtagatgctgcctgagtaaaccagatgtggctactgggcaaagggagaaaagaaaataaatcttgtcctctacatgcatagttatgttgtgagaatgatccccaaactgaaaaaatcatttagttttcacaaggaattaattaggcaggccagctcactttaaacagtagctcatctccttaaacctagtttttaccaatgacttgaactaaaaacaattcaaaccactgggtcatgcacagtcaataagttaaaaaactataagaaaaaaaggcataagggcatgagtggaaaataaaccctatttaactaaggggtagggagtgggagcaagaaaaccacttagtattttgtatagaatggggaagagaggaagatattttcattatggctttaggatggaagcgcttcagatagtcccctgccccattcctccaaatcaaagccccagtggcagtgacagtaccaggaaacaatctagcctccccgcccaccccgcccccataaccgtgcccggcggctgctgtccagtcgcccgtgcttcccaaggctgccgaggaagcggctgctgctcattccagtagatccaacgcccaggctagggggtagagacacagcccttgtggtagggtagggcacgtcttcggcccaccgctcctgggcgccagtggcttcaagggaagaccttgggacctggatagggttctccctcgcaccagaagtcatcggcctgtggggtctccaggagccacacctctcgaggcaggtcacaggccgagctggaggcctccttgggcctgaccggctccagcacccggtaatagtggcagtcccggccatcgtccgggtcgtagggcggggccaggatgtccaggaaggcggcaggcccttccacggcgtcgatctggtgcaggttgtcccggtgcggtgtgaggatgcaggggccgctggcctcggtgtactcggcccgcgaacgcagcacgcccggccgcacggcttctcgctcccggggctgcagcggcggctcgaactgctgctcgggcggcaaggcccgcggccgttgcccgccgcccgcgtctagcttgtccatgcagctgatgcgcacggtgccgtacagcaccttgagcatgccgtgcatgcccgggtggtcgtgcagcgggatggacgtgccgctcttgagcaggaacacgcccaggctgaagccgtccgtctcgtagatgtgcatgtaggtgactggcggcaggttgggcggcagcggctgcagtgtggccttgcgcggggcgatgttcaagtcctcggcgcggagctgggtcaggaggctcttcagcttgctcaggttctcggggaagcccggctgcatcggcgcctccgggccagaagccgcgtcgcgatcggaagcgccgcggccgcccccgctgccccggaaggtgaggcaagcctggcgggcgatccgttggatcaaggaggccatgttgtctcggggcatggtcggctgctcctctgcgtgccgggaccggccccctcctttcctccgccccttgcggtccccggcggccgccacggctgcccccagcccgggtcgaggcgggaggccccgcaaccaccggcccgtcgggcgcgcggcaccgccgccaacctcagcagccacgcgcccgcaactgcccggcgcgctcgccttgagccccctctgagcgcgcacgcgcacgccccacaccccgcactcacgctccgggagcagatagcggccgcgcagacggtgccaggctttgccttacgcccggcgctccattcatgcggcccgcacctacgacggtggccgggcgcccggggaccctgcggagcatgccgggacttgtagtccggccttccgcttgagctctgagatagttcagtttgttgattggaaaatagaggaactattacacatgttgggcataaagcgatctttttcaggatgcagaggtgtttttcttgttttagaaaagatgaatcggggtggaagattagtagccacttgactacaactcccggcactccccgcagggtggagtgacgcacttccgtcagctggcccccggagtagtggaggctcttggccttcataaggaaaggggcagggagggtcgttaaccttctggcgccgcgctggggcctggttagccatgcagggtcgccttcctttggccttgcccctgggaaggaggctgttgagtcagccttagctcctcgtagcggcctaggcagcactgtctcccacgggaattgcaggagggcgcttttataattttgtgtttcctaggaggggagggggtccaggccgtcctctgtgatcatcaaggttactcggcccagctgggcccagctgggcccagctgttgtttgcatcaggacctgatgacgctgctcttctggttacagagcagtatagctttttgctggagagacttgagaggccatttacagtggtcgtggattctgaacatactagtggttatcaaatcttggtttgcctgagaagggggagcgggcttttataaatgcagattccctgtcgtcacccagagatggagttactagatggttctgaggcatcctaggagaaatagtggtgtgcaacagtcagttcagtcagtaattgtgaaattgtttcactacacagaggcatccttctccttggcgtgaactaacttttggcataagtaaatgactagaaaagcaagacattagatactatgactttaaacttaaccctgagtttaaagtctttttggattccaaagctgaacatgggtttcttgtacattttgtaattggagtggttcagtgaatcctctccagttaaaataggcatactttttaaagtggattacataacctggctaatgagtactcacaatatgccaggcactgtgttaagtgcattatataatgaatgttatactatttaatccttgcagcaactcttaagaggcaggcactattattattcccagattgcagatgagggaataagttgtaggatagtgaatactaagtacccagcaaagcatgagcagcagagcagaaataagtacagtcttaccaaaaacagcagcttgaattggtgtaaaagcaccaaacgagagtcaggatattgttgttccagcctactgtgtgtacttacaagctgtgtgtcgttaggcaaatcctacccttttagggcctcaatttattcatttgtagaatgccggtgttaagggaacaaaagttctgaaccctactcatcagaaccccctggagagcttaaaaaataaagatcttggggtcacacctcagagattttgattcagaagaactggagtgaagcctatttttttgtgtgtggtttttttttgtttgtttgtttgtttgttttgaggggtaacaaggtttatcgtgaagagcgaaataacaaagcttccacagcttggaaggggaccacagcgggttgcccctatgatttatatttaagatgcttcctcaagcaattattattattatttttttttttgagacggagtctgggtctgttgcccaggcgggagtgcactggtgcgatctcggctcactgcaagctccgcctcccgggttcacgccattctcctgcctcagcctccggagtagctgggactacagatgcccgccatcacacccgcctaatttttttttctgtatatttagtagagacggggtttcaccatgttagccagaatggtctcgatctcctgagctcgtgatccgcccccctcggcctcccaaagtgctgggattacaggcgtgagccacggcgctcgtccaagcgattcttgatcattagctcagtttgagaaccactggtagagctgtaaatagtgaaccagctttcattagttaagagggtggttatttgctttaggaaaggattgttaagactgattcatttttagaggttgccatgccattgttacgttatttaaatgtactttcaaagctgataaataaatttcatacagtctttttctaaagtgagaagtatttgagagtaaaattcttccccttcctttatttacaaatatggacttttatttattggttttacttctattagggtataattagtggtaagtatagactccatggaacacagactatattaacatgcagatctcttgcacttaatggttgtccacacttacttaactgaagctcaaaattttcatctataaaatgggataatatacctgtgtaaatcactgatgacactatgtagaacatagtagctgccccatgacagtagctattataggtttaaaatggctataagttgtacttaaagaccaatgaatttaaataatactaagcaagtattgaaatggaatttgacttgttttgagaatcagcttcagggtagagataaaaaagattattgcttaaaccatttacctggtaatttgctagtcatcctttggcctgagttcaaagtttccgaagactgcctgtatcagaatcacttgggagtgtctgtcaaaagtgcagattcccagatcacgtc

SEQ ID NO: 83 - DNA, 2984 bp, Homo sapiens
taactgagcgaggagcaattgattaatagctcggcgaggggactcactgactgttataataacactacaccagcaactcctggcttcccagcagccggaacacagacaggagagagtcagtggcaaatagacatttttcttatttcttaaaaaacagcaacttgtttgctacttttatttctgttgatttttttttcttggtgtgtgtggtggttgtttttaagtgtggagggcaaaaggagataccatcccaggctcagtccaacccctctccaaaacggcttttctgacactccaggtagcgagggagttgggtctccaggttgtgcgaggagcaaatgatgaccgccaaggccgtagacaaaatcccagtaactctcagtggttttgtgcaccagctgtctgacaacatctacccggtggaggacctcgccgccacgtcggtgaccatctttcccaatgccgaactgggaggcccctttgaccagatgaacggagtggccggagatggcatgatcaacattgacatgactggagagaagaggtcgttggatctcccatatcccagcagctttgctcccgtctctgcacctagaaaccagaccttcacttacatgggcaagttctccattgaccctcagtaccctggtgccagctgctacccagaaggcataatcaatattgtgagtgcaggcatcttgcaaggggtcacttccccagcttcaaccacagcctcatccagcgtcacctctgcctcccccaacccactggccacaggacccctgggtgtgtgcaccatgtcccagacccagcctgacctggaccacctgtactctccgccaccgcctcctcctccttattctggctgtgcaggagacctctaccaggacccttctgcgttcctgtcagcagccaccacctccacctcttcctctctggcctacccaccacctccttcctatccatcccccaagccagccacggacccaggtctcttcccaatgatcccagactatcctggattctttccatctcagtgccagagagacctacatggtacagctggcccagaccgtaagccctttccctgcccactggacaccctgcgggtgccccctccactcactccactctctacaatccgtaactttaccctggggggccccagtgctggggtgaccggaccaggggccagtggaggcagcgagggaccccggctgcctggtagcagctcagcagcagcagcagccgccgccgccgccgcctataacccacaccacctgccactgcggcccattctgaggcctcgcaagtaccccaacagacccagcaagacgccggtgcacgagaggccctacccgtgcccagcagaaggctgcgaccggcggttctcccgctctgacgagctgacacggcacatccgaatccacactgggcataagcccttccagtgtcggatctgcatgcgcaacttcagccgcagtgaccacctcaccacccatatccgcacccacaccggtgagaagcccttcgcctgtgactactgtggccgaaagtttgcccggagtgatgagaggaagcgccacaccaagatccacctgagacagaaagagcggaaaagcagtgccccctctgcatcggtgccagccccctctacagcctcctgctctgggggcgtgcagcctgggggtaccctgtgcagcagtaacagcagcagtcttggcggagggccgctcgccccttgctcctctcggacccggacaccttgagatgagactcaggctgatacaccagctcccaaaggtcccggaggccctttgtccactggagctgcacaacaaacactaccaccctttcctgtccctctctccctttgttgggcaaagggctttggtggagctagcactgccccctttccacctagaagcaggttcttcctaaaacttagcccattctagtctctcttaggtgagttgactatcaacccaaggcaaaggggaggctcagaaggaggtggtgtggggatcccctggccaagagggctgaggtctgaccctgctttaaagggttgtttgactaggttttgctaccccacttccccttattttgacccatcacaggtttttgaccctggatgtcagagttgatctaagacgttttctacaataggttgggagatgctgatcccttcaagtggggacagcaaaaagacaagcaaaactgatgtgcactttatggcttgggactgatttgggggacattgtacagtgagtgaagtatagcctttatgccacactctgtggccctaaaatggtgaatcagagcatatctagttgtctcaacccttgaagcaatatgtattatatactcagagaacagaagtgcaatgtgatgggaggaacgtagcaatatctgctccttttcgagttgtttgagaaatgtaggctattttttcagtgtatatccactcagattttgtgtatttttgatgtacccacactgttctctaaattctgaatctttgggaaaaaatgtaaagcatttatgatctcagaggttaacttatttaagggggatgtacatattctctgaaactaggatgcatgcaattgtgttggaagtgtccttggtcgccttgtgtgatgtagacaaatgttacaaggctgcatgtaaatgggttgccttattatggagaaaaaaatcactccctgagtttagtatggctgtatatttatgcctattaatatttggaattttttttagaaagtatatttttgtatgctttgttttgtgacttaaaagtgttacctttgtagtcaaatttcagataagaatgtacataatgttaccggagctgatttgtttggtcattagctcttaatagttgtgaaaaaataaatctattctaacgcaaaaccactaactgaagttcagatataatggatggtttgtgactatagtgtaaataaatacttttcaacaat

SEQ ID NO: 84 - DNA, 1431 bp, Homo sapiens
atgatgaccgccaaggccgtagacaaaatcccagtaactctcagtggttttgtgcaccagctgtctgacaacatctacccggtggaggacctcgccgccacgtcggtgaccatctttcccaatgccgaactgggaggcccctttgaccagatgaacggagtggccggagatggcatgatcaacattgacatgactggagagaagaggtcgttggatctcccatatcccagcagctttgctcccgtctctgcacctagaaaccagaccttcacttacatgggcaagttctccattgaccctcagtaccctggtgccagctgctacccagaaggcataatcaatattgtgagtgcaggcatcttgcaaggggtcacttccccagcttcaaccacagcctcatccagcgtcacctctgcctcccccaacccactggccacaggacccctgggtgtgtgcaccatgtcccagacccagcctgacctggaccacctgtactctccgccaccgcctcctcctccttattctggctgtgcaggagacctctaccaggacccttctgcgttcctgtcagcagccaccacctccacctcttcctctctggcctacccaccacctccttcctatccatcccccaagccagccacggacccaggtctcttcccaatgatcccagactatcctggattctttccatctcagtgccagagagacctacatggtacagctggcccagaccgtaagccctttccctgcccactggacaccctgcgggtgccccctccactcactccactctctacaatccgtaactttaccctggggggccccagtgctggggtgaccggaccaggggccagtggaggcagcgagggaccccggctgcctggtagcagctcagcagcagcagcagccgccgccgccgccgcctataacccacaccacctgccactgcggcccattctgaggcctcgcaagtaccccaacagacccagcaagacgccggtgcacgagaggccctacccgtgcccagcagaaggctgcgaccggcggttctcccgctctgacgagctgacacggcacatccgaatccacactgggcataagcccttccagtgtcggatctgcatgcgcaacttcagccgcagtgaccacctcaccacccatatccgcacccacaccggtgagaagcccttcgcctgtgactactgtggccgaaagtttgcccggagtgatgagaggaagcgccacaccaagatccacctgagacagaaagagcggaaaagcagtgccccctctgcatcggtgccagccccctctacagcctcctgctctgggggcgtgcagcctgggggtaccctgtgcagcagtaacagcagcagtcttggcggagggccgctcgccccttgctcctctcggacccggacaccttga

SEQ ID NO: 85 - DNA, 96600 bp, Mus musculus
  misc_feature (7789)..(7808): "n" at positions 7789 through 7808 can be any base.
  misc_feature (9978)..(9997): "n" at positions 9978 through 9997 can be any base.
  misc_feature (14125)..(14144): "n" at positions 14125 through 14144 can be any base.
  misc_feature (20780)..(20799): "n" at positions 20780 through 20799 can be any base.
  misc_feature (27797)..(27816): "n" at positions 27797 through 27816 can be any base.
  misc_feature (31149)..(31168): "n" at positions 31149 through 31168 can be any base.
  misc_feature (33786)..(33805): "n" at positions 33786 through 33805 can be any base.
  misc_feature (34873)..(34892): "n" at positions 34873 through 34892 can be any base.
  misc_feature (45961)..(45980): "n" at positions 45961 through 45980 can be any base.
  misc_feature (50121)..(50140): "n" at positions 50121 through 50140 can be any base.
  misc_feature (53877)..(53896): "n" at positions 53877 through 53896 can be any base.
  misc_feature (55271)..(55290): "n" at positions 55271 through 55290 can be any base.
  misc_feature (57012)..(57031): "n" at positions 57012 through 57031 can be any base.
  misc_feature (60915)..(60934): "n" at positions 60915 through 60934 can be any base.
  misc_feature (63387)..(63406): "n" at positions 63387 through 63406 can be any base.
atgcaaaggaaaggaatgtcagaatttgaaggaattccttgaaaaggaaccccatgtctgtgattacagctctcagcagatggaggcaggaggctcgggacttcaagactagcctctgctacagatagaactagagttcagctgtggctacatgacatcctgtccaaaaccccaaaataaaaacaacaagttagccgggcgtggtggcgcacgcctttaatcccagcactcgggaggcagaggcaggcagatttctgagttcgaggccagcctggtgtacaaagtgagttccaggacagccagggctatacagagaaaccctgtctcgaaaaaacaaaaacaaaaacaaaacaaaaaaccaacaaaaaaaccaacaagttatatgttataacttggatgaagtttgatttaagagtattatgcgaagtgcaatatgctagtcgcatataacagcagcacataataccatagaacccagtgaatgcagccatcttagcacataagtggatactacgatgcttgtacaagaacaaaattgcctaatgtggtggtttgaataggtttggctcctagagactcttgagtgtgagtgcttgactatagagagtggcactgttaggagttgtggccttgtggagatgggttttgagacctcatagaagctcaagtctgaccagtgtgacacaatccctttctgctgcctgtggatcaagacgtaaaactccgagttcctgctgcagcaccatgtctgcctagaggctgtcatgcttcctgccatgatgataattgactgaacctctgaaactgtaagccagcactgttgcgggaaatatctagagctagcccctgcaccagacgatctaatttgctgggtctctcagcgcagcaattcaccagccctgccacatgtctcccaccaggccatctctccaatggggccccgaagctcctctcaatttcacgaaatgccccacacatccctggttagccatttcaacacctagttaccagatagaatcaagactcttaatgtttaattagccaatcagatatatgtatcagtaataacacaatttataagatgccaatacaataatttcagagccaaatgataatgataaagctttaacacaattgttctagccttttgataacaccttgtcagcctccattctgttctcctcagatctctctttgtctctgtctctgtctgcctctctctctctctctctctctctctctctctccttaactccttcatccacctcccttctcctgtccaatcacaagcctcccactgccctaatgtgattggacagggaagaatcctgcaacacagccccaattaaatgtttttctttataaaaagttttcttggtcatggtgtttctttacagtaatgaaacccactagctaagacacctaacgatacatttcacaaaacatctcagggctcagccatgggtaagcacacttggtagccacacaaacatggtaacctgagttcaattcctggagctccactcgcttccaccaaaagaaagtggaagttgtcctctgactctccgacttttatccgtgttccgtgtcatgtgcatgctcacatacatcatgtacagaggctagtaattataaagggggaactctttgagacatggtctcacagtatagtcctgactggcctggaacttgctatatagaccagtctgaccttgaattcacagaaatctgcctctccttgcctccctaaaggattataggtgtgcaccccccccatacctgatccataaatgttaggtgatatatgtctctactgtatgatgtcaaagaaatgatatctataataaaaaaattcataggagtgggaagaatggtaactgccaggatgaaggaacagagaatgggagtttctaacagtatggagttttagttctgcaatatggagttttgcactttcattgggcccagtggcccatgcttgtacacctagcaaccaggaagttgatgcaggaggattgtgagttctaggtcagtctgagctacaaagtgaaaccctaaaaacacagttctatatattgattatataataatgtgaatatactcattgaaagtggctaagacagggctaggatgtagctcagttagtgtctgcctcacaggcatgacacccttggtttgatcctcagcacttcataaactggaaatggtgatgcccgtctgtaatggcagcattctgagacagagacaggagaatccgtaaattctttttttttttttttcttttttcttttttttgagacagggtttctctgtgtagccctggctgtcctggaactcactttgtagaccaggctggcctcaaactcagaaatccgcctgcctctgcctcccgagtgctgggattaaaggcatgcgccactgtgcccggatgaatctgtaagttctaagtcatgcttagctctatatcaggttgacgagcacactggacagcatgagttcgtaccgagaaacaagaaaccaacatccccaaataaaatagaaaaccacaggatatccagttagctgtcagtaacatttgaatgataaggctgtgtagctgaatcacgtaagtgatgcaatcatatgtaatgactgtacatctgcacttttgaaagtcagactttctaacaatatctgtgcatgtgcattgtggtagcagaactcaacacttatcacttacatctcctactctcaaatttttcatgcttaaatttgaaaataaccacccccctaatacatttaaaatgacttgagataaaataaggtgaaatgtcacttcagggctagaaagatagtccagtgggtgaaaggcttgctgccccagcttgacggccttagaaattcaaaggaataaagtactcgtgagtgtgttggatgacaactgtccctaccctggcacgctatggagcctgcaaatcattactgacagaaatcaaagttgaagttatggcttagtgcagagtatttgctgaaggaggttaagaagaagcacgttggaagtagtaatgttcaattcccagcaccatgataaggaataaatagcttctggaaatggaaagatagtctgtgttaagagggcaatctgtagtaacacaagcctataggcaaacaatcgaaacaaaagaatctcttgaaagaacgactttgggacactttggtgaaatcggaacaaagtggtcatctagttgatactctatcaatatcagctttgcaaatttaagatttttactctttacttaaataaacccaactctggtgtgacagctgtaatcccagcacttggcaggggctggcaggaagatcaaaaagtcactgtcatctttaactacatcatgattttgagatcagcctggacttcatgagacacccttctcccaccacataaagaaaataataatggccgggcatgctggaacacgcctttaatcccagcacttgggaggcagaggcaggcagatttctgagttagaggccagcctggtctacaaagtgagttccaggacagccagggctatacagagaaaccctgtctcgaaaaaccaaaccaaccaaccaaccaaccaaccaaacaaacaaacaaaaaaaaaccaaccaaccaaccaaccaaccaaccaaaaaacaaaaaacaaaaaacaaaaaacaaaaaacaaaaaaaaaaaaaaaagaaagaaagaaagaaagagaaaagaaaataataatgatgacaaaaatcccttataggctggtatagcctctctctctctctctctctctctctcacacacacacacacacacacacacacacaaatgaacacacacacacacacacacacacacacacacacacactttgttatttaaaagaaaaattggtctatgttctttcactcgtcatggcttagaattagtttgttgtattcaatcaaaaacagtattgggaatttggttaaaattgctttgatctgtgcgatcagtttgaggatctattatgatgtgaatcaaatggagagaagatttttgcaaaaagttgaaccccgtggggattctaacaaatagaaagtgggaagaaaaatcttgaccgtttgatcatttcttataattgtatctaccctgcttcctaccacgtttgcaaagtgggaggagagaggacaacagagaggatgaacactaactggtaggcatccagtgctcttctcaatccgggttttctctggtatgtttcctgaggacacactatttgaaacaggggaattgaaggtgagggttgaggggaaaaaaaaagattcaaagaatgcagttgaatatgcgtcaggaggctataaatgttaattgttgaagttgctgttcctaatgcctgtgagaccctgaagttcaaggacaggaattctgcatggggactggggactgtagagacgcgatatttaagctttagggtggggttgggggaaactcggtgagagttcctaaatgccaggggttttgaggtgtgacagtgctgcacggattggagaagaagttacaggtattccaaacacttggaacaaacaacacgtgcatgggtgtgatggaggccagatgtatttggaccgataagtagaggtgtgattgtgcaaaaccatgagtaccaggttaaggaccttggagtttgtcctgcgaagccagtggatctggaacagaaaagcagaacccacaccggctttaagattactgtggctgcgatggaggaaagcaggtggtcctgtcctggccagccgagccaccctttcacctgcagtgagcgcggtcccggcctggcgtcctccccgccccttcccttgacgctccaggtcggatgagctcggaactccgctacaatgcctgggcgctcttgctttgggatgcgacgagggagtacagacgcgcccccgtgcgtcacctccgttctggcagtgaggctgcctagcaccgtggagtggcgccaaggcgagcgtctgcgcttgcgccgccagtcggaggccctctgcgcgagaaggacgcgtttgtgcctggcgttgctatctgctgttctgggtgtttgcttttgtcctaagagatgtaggcagacagtttgcaaaggctcgatggctccacgacttcccctcttgctactccgctaggaagcaatttcccttgagccacttgctttcagtctgcagccagaatttcacactggtgaaaacctaacctggccgacaatccatgttcccagggcttgctccctttgtacttcaatcagagtcctagtgcaaggggatcttggagttcagttaccttaatgctctctggtatcttgaagtgagcttatgtagattttgctcgcacagtcccaaagatcaccaattttccagcgatagctttatggaatatttgtttgtttattttgagaaagggtttcactatgtagctcttgactgtccaggaactcactatgtagaccaggctggcctcgaactcctctgtcccaaatgctgggactaaagacttgtactactacacctggcaactctatgtattcttactgcacgtttcctctatgcaactttgatgccattaaaagcagtgcttcctgctgtgcatacgtaataaatcctgggatatgtaatgagctacatacataaaatgttgattttttttttttttttttttgcatttacattctagtgaggggagttcacaaatagatgtttgagtgcttggaaagagttatacaggatggtagttaattagactgatcagaagaggcttcttggagattttgatgtttagaactagccatgtgaacacctaggcactccagactgggaggagcggtgctttctgggaatacacaggctagagttgactagagtgtgatgaaccatgattgacagttgtgagaaaaccttatgttttaagtaagtgccagattggtaactttgtgtagaactttgaagtgtgtgttcttttagattttgagatagcatttcatgcagccctggctggattggaacctaccacacagctgagattggccttgctcctctgcatctacctctctcctgagggctgggattagcggctgcatcacttctcgcagcttgaaatgtgttttaataacgagaagccaaggaatagttttctataatagttgatttggttcagtcacttaagaccacacaaaccagttgttgaaaataactgatatatcagttgttctctgaaattccttttctaagtccttcctaagctataattcctctgcctttctctttaaaaaattatatttatcttgtgtgtggtgcacctgccattggccatgtgtagagatcagacgaacttctgggagtcagtttttctgctcccagcgtttgggtatctaagacagaacttgggttcccagtcttggctgcacctgctctttcctggctgagccctcccaccagcaggtctgctgttgtcttactactctgatggttaatggatggacttcaaactattactgaacacgttcaaaatgagggggacttctttttttttaagatgcaaatctgtacatgtattataaaaggaaaggcttgtagatttcattcagatcctaagaggtagtctaaaagatggtggtttcaaacatttttcatctgtgagatcttgtttattgtactacaaaacagcatggttcttccaactgtcttctcatctatgaaatgaaaactgaaaactaagacgttttactaagaaagcgttcaatgatagagcacatgtgccacagcgttgcacagtgccactacaggaagcaagtccatccttaggatggacggacaattcatagatactgcttttatagcattctgtgattttcatatctctatcctgggtcctgtaccaaggcgaggtgagggctggggggaaatccctcccttccagaagctaattatccagttgaagctatgaaagatcccaagcaggatggactaaatccataaataaaagcttgtgggtttgaatagacacatgatcaataaatactacacgtatgcgttacgtcctcatggcatggaaaggcagatggaaacaggcaatctctcctcccactagacaaacactgagcagtcgggccttttgttttttttttttttttgttttgttttgttttgtttttgtgagagggatctatcttttgtgcaatctgtttagtatacagtgcatgctcggggcactccttatcttcgtgctgggaacaaagtacacacaccccttttctgaaacacagggcctaggatctcctagagctggatgggctcccgggctgtgggaccacacaaaaggggcgcttcgcctgctcgcaggcccccacacccaggttctcgggtcgcgggttcgccttcagggtccttcagccccgcctctgcgagtgccctccccagcctctggcgcgcacccctcctcatccgcgggcagccggaaaacccggagcgaaccggcccgggccagcggcgcatgctcagttgcgagcaggttcagtttgctagtaggaagctccggcgctacaccggcggcggcagcggcagcggtagcagcagcggcggcgacggccaagcggccggattccccggcagcgacctcgggccctccccgttccccaccgacccctgctcccgcttcgtcccgttctgggcctctcgcttgagttccccgctggcgagcgggcgccaccggccggagcgtccatccacgcgccgtctctcggcgggccaggccgtgccggggagcgnnnnnnnnnnnnnnnnnnnncagaggcaggcagcatctttgtgagtttgaagctagtagtggtctgcataatgagctacaaaacagccaaagctacaaagtgagaccctatcttgaaaacaaacaatcatgcaaacaacatcaacaaggaatctcacagtctcagttttacatccaactttgtttgtatatttttacgtttggcttttctactggggactacaatctgttttagttaattcttgtacacgaagtgagctggtggtcccacttcagaccttttcatgaggagatagagttgtcccagcaagtgatggaaagcgtctcttcctcatgtgttgtcttgtcatcctttctgaaattcagctgagcgtaaatgcaaaggcttccttctgggctcccagttctgttgctttgttccatccatctagctttctgtcaacactgtgtgcctcccttcctgagagcctctggggcgagagaaggaattgccatgcttcattgtcctgcttcttcattggctggagccatcctgggttcaggactgaggtagcttgagaaagagctctgagccaaagcacacaaggtatacaatgtgaggatcaaacttggatttgaacttttaatgtctgaagatattttgagtactgaccttgcctgtcaagcacaacattgaaattgacaaatttgtagagggtagagaatgaaatcaaaacaaacaaacaacaacaaaatcagaaaaggggagatgagaaggatgctgggcaagcaagcccataattataattttgaacccttgtggtttcaagctagtctctattctgtttcatagttcctgaagcagcctgagaaacttcccattgcaatgtcaatcaatacaactgactagtccatccttgatagtgaggtattagtgattaattgtatgtgaagtgtttttaccttcagaatctacatctcgtttaagaaaactgggtgtattcaaggaaaacaaagcatagtgtatactccactgtgttataaatggtgctagatatgtttaaagggggaaagaaaggagcataagttaggatatttaagttatatttcaaggataaataagggtttagataatcaaagatggaaagagggtattgggttgtgtggacagacaggtaggcaaggagaactgaggccaagggggaatccagcttagctccagggtgagtgccaggactgcagagagaccttctgtggtagacttaggcatggctctgtttgaagaacgcctccctcctccctcaatgatccttgatgaaggagaaagtccttgtttgtccaaactgttgattcatgatggaagaaggatgcatacaacttactcagggtgaaccagagattaaatacctcttggaggaagggatgcccaggaagggaaactcattagcttgcgactctaggcctatctagacacctcattagcattagatacctctaggctctaagctatgtgaccatgactggatgtcatggtcctcttagtggggtgtcatcgtcatgtactccaggacagaaacctggtttggagtagattcaaatgcctgctattcttaattatgagaattgctggagttccttaatctgctccaccttgcctgttcttggtctggtggcatggtttcacttgccccacagagtgcaattgtacttggggtctcccaagcacatgagtaggttttataagaagacctgttaaggagtgatctcaagattttgggggctaaaccaagtaagtttgtagatgagcagcctgttttgttttctttaggcagaagcagactactgagaactttccatttggggaaagtattcccatgttagtctaggcattcagagtagcaaaggtgactgattctactttctcaccaaaatgaataccaaggctacctttgaatgcgttttgtttgccttagctgcctgacaaagttcatagacactggaaagaagcaccaatggaagtttccatagctatgtacttagctaacctcagatcaggagtatttaaaaaaataaaataaataaaaatccacagtctgagcttgcctcttagcaggtccttgctccaggaaagctgctctatttcttcattgtctctcaagcacatgatttctttacctatctccctgttcacatttacatgtagaccatgtannnnnnnnnnnnnnnnnnnncaggcgcagcagctgccttacgagtttttcagcgaggagaacgcgcccaagtggcgggggctgctggtgcctgcgctgaaaaaggtaggggcgcggaacccgcttcccggccgcagtccgcgcggggctgggcgagggtggggaggcggggcgccactgtcgtctttcttcccggtctcggatctcggggaggtctgctcgggctgcgaggttccccgcgtccgctgctccagctgttgacactcgcccggggtgcgtgggaaggccgcacacagtcggggagggttggtctggatcatccaagcgcggaggcgggggttggaggagcctcggttttccgtggaggtcaacgaaggccattgcctaccttctcgatcttccgaactgcggtcaacctctcgttttaggagtccggtactctcactggctcgaaagtgccttggccacagtgcttgcctaagtaattgcgaggttgcctgccagcaagaacatggcctgctcggctgtgctcgtcctcagtcataactccccgttttcttgaccccctcccccattacagcggtgatgcacatgccactgtattcagattggttcttttgaagtgtctgagaatctttgaacgtcatttggtttggtgttttgcatctttttatttggaaatgttgctacactttaaaagcttctaaagcaactgtctgtcctttggttaggcattttggatttttgtttgccagtggttaaagttattcgtgaatgttgctacattttaacagcttctacagcaacacttagtgacatagtaaatactgtactaagacatctgaaacaggtgtgcttgaatggattttaaaacaaccagattggtttttgttttcatttgccttacctgtagaaattgttttacaatttaatctcccatttcttgttgctcagatgattttcgtgctatctttgctaaaatgcagttttgttactactgagtacctggcgtttactgtgccattatgcagagcctttctattttaccagaaagtcttgaaaggtatttcatactcccagaggccagtacctttcagtttctcgtctgccctgttctccccttcccctcttggtatgttatgtggaaactgttggctttgttggaagactttgcttttatctttcagacttaggttcctgcgctttatcctcaagtgtctccctacttacaaacctctgtatgttttctaagaaaatcaaagagaccaccttgttgtgcatccttaatgactccatgagacttcagtccatttctacattggctttacctgcacaattgcctgcttagcttggagaattggagaagaatgcctcatgatgctagaagtttggtattttgacaggacaggatgaagacaaaaaattgatttatatgtacaaaagctctcatagaaccagtttgaggtatatggcttaaaagcaatagctcctattctaaggaaacctccaaaataacactcgaggctcctttagaatggtagacagagcattgtagaagttggcagactactctaacttgccacttgggtggtccttgctgaaatctattttgtgtggctggcattgtggattttgttttgtttttcaatgtatgtaattagtcaccagtttctttttttcgagacagggtttctctgcatagccctggctgtcctggaactcactctgtaggccaggctggcctcgaactctgaaatacgcctgcctctgcctcccaagtgctgggattaaaggcgtgcgccaccaacctcccggcagtcaccagtttcttaaaatgagaactatcacataaactctgaggtttgtttgttttgaattatagatggactggccatacattttcaccatcagtaaactgctagagttttgagtgactgctttctttggaaagggttttgtctccagttcatcagtgttgcttgtgttctatcgcttcatggttggttggttttccatttgaagcagagacctccctgtagaagtgatatgaagagggagtttacagagtctccctaatgtgtgaggttctttccctcatttacatttccacctgcaatgctcttaagacacccaagacaaggttggatatatttctcatattctgaatatgctcttttgtttttttttttttttcccgagacagggtttctctgtatagctctggctgtcctggaactcactttgtacaccaggctggcctccaactcagaaatccacctgcctctgcctcccgagtgctgggattaaaggcgtgcgccaccacacccggcctgaatatgctcttgtagctgaaaacttgaattatggtatgtgtgtagatgtgtccttggacattctgtgtgggtgtctccttatcttgagctcttcagactttaaactacttgcgtagtgcccgactgtgtgttttcatacctgaggctttttggatagcctgtgcattttctctggtctaatactattcaaccccagagatttttctcaacctagtggcccatcctaactcaacagtgaattttaagtcctaatttacttgtccatattcacattagctaccctattggacttgttgtacacaggtgctaggccttacacctgttagcactcattttggttgttttgtttgtttgtttgtttttgtttttttggttttggtttttcgagacagggtttctctttatagccttggctgtcctggagttcactttgtagaccaggctggcctcgaactcataaatctgcctgcctctgcctcccaagtgctgggattaaaggcgatgaacaagtgtctttgtaggttaccttgagtttgtcagactttaaagtaaattatttagaaatcttgctacatttttttaaagcttctaaagcaacattgtaacttagtaaatcttcacatctccctccttttggtttggcgttttgaatttctaccctttgtatgcttcatttagtttgccagtagttaaagttatttggaaatgttgccaattctgtaaggggatactcaaaactgacccccaccaccagtttttaacttcttgattaacggctttaaacttttatttaattggctcaaaactgaagcctaggactcctttccgtactgctgcctgccttcaggccaaaccttctgcttatcaacctctaacatgctcttggactctgctctgctaactgcttggagtttccgaggttactgtggtaacctctcagttgagttccttacccccaacccacctgcctttacatatttcagaagttataaagtactttcgaacatgttatacatttgttcaaaattgttgatgtcctttaagttaaagttagggtttgtttgtttgtttttttaagatttttatttattttatgtatatgacaagtacactgtagctgatctaggaaacaccagaagagggcatcggatcccattacagatggttgtgagccaccatgtggttgctgggaattgaactcaggacctttggaagagcagttagtgctcttacccgctgagccatctcagcagccctaaagttaagttttttaagcatggaatttataagacggctttaccttggccttcctgtttgatttcctacctagatctttctggagagcactgctccttttcctgaatgtatttattaggccccacagtgtctttcctactgcatctatcacatcccacaaatacttgattcttgtttcagaacaggtatggcctttggcactaaggataaatgacatatattaagaagactaagtcgagggaaggtggtagtggatatgtctggagagaggacttgtttttaagccagggattttgtttttgttttttttgttttttttttttttattagatattttctttatattcatttcaaatgctatcccgaaagttccctataccctccctctgccctgctcccctacccacccactcccgcttcttggccctggctttcccctgtactggggcatataaagtttgcaataccaaggggcctctcttcccagtgatggctgaataggccatcttctgctacatatgcagctagagacacgagctccaggggtactggttagttnnnnnnnnnnnnnnnnnnnnagtgacccattggagcagtagtccttaacctgtgggtcaaaactccccacaggggattgcatatcagatatttacattataactcttaacggtatcaaaatttcagttatggagaagcaataaactatctatcagttctgctgacaagcagctgtattaaaggtcacagcatgggaaggttggaaaccactgcattagtgagtgcagaaatgctgggccttcctcatgctttctccacctctcagaacactgtatttctccttcctgagaacaggatggtatgcgagcctccttctctgtttgaatattgcatttgagggaagatgttatgccattggtcaatgagtccagagaattagtgtctctgaatgtttgttttagatatttgaatttcagtctaaaccatttaaaggcaaagaaagtgaaacccaacaagttcaatgtttagctagcgagatgtttacccatgaaacaaaaatagacacaatattatgatcactacaaattctaaccagctaaaaattctctgtcaggacataaaaagtgaattttttttccttttacctagccattgcaaaacaaaatttctaactattgactgttttaagatgggaccaaagtacccccccccccaagggtactgtgctaagagcaaattgacctggagaatcccatacacttagtggtaaaacctggactatcagaataggttctaatcatggcctaagagaaacacttttcaaacctgtttgattttatatctccccctttgaaaatgggtttataataaacctttccgtgatctcaaggtattggcacaataaaaacaaagtataaaaaagccgagagtgctttgtcaagaacagactactgaaggtagagtgcccttggcaatgtagtcatggctgtttagctagcagaactctgagcctttccacaggaaatgagtgcaaatagtcatcacagaaaaatcttactcactaaaagccatttctcagtggaaaaaaccctgctatcatgcatacgtatgcatgcacatatacatatgcacacatgcacacaggtgtgtgcacatcagtatcactcaagagctaaacacttaatgggatgtggtaaccatagttacaaaatctagcacttgggaagcagaggcaagaagatcaggagttcaaagttttcattaactacatagagagattgaggccagcctggttaaatgacactctgtcccaagaaaaacaaaatgaagaggggaaaaaaggaggagaagaagaaaggagagggaggagagaggagtgaaaaagagaaaaagaaaactaaagaaaaaaacaaaaaataaaaaatgaaacacaaagaaaataaaatgctatgaaaagctagtatttgcgctgaacaattccttgtaggtgagacagaagcatttcagggtgacacaaggtcagagttttttggcagggcttcatccttttaccagtttccagactgtcatcttgctgagtcttcacttggtagactgatagcttaccctctgagctatatccagcaataccagcttcactcacaaagccctcttcaccttcatgacataattcagggagactttaccttgactacaatccttctgggattggagtttccacatatggatttggtggcatgggactcacgaattcaccctattatagcacgcacacacaccctttttgagacagaattggtgtcctggaacttgctctgttgaccaggctgggccgaaacttacctgcctctgctaccctcatactgggaaaaaaggcctgtgataccatggccaatttacggcaactatatctaagatggaacaagagacaattatttatgtaaaaagagaccgcaaaggagtactatgtaatagtcttttgaaataatcgaaagaaataaaaactccgaggtggcagaacttgatttaaataggagagagagagagagagagagagagaaagagagagagagagagagagggagagagagagagagagaggccctgatttcaatttccgacaagtggtgagtggagcacacaatggaaaatagatactgtaggaatatatagagtcacaagggagagaggagatagacagtccctgtctgaagagctagtggaatttgatggctgttgtgagagaggcagtcagttttcttcagggatgcagccattgggtggttacccatgctctgataggttgttccataactgtgcatgtataggtagcactgagtgactccagtttgaaagagtacatggcgttgggaaggattagtagtggtgggatatagagagaaattggagtggaagggtgagtttgatcaaaatgttttattgtcttaattactttctactgctgtgaaaaagacaccaaaagtaacttggggaggaaagattggatttgtcttacatttgctgggtcgcgccgtctactgagggaagccaaggcaggaacccaaggctggaagctggaggcaggaaccaaagcagaagatttgaaagaacgcagatggctagcttgctccccatggcttgctcagcctgttttcttatagtactcaggaccacctgtctagtgggcactgtccccagtgaacatggtcctctcctgtcaattatcaatcaagaaaacaccctacagacttgcctaaagaaaatctgagagagacaccttctcaactgagatttttttttcttcccagataactctagcttatgtcaaggcgatgaaaagacttaacccaaacatgtatgtatgaaaaatctcaaacaataaaaaatatttaaaatgatatgagggaaaagccttatagaacacttttaaaaaaacagttcaaaaaacaaaacaaaaacaaaaacaaggaataagatgcctttggacctttgttgaagaaagtattgaagagttatcttcaataacccggaacaccaaaaaaaaaaataaataaataaaaacaaaaaaaaaacaatagcaaaacaaaaacaaagacacccccaaccaaacaacaaaaccccaaactacaggaaagtttaaatatttttaacaaacagaacaaagactacaacaacaacaaaagagaccagggtggcagaaaggaactttgcatgttctctcaatttaatttagggaatgattgtctaataaattagaaggatgtgggatagaaatggtgattgtttcatctataatatcagaaatacaattttacaagacattatttcaggttgataggcaaatagtaggagtaaaagaatatttaaccaacactaagaaatacaattttattgattcaaagagcaggcaaggaactgacaaaaacatagagaaaatataccattattatcattggtttttatatagaattaatggtataaagataaataggaaattaaaaatgtagactttcttaaatataaaaatccacacatgcatgaagcagattactgtggaaagacttgaaaaaaatacctgtccttagatagaacaatacgacagaccaaaggccagacacatctttcatgtcaataaatgtaaatgaatatgacccacctaatataaagaaaaacttttcacattgcagaccaaaggaaccttcatactttgttctgcattcaggagacacatctaaaactttcagaagagttaaaattaaagtcgttcttgagatgtcaatatcagatacagtggaattcaggatgaaaagcactttacaataaaggtcttttataatgccaaaggggacaattgatagtgaagatataaaagtcacaaaaaatctatgctccaatcaaaagcagtaacacccatgaagctgaaatgataaaaattacagggagaaattaacaaaaacacacaaatataagagattaaggtcttaaaaaaattggcaaactttattttacttttaaaagtggcagctgttctttatgtttccttattgtgtacaacatgttctaaagaactccttaaatttagctaaatagcaaatttgtttcattaattagtatttttgagatgagagcatataatattcactatttcatatttcaagaatataatatgtcttaagttgctttctactgcgataaaacgctgaccaaaactaacctgggagagaagctttggtggcttacaagtcacaatctatgatgaaagaaagtcacgcaggaactcaagacaagaacttggaagtaagaactgaagtagaaagagcacaagaatgctgttattggctgcactttcgactcacgcgcagctatctctcttatacttcttgggactaaagcccaggaatagaactccccacagtgggctgggccctcccacatcaatcactaatcaagaaaatgctcaaacacacttgcctacagtcaatctgatggatacaatcttcagctgaaattctctcctcctggatgactctttatctttgtcaagttgacagacaaatttaaaaaattcgatcattggtatccatcattgaatttgggcttctggagatagctcagtcaataaaggttactctgtaaaagctcagacatacaaatatgcattcctcacataaacatgtacatgcatatgcagatgtatacatataagtacagagtgaaataaactttgatgaatcttaaatattggtcctccattatcaaaacatgtctacttcgaatgtctatggactcatgaaaattgaaatatttcagatcaccgagtaatcatcagtggatgtattttatcacaaccaacttaatgatcatgatcaagcaaaatcagaaataagccagaaaaaccaaaggccacttcatgtgataatacaaaagttttaatcatatataattaatgtatgcaaataaaaattttgtgaggttctgacttgtgacacgtacccacaaaagggctataatgcaacattaagcaatttctaaaagcaaaacaaaaccaatggaaaaaacaaaggtatgtattaataaataaaagtaagtttaaagaacaggaaaaaagataattttaaaccttgagtcttggcagaaaaagaaaagaggaatctggtttactggggaaaaacaaggggaatataattatataaattagaaagtgacaatgtgagactaaccccagaaggaagccattcaaagaattctaagatgactcaattctatgcaaataaatggaaaaatctggattaaatgaataaattaccataaaaattagtcagtgcaagcctaccaatttttaagaaatacccattgtcaacaatgtccaaaaaaaattaaccagccacagacaactttacaggaatatctgtgaaacatttcagaaaaatgacttgtgtgcagctggactgttccaaggatgggagcagtttaagttgtaagtctctgtttctcacatgggcaatatctacacagagaattcaacgcagaggaagaactcatacagaaggcttaacatagggaaagtcatttgtggcgatcagcatttcagacagctctttttgtccattaatttcctaatttaatgtggtcttaattaaaatactagggattcatttcacccagaaaactggctcctaaatttcacatagaaaagtacaaacagtgataacaacaaacgcctaaataattaaacatggtgattcttttctatctaatttaattttattcaaacaatgtatttccatcatctcgtcccttctccaacttcttccggattcttctcacgcctgtgcccactcaactccatgttctttctctccatccaaaacaaaaataaacatttaaaaaaaagggggaggcggaggcggaggggctagagagattgctcagcagttagcagcactgactgatcttcctgaattcaactcctagcaacccagtcaccactggctcacaaccatctgtaatgagatcggatgccttcttctggagtgtctgaggacagcaacagtgttctcacatacataaaacaaaatttttttaagggtcgctaataagacacacgtcataatgaaacaaactaccctgcctttacaaatgggggtctatgaggaaaaggaggaagagcgattgcaagagacacaggtggtcgatttctccaaggaaagcagtgtcgtccagatgcaacagcctggtgcacagatgaactcacacattctgaggcagcacacatacaacatgcacacgttccagatggagtcccagcacgagggggaagtggacagacgttactgtcccaaaccaagaagctattgcaattcatatctgcaattcaattttctcccatgcccaggaacagctgaccaacccaaaacatgaagattctttttttttttttgaaggcatagattaagaatttattatgttttttttttttttggatgtgatcataacaaaatatcttcaccatggtgtctttgatgctaagtaagaacctcaatattataaaaatttctttgttatttcatttaaaatatattgacagacagggtttctttgtgtaatccaggctggcctggaactagctctctagaccaggttggccttgatctcaacaaagatccattgcatctgcttcctgagttctcagataataacatgttactaatacatannnnnnnnnnnnnnnnnnnnttagtgctcttacccgttgagccatctcagcagccctaaagttaagttttttaagcatggaatttataagacggctttaccttggccttcctgtttgatttcctacctagatctttctggagagcactgctccttttcctgaatgtatttattaggccccacagtgtctttcctactgcatctatcacatcccacaaatacttgattcttgtttcagaacaggtatggcctttggcactaaggataaatgacatatattaagaagactaagtcgagggaaggtggtagtggatatgtctggagagaggacttgtttttaagccagggattttgtttttgttttttttggttttttttttttttattagatattttctttatattcatttcaaatgctatcccgaaagttccctataccctccctctgccctgctcccctacccacccactcccgcttcttggccctggctttcccttgtactggggcatataaagtttgcaataccaaggggcctctcttcccagtgatggctgaataggccatcttctgctacatatgcagctagagacacgagctccaggggtactggttagttcatattgttgttcctcctatagggttgcagaccccttcagctccttgggtgctttctctagcttctccattggggagggctctttgtttttagacagtctcattctacagctcagactaatcttgaacttgtagcttagctgtcctggctcatctaccctagtgctagggttataagtatgggctagctagcacacctggccagtgaggtgttttaagtagggagtaacacctggcttgaggtttagaagcctcactttggccaacgaagaggaagaataaggcctaaggtaagggagagaagcaagaaggctgtctaagaggaaatacacatttggattaagatggatgctgtgtgagtggtgttgaaaaggcagacccgttgggacctagcatttcactatgtgactgtaggaatgttaaggaagtcaagtttgcttgcagctagtcactgaactttgggatggagagacaggtaacataatgaaatgatttggaacatgttgatctttttttttttttttttggtttttcgatacagggtttctctgtgtagccctggctgtcctggaactcactttgtagaccaggctggcctcgaactcagaagtccacctgcctctgcctcccaagtgctaggattaaaggtgtgcgccatcatgcccggcggaacatgttgatcttaaaggccttttggatcgtctaggccttgttctccagttggcagcccagctttgatacccaatgcagcagattttgaagtatgaagtagagtagatgaagtgtatctatagaaaaacttatgtatgagtcaggtttgatggtacaggcagtagtagattagagcacacacctagtgtgtataagatcctgggtttagttcccattattgacaaaagaaccatatgtatgaataccgtggcaggtctattcagctccacacagcaatcgaaatgtatactatccgtaatcgacaaggaaatgagtgaatgaactgtggtgcagccgtatagtggaatacatgggaatgtaggttactgatgcccatgcagtgtggccaacccgctaaataaccaacaaaccaaactaaaaccagcatgttctataggcttcactctcataaacctgtaggaaatgcaaactgatacagatgattggttattataaaaacagacgtctagatggttatgctgacacaggcctgcaatcacacagatgagaaggaagcgcaagaagaccaggagcgaaggtctttcttagctacacagcgaaagaacagcaaaccaaaaggagacgtctatgtctacttatcttgagtatgctatagtgctaggtggtgtcaaatcatacaacttagatatatgcggcttagtgttgactagttgttctcagtgaagaccaatgtagccatcagcttagaatctgctactgtctcactgtgtttgctttatcacacctatccactttccctcccgttaatctgttgttgtgttttgagacagtctctcccagtgtagcctgaaaacactgtgaagcccaggctggtctcagacttgtggcaatggtcctgtctctgcccctccccctccagtgatgagctaacaggtatgagctgctctgtccagcttatctaatttttttttttaaagacagggtatctatccattcattcacccatccacccacctgtaactctaagccagctctggctgtcctttgcccacctctgccttccaagtgctgggacttaggggtccactaccacacctggcacttatgtgatatcctgatgaattttgtagttgcaggtataagcacactttattcctaaatccttcaccccacatcagtaactagaaatcaatagctttttaaaaacagttccttttgttttagtaggaagttcctatgcagtggaacatacagacgttacttggagtgcttaatgaatgtttactgtcaaagcctctattaaaggatggaccactcccatggctcttgaggttcccttcgtgcccctcttcccagaggtagccgccactgctgcaacatttcagcacctcacatcggttactcttgtctgttctggaatatcatgtaaatgaatcaagtagtgtatatatatttttttattgttttcttttttttcaattttttattagatattttcttcatttacatttcaaatgctatcccgaaagtcccctataccctccccccactctgctccccacccacccactcccacttcttggccctggtgttcccctgtattggggcatataaagtttgcaagaccaaggggcctctctttcccagtgatggccaactaggccatcttctgctgtagtgtatatttttagtgaggcatttgagagtatgctttaagaattccgtcctttttttcccaccatgtgaactatgtcacagtttatctagtggatggatagctgatgctttcaattcggagctattattaaagctgccataaatgttctttaaaaattgcatctatgtgtttgtgcatgtatgcacatgcatgcacagacgtggaggtcagaagacaacttacaggaatctgttctttccttctgccatgtggatctctcaaatcaaactggcgtggtggcaggtgagccacaggctcaaatggtcttgttgagatggtgtctcatgtaaccaggcttgccttgacctcctggtgctcctgtgtttgtctcctggatgttgggttacaggtgtgcacacttagcccccatggttcttacaggagtctgcttagagacagcttttattgcttgtacactagtaccgagacattgcttgcaggatagagatctgtttatgagaaactgctagacctttccccaagatggccaaaccatttaaaagtctctcacagtgatagatggtggctccttgccagtgtgtgatgttactagtctttaactttagtggtttgaagtgctatcttattttaactgtgtcttgtatcccatggtagataattacattgatcacttttttatattcttttttgcactgtgtgtgtgtgtgtgtgtgtgtgtgtgtgagtgagagagagagagagagagagagagagaatgaatgagagggggcagacagacagacagacagagaacagcttacaggcattgatactctcctttcactgtatgggtcttcaggatccatttgaggtgatgaggtttggcagcggcagcagatacattctgcccccctagtcaccttgttggtaccttctgcttttatgttcttattagtcattcttgtttattcctttggacagtgtctgctcaactcttctttcccataaaacattgaattatttttttctttttagtattgaattgtaagatgccttacatattctggataactgtccttttgataaggtatttttatgatatttatctatctatctatctatttatttatttatttatttatttaaggcctcatgtaactcagggtcataatggttcaacttccttgagtgtctgcatcttaagtgtgtactaccgtgctgggtacacatcatttcttctagtctttgatttgcagatttactttctagtagtagtgttttatgacaagtaaagttttaaatatccacacatctatccatggtgtcaagcagcccacattgggctcggccttactgtgtggctgaggctgactttgaactcctgatcctcctaccttcatgtccccagttctgggattatgggcctatgtcaccgtgtctgctttgtttttgtgaggtctaattctgtagcccaacttagcttgaaattcactggctgaccttgagctcataatccttgtgctctaccttccaagggagccacctagtccagccagatagaaattctgaaggatcactggcatccacatggcagctcacaactgtttgtaacttcagtgccatgggctctggtgcccttacagaacaacaggcaaagcaaaaacaaaaaaatttatctttgattttacagtgctaaggaaaatttgccagggtgtagggagtctttgagtgaaagttgactgtcacaggaatgctgcatctctgagaaacggagtctgccttcgtctgcttgccatgctcagtgatcgactaggaggggctggttacaggcatggcccctgcacaaacacagcggtggatttcagagtgcagcagctggggcccttagtcagttatcctgcctccagccagatctgagagggccattgttgtggccaaccaggctcttctctggctatgaattgcctgattgggataaatcatatacagttttccccgtgtaaagtaggtgatttggccccttcaacactttaaatgttacaaaaaaaaaggtatcttagagtaaataaaaataaaaacttaattttcattagaatttaatagtatgtaatttgcttccgctgatcaaataaactgtttcctagtgtgaggctggtttgtgcagttaaatatgtagttagcaaaaccacagataggacggtaactctgaagaaaacagctcagggatgcctagataatcactgccttaactaaccaagtgcagccttggaccctgcttactgaggtagacagaaacaatggccggtgaagttcctcatgaaattaatcttgttaaatttccagtgggattggaggtacccaggggagaaagtaataaaagtgggaaaatgttttcttcccagtttttgaggcattgtcctgatgcatagctaagactagccatgaactcattcttctagcttcactgaaaagtgatttaaaattttagaattatggacacttaattactatgatgttattattttgaaacattattttatataatacttatttatgctttatgatagtatgtgtgctttgatgtcagttttggagagtgtcaccaaatagttttcagggacttgaacacaggttgtctgtcttggcattggaccttttcttgttcagtcatctccctgggccctcatatgttattctaagatagggatttttaaactgtaaaatgattttgagactctctttaaaaagtacactgtgtgtgtgcattacacgggcttgtgtttgtgggtatgcagttacgcgtgagcatacatgcatgcattcatgatatgtgcttgagtgcacgggtgcatgcaggcgtttgccacactttgtagagctcagagaagcaagcttggtgatctgagttcaagttcaactcctgcacgttgtcctctgaccttcatgtgcattcctgggtatgtatgcacatacatacacacaacacataccagataataaagggaaggaaggaatgtgggtaaaaatctattctgaaatttgttgaatcttatgtcttaaaacacagtcagtttaaaatttctttctttttccttttaaagtgtagttaagggctagagatggctctgtggttaagagcatttgttgctcttgtagaggacgcagatttggttctcagtatccaaatgatagctcacaatcactcaactccagttgcagggatctgatgcccctgtctgacctccacagacaccaagcatgcacgtgatgcacagacatatgcaagcagagcactcatagacatgatataaaataaataagtctatgaaaataaataaacctatgaaattaattttttaaagctatcaaaaatgtcagaagtttcaatatctggaaaaacttttttgtcttttgctttttctggtcagagtatcactcagatacagtttatatgtgtccacagaatttaaaatgacattatcagagaagtcagagatctttcagtagaaattcacacatgggtttataggaataattacacaaaataagtgatccctcactacatttcttttaaagcatttttatttttttccagacaaggtctctctgtattcttggttctcagtgtagttgatgtgtagcttacagttatcacttaaatagcaagtttgcattcattatgaaatttataacttgtttgtttcttgggcaagctctcatatagcccacattgacctcaaattgaataagtagtggaggatggccttgaactcttgatccttctccacctttgtagtcctgggctacaggcatctgccaccctgccctgtgttaccattttaatgtaggtattgtccctattttatagagtagggagtaagtatgtctgtcatctttcaaattaaagaagtggacttagaatcatatcttaaattactcacatgtgtaaaagtgccctgcatagagtcctcatttatttgtacaataggggaaagtcagggccgtcttgtatgcgtgtttaaaaatatgcctccggtcttctaagatttaacaaagtctttatttagttaaatnnnnnnnnnnnnnnnnnnnnttcaccatggtgtctttgatgctaagtaagaacctcaatattataaaaatttctttgttatttcatttaaaatatattgacagacagggtttctttgtgtaatccaggctggcctggaactagctctctagaccaggttggccttgatctcaacaaagatccattgcatctgcttcctgagttctcagataataacatgttactaatacatacatacatacatacatacatacacacacactcatatatatacacatatatatacacatatacatatatatacacacatatatacatatatacatatttatatgtatatatttatatgtttatatagttaaataggttgaatcaaaatatcataaacactccctggtaatgggcaaagggacaccttgttgttggtggtgttcttatatcagtcaggggcagagcagatgacagtcctttttcatcctatcttgatttctggcttggcagccaaagctgtttaatgcctaggacccataaaagtcaaatccaatcctatccaattgtgtcagcgaagaaggaggaagacagagacctgcgaactaccatgccacccacaaacctgccctccatcacacggaacaggcgaacaggcaggcaggccatagacatccgcctgttgccacactctgaagtacggatggaggatcttgcccaggggctcgctagttgcttggccagcttgcagcaggagccaccataatgtgtgaatacgtgatggtcagttgggagagaaagagaagtacagtaccgtgatcattatgaagagagatgggactggaggcgtgacggtggaaaggagtagcctgttatgtcaccagctctgccacctgagttagcttgtagcccaaactgccactgagggacatgtctgagtctatggctacaaagcagcagcggtccatgttgatgtgtatgactagacaacacagggatgtcctgtgcagggccagcctctagagaccacgtgaatattcaggggctgtgcttaaatggccccgcccctcactgaatgcagtgctctgtagagcttgcctcacccttcactggtggcagctctgggagccctgtgccttgcacaggcaccactgtagagctggttctggcagtggggttatgtgggtgagccaaccttgagggcatgactgtgggagagctgaccctgccgctggtctgccatggagtggcattggtgcaaaggtgatgcccacctcccactctgccccttgccacctctggcagtcaagaaagctgcccccagtgtcttgagcttgagagagcttgccctgtcccttaccagctgcagcactggcactagggagagtgggcactgcaccgcgtctggacagcacagtagaactggccctggcgtggggggggggggggcgcatgcgagccgactccgaggtcaagagcatgagagagctggccctgccactcatctggaggtgaaatggctggatctggaaatgatgtcttcccccttcctccctcaccacacgcagtagtggggagagctggggatcatgagagcaagagtcccgactcccacccccttactggctgtagcactaggaagagagggtcctgcaccttatctgggcaacacagtggatgtggccctgttggggaagacacaggtcatccattctgaggatttgagagcaggagggctgttctaacccctcataggctgcagcatttgggaaagtggtccccgaacattgtcagggagctggccctggaggaatgggtgcaggtgagccggctccaagggcatgagagcaggggacctgaccctgcctcctgccaatgatagtaggtggcctagctggagtagtaaaggagggcttatcttggaagagctgatgggctgagcagctcagttgctatccaggcccagagccagggtcctgagttggcccaccccaaaatctgtatcatctgcgaatggttgggaattcgtgaaagggccaaccaatcctgttgttccaaagctgcagtatctccatgacacagggcaaaaacaggataacaggaaggaatttcaatgaggatccaataatgatgttgtcacagaagccaaagatatcaaaccagaccaatgactcatgtaatgaacattcgcaaatgaagatgtctatgcagtataccgaggggtatattgtgggacacacggagccacactgcagcttccacgatagattttttttttatgcttttgctttttattgttgtttggttgtgtgtatgtatattgtgggacacacggagccacactgctgcttccacgatgagatggttttttttatgcttttgctttttattgttgtttggttgtgtgtatgttttattttgcaggggatatgagagctcagggagatgagtgggaatggggtgcatcacgtgaaactcacaaaaaaaaatcaacaaaagggtttttttgaaaaagtagaacaaaactagccaactgtgatttatgactgtttcaaaatgtttgtattttatctacttaaagaaattttgcctagtactgttagaataactaacatcataggctcttgatagaatttcaggtgtcttttatgttgatatgtaactttactttcagaacctttaaatgtgtttcaggacactgtgcattttaatgttttccatgtttgctgaaataagcaaattctaaaatgacgattaaagaatatatcataaacagagccaaatacctaagcacttgatttctttccccttgaagcagcacctccaatgctctcccatcaggctccacttctcaagggtaccactgcctcttagcatcttcaagctgaagaccaagcttctatctcaggaatgcttgggaggcaaactgttttgaaagcagagcacctcgtagaaagcaggattgcacagcatcaagatctctgctttgcagtataagccctcggctggcctagaacttactatgtagaccaagatattttggaactcacagaaatctgcctcctacctccgagaatttaaggcatgtggccctatggccagcttgattaagctttcttaataagctgacttgtcaaagagaaagtgtcttggtgacaaagtctaattaagttgagccttttggtgtggttttagaagctgtcactttagcttttgatcttggccattctgaagggtgataaatggaatctcagaatcattttgatttgcattttcctgctgagcaaggatgttcaacatttctttaagggtttctcagctcttaagagagtcctctgttgagaattctttatttagctctggatnnnnnnnnnnnnnnnnnnnntatagcccacattgacctcaaattgaataagtagtggaggatggccttgaactcttgatccttctccacctttgtagtcctgggctacaggcatctgccaccctgccctgtgttaccattttaatgtaggtattgtccctattttatagagtagggagtaagtatgtctgtcatctttcaaattaaagaagtggacttagaatcatatcttaaattactcacatgtgtaaaagtgccctgcatagagtcctcatttatttgtacaataggggaaagtcagggccgtcttgtatgcgtgtttaaaaatatgcctcctggtcttctaagatttaacaaagtctttatttagttaaattatggttttgggttttgtttgtttgtttgtttgtttggtcttttgagacagagtttctctgtatagccctggctgtcctggaactcactttgtagaccaggctggccttgaactcagaaatccgcctgcctctgcctcccaagtgctgggatcaaaggcgtgagccaccaccgcccggcataatgtacttttacaaatgtattacttcacaattaagatttaatttgtatttacttattattgtgtgtgcattaccggggggggggggcgggggaggaccacagctttatgtctaggatgacttagtaaagtcacttttgttgtttcaccgttacgtgggttctgggtccttacacgtctgtccagtacctcccactgaactgtttgcctgtggatatgcatgtgcctctcaacgtgtgcacacaaaataagtcaaatgcaaatgcttttcttgaactcatgtgtgactctaaaaagtaataatgtagctgggtgtggtaatacacacccacatgcaaaaacaatactcagagccagttgcagtaggatttggagctgaaggccagtcccagctagggcgagacccgtctttaaagagaagctgatgtgagaggtgtggtctgagagccgatgtgagaggtgtggtctgagagctgatgtgagaggtgtggtctgaggctggagaggtgtggtctgaggctggagaggtgtggtctgagagctgatgtgagaggtgtggtctgaggctggagaggtgtggtctgaggctggagaggtgtggtctgagagctgatgtgagaggtgtggtctgaggcttgagaggtgtggtctgaggctggagaggtgtggtctgaggctggagaggtgtggtctgaggctggagtgaagccttcctggtgctttgatcatcacttttcagattaactttctagacctagggaaagcttgcagccagcagtgtgtgaatgagaatcatcctagctctaggtgggtgtaggtggatctctgagatcaaggccagcctggtctacaaatagtgagcccctgtctcaaacagaagagtcaggggtaagatgttgttttctgttctgttcaccccctttcatgaaagcctcaggagcagatttacaataaaataatatatatagtgctgaatatttgcttacatttcaaaaatttagaattccctgttaccatcagagagattttataaagttatagaacctttatttagtgtacatgtgtgtgtgtgtattattgaacatacacagtgtctatatctaaagagagtatgatttcccactgtgtttaacagatcttggccatttcaggagttaagtgtgattatatggtaaagcccaatcaaagtgaaaggatggattttctttcagaatttgaactgattgcttccataaaagttaaagacagacaattggctaattaaattctaactaaaaagcatagtttgatttcacttaaatgaaactaaaagagagaaactgtattaaaccactatccatgcctttgtgtgaattaactttacctttctttctttctttctttctttctttctttctttctctctttctttcttttcttccttccttccttccttccttcctttcttaaatttgtttattttatgtatatgagtacactgtagttgtacagatggttgtgagccatcatgtggttgctgggaattgaactcaggacctctgcttgctctggccccactccctctggcccaaagatttatttatttattatatgtaagtacaccgtagctgtcttcagtcacaccagaagagggcatcagatcccattacagatggttgtgagccaccatgtggttgctgggatttgaactcaggaccttcggaagagcagtcggtgctctgaacagctgagccatctctctagccccatgagccttttattttttttctccttattctgaagtttgtcttggtttctcatcgcttaagattgaaattaaaaacagaatttgcgttttaaaaacttatgaccaaactcattggaatgacttcattagtgttaaaggttgaggattaagcacattccgtgaattctaattggattaatattctttctcagaagcactgtcttgctgggcggtggtggcgcacgcctttaatcccagcactcgggaggcagaggcaggcagatttctgagttcgaggccagcctggtctacaaagtgagttccaggacagccagggctacacagagaaaccctgtnnnnnnnnnnnnnnnnnnnncttaaggactcagtgttgtggatttgattgcacggattcccaaattacactggagttagaacatctgcttgtaagtcgcttgagggtcccagcccctaattggttttgatttggaaataaaattgctagcagccaatggctgggcagggagacagaggcagaacttttagaattcctggacaaaggacaaaggaataggagaaggagaagccaccataagaagtgcgtaggacagaccaagcagagaaagtgcaagagggtaagatggcagaaatgtaggtgcaagaggaaggtggccctaaaggggctgtccaacagggcccagggcagcaaggacccaagagagatttaccaagtgttaactcaggaaggaatatcagagaggagagtatgctagccgcaaggaggtttagaaacgaccagccattgcgatgcttagtgcatattaaaaataagctggggctggtgagatggctcagtgggtaagagcacccgactgctcttacgaaggtccagagttcaaattccagcaaccacatggtggctcacaaccatctgtaacaagatctgactccctcttctggtgtgtctgaagacagctacagtgtacttacatataataataaataaatctttaaaaaaaataaaaaataaaataaaaataagctggcataagtatgtctttcattcaccacttgtagaggaggtgcgcacaccctagggaagcatagagcgggtttaattatttaccgcaacagctgagccatatctcctgactttaaatgaataatatacacaatcaccaagttagagggaaaaaaaaaccaaaagcataaatacaaagagagaaaacaaacaaacaacaacaacaaaacaaccaataactccataattgaagaaaaacttaataaaaataaatatggacaaaagcataatttaaatttaatctaaagttgttaaacagaagaccagagagtcaaatatcagtcaattctaaccaataataaaaagagaatttattaggaaacattggctgcacgttttgataaacatctttaaattaagagnnnnnnnnnnnnnnnnnnnnctggccccactccctctggcccaaagatttatttatttattatatgtaagtacaccgtagctgtcttcagacacaccagaagagggcatcagatcccattacagatggttgtgagccaccatgtggttgctgggatttgaactcaggaccttcggaagagcagtcggtgctctgaacagctgagccatctctctagccccatgagccttttattttttttctccttattctgaagtttgtcttggtttctcatcgcttaagattgaaattaaaaacagaatttgcgttttaaaaacttatgaccaaactcattggaatgacttcattagtgttaaaggttgaggattaagcacattccgtgaattctaattggattaatattctttctcagaagcactgtcttgctgggcggtggtggcgcacgcctttaatcccagcactcgggaggcagaggcaggcagatttctgagttcgaggccagcctggtctacaaagtgagttccaggacagccagggctacacagagaaaccctgtcttgaaaaaccaaaaaaaaaaaaaaaaaaaaaaaagaagcagcagcactgtcttatataatagctgcatagaatttagtttatatttcagttagtctatcatagtttttctaagcatttatttattttattatgtttggtgtatgggacagagaataaaactgagggccatgtgtgtgtgctagctaaacattactgtacctctagtccaccttgtaggtttttaaatagttaattaactttactgccaattaagtactcctattcatagacagtacattctaatttgcttatttctaggctgtcagtgcaaaatgtttaccttttccttatgtataagtacaaaggccaggtttgtagctgtatcctttaaattatacaactttccttcagtgtcatgtgagttccccagctccacctgccgggtacccttgcttgctgaggcatcctacaggcctctgattttggaagtttgtttattaagacagaatgtagccggggtttaccctgaacatctgatccttcagcctctacctcccaaatttttggattatacacatgtgctaccacatcaggctggtattctgaatttttaaaaaaggttttttgttttggttttcttttttatgtattttgcctgcatagtcaagaagatggcaccaggtctcctggaagcagagttccagttctgggaactgaacttggatccttttgaagggaaataagagctcctaactgaggagccatctcttcagccctcccttaatttcttaaaggtttgaagtctatcacaaacagtgactacaacttaggagtttgtttaaagaataatgaaatacaaagtcatttatttttttgtttttgaaacaaggtctcattatataactcaggctggccttgaactttctatgtagtccagagtggcctggaactcttgaaaatcctcctgccttagcttcctgagtgttgggattacacgcatgagctatcattttcaactgaaataacatttagaaattattatcatcatcattactgctttacacgtgtgggtgtcttgcctgcacgtatgttcatacaccttctacatgtctgttgttcactgatgtcagaagaggatgccagatcaccttgactgagagtcatcgtcatcgtgtgggtgctaggaattgagcttggatcctctgcaagagcagtatgtgcttttaattgctgagccatttctccagactctttaagctgtccctaactacattatatagcacatgcctcttgccttcatccactgagtgggggaattacaggaacgaataaccagtctcatgtttaacaatttttagtttttgaatttgtttgtttatatgttagcttcccagttttgtctcttttaaagtagattatacttcagttgcttcactgaccattttcttgttgtatgtacacagtgtgttctgtggttggttcccagtactgttcattgacttgacagtcatttgattttgtatgttcaaatttgctcagctgttattgctgttcttattttcagaatgatttcatataaaactttattttaaatttcttcttgaattctttgatttatatgttaacaatatcattctttattgttttttatataaatcttttcatgaatttgatttctttttttttttctttttttttttttaagacagtgttttctctatgtagccctgctatcttagaactgtgtatagaccaggctggccttgaactcatagagatccacctctgcttcccaagtgctagtaggattaaaggtatgaatcactgcctgacaaacatttcaagaagttatttttagatactgtattagttacgtttccattgctgatgccatgaccaaagcttatggttccagaggtttaggtcagtgatgatggagtgaaggcatggtggcaggcagctggaacagcacctgagagatcacggtattgatccacaagcaagaggcagagagcacactaggagtggcacaagtcttttggaacctcaaagcccacctctagtgacaacacctgttctaacaaggatacacctcttaatccttgacacacttcctctaacaaggctacatttcccagtccttcccagatagttgtaataattgggaattaagtattcaagcatgggagtctgtggggccgttctcatttaaactaacacatacaggtttttgtttgtttgtctgtttgtcatttgtagttcaaagctgcttgtatagggtatataggttcccaggtttctaacttgtaacttgcttatagccagatatgtaataagtaccttgtggggaggtataatggtccgtttttattactgctatgtgtaccagaagattggtagaaccaggaagataggaaatgttcttttttcattacatccacgtgtaagccaggcatggtggcctatgcctgtaatcctagcactctggacattatcagggaggattatgagttcaagtacaacctgggtaagatactgtctcaaactgaagatgggatacaagaagagaaaggtcagtataggctcagtgtgtctggggagggacttgttcttgggctacctgctttaccttaacagttgcaaggggcctcttgtattttccataacagaacgggcacaggataaaacatggatgaccccagtaacacataacaccacttctgtgtaatgttactaccttggcctctgctattgaaacctagatgaagggaagggccagtggatggctgtgtcaaagctttactgggctcttggttcaacctgctatgaaccctaaatggaggaaagggtggcagtagatcttatcctgcccccccccccccccaaggtacaggctgaacagagagggagttaatgattggcactggagaaatagcctagaatggagatgagagtctcatctgaggtctgtggttgggagttcatggtgagatgctagaattggctagtcagggttcaaggatggggacctgggagtgagggtacagggagctatgaggactagctaggaggacctcagacgggagtgttggttaaggatctaggaccctacaaacacagattgtcagggtacagacatcccttagccccccccctccccccccacacacgctggctgctgacacctccccccaacaccctagcaatgtcagcatctctgctagcagctacaaaagagcccagagctttagtcaggcctttgtcatacatgatggtggtaaaggactcagtctagagctttgaagggagccagcctgaaaatagatgtctcccccaaaagtgtatgtgaccaccaaaagcgaaggcatgggagtggtcagcagtgaaaaggagcagcgtgtcctgctcataggtaagctgtcctgccttcttaatggcagtaaagcatgatggtttagtcagccgctcggtaagctatgccttcatcgtgattttggttgatgcaacgtagacgtttcaggttctcctgcacagcaggtccatggtcacctctgtcatttccattaggggtgagtgttcagccttttagaggcctataaggtggtctgtcacaggtctaggcatgcctgaatgaactttgtactgttgtgttagttgggtattcagcatctgtatatctttgggaaacattaatttatgggacagagtatcatgtcactgtctttgtgggaagcgagctatatggagtgaccttgcagtcagctgtgctccaggaccgaggcaggcctttctgaatctaagcacagttgcagtgtaaggtgcaagttaggaaggcttgtgcaccgaggtggtgggtgattgctttcacagacttctcctggtttctcagtgtgatacattacagacgaatctcattgccgcactgatgtatgtgtgcaaatcagtgaccttgacattggctcttaactcctcagaggcaggctatggatgtgcctgtctttggggatctgcctgtctatgttgtaattgctctgcgtccattaggacttgggttcagatccctaggacccacattagaataacaaaacccaggcacgactgagtacctgtaacgtgcattggtgagagacaggcagatccctagagctcacagccagcctgcctgcctatccaaaaaggcaagcttccaggtcaagaagagacattgtctgaaggcaataaagtaagacacctgtgtcctgctctgccttctccattatatgcaattgaacactcatgtgcatacaggccggtgcgctctctcgcacacacacacaaacacacacaaataaaggaaatagaagatctaggctttctaaagcctttttagctttttatagagagacattagctagaaagggctattaaagattcatcagaattcatcactgttttctggcagtttacccaagggttcctgagtatctctggacagctcatatatcagatagacagaaattcatacaaaatcttgtaataatagcaaataaaatgttgtataatgtgctagagtttactgcagataaagtgaaccattgccagtttaaaatttgtaaggtgctatcttttattgaacatggtgattgtgtcttacaaatggaattgctgtcactttcagtaaaattcctgttcatgtctgttattgaactcaaggcatatgccttgataactggctctgccttgtttttaaagacagggtctctcgctaaagttggagtccactaattggctagataggtgaccgaccccctgtcttatctcaccaggacaggtgttattggtacataccacacttggcaggtgaaggattgtttttttgttttgttttgtttttttgcagtttttgatttttaagtgggctctagtcattcaaacatggtcttacgtttgcatgacaaacatgagactgaacctccctcactaataactaataattagaaaggaacttggttgatagctacttagaagcattgctccaagtgactttaggattcactgctagtaaattagccatgaggatatagaaagtcagtttgaaccataaaggcacataattcagtgtgcagaagtaaagtgtgttcccagagtgtttaaaagggtaatcgcatcatgctaagtgtatgcgggagtgaatttatcacaatgcctatatacactagtcagagtatgttggtgaatgaaagactggatttaaaaccctgaaccctcagttctccattattttaactgtgcatagccattgtcttttgtcagggttcattgctgtaaagagacaccatgactaagacaactcatactaaggaaaacatttcactggagctggcctccaggttcagaggtttagtctattatcatggcggggagcatggcagcatgcaggcagacatggtgctggagaaggcgctgagagttctacatcttgatccaaggcagccaggaggggactgtgtgtttcacattgtgtatgtgtgtgtagcttgagcatataagatctcaagctgctgcccccacagtgacacacttgttctctaacaagaccacacccactccaacaaggccacacctcctaatagtgccactcctatggccaagcattcaaacacacgagtctatgggagccgttcctattcacaccaccctagtcatctagtaaagtagaagaactggtaaaccagttatcattaggctggcaggcaggtcatatattgactatggttaaaaacgtgtgggtaaatggttgcagcttccagggctgctgcttcactggtaaaatcactcaagttttaaatattctcttacgcagttctgagttgttagaattattttccttcaaatatttacctttaaaattatataaagtggatatgaatgtacttggcatatacattttttaaagaagaatcaccattagtatactaataatgttttcccccagccctaggctgtcaccctccccatcctgagtgctttctgtcagtaggtgcatgtcttaaaacgcatcactctcatcaggagaggtttttcttgccattcctagcttgttgttgagtaatagttctgacccacagtaagcgataaagggatacaaaactgttttgctggttattaaaatgcaagcttttagtagccaacagccttaagtgattatgaaaaaaagtcagggaaaaataaagatcattaaatgattgttcattttttcacagtatagcagactaagtcacaaattgtaaaagcactcattgcccacccggtgagagtgtgtgtgtgagaaagtgtgtgtgtgtgtgtgtgtgtgtgtacatagaaaagttagaggacaacatgttttgggtgtgagcttttcctttccactttgttgaggccggcactcagggtctctctatttttccttttgtgctgactcttccctgctgtctggcctgccaggctcttggcagttctaatgtcttaggctcccatctggctgtagagtgctgtgcttacaaatgtgtaatttgtatgtggatcaaactctgtggtcaccaggcttgtgcgtctatcgtctgagccacctccttggccccactttggtgtaaggtgactttgtgttcactgtctgtactgggagtgctttgcacagtaggtactagatgctggagactcattagtgaacctcatagacggacccccgcggtctcaacattgtgtaaggaaggtggagttaaaaggggtcagagacccatcagaggtcagtttcatccaagaagaatgctgactgactgtcctgactggttctgggcaggggtcctacataaacaatgttttatcaccatcttagcctctccctcatgtttcccatttctacaaggcactgcaaaccatagtatatgcaaagaatactgaaattacagttaggtaactagatttaaaaaaaagaatagcatgcatggtgtatgaggctgggaacaaagattgtgaagccctgattttttggataacattcaatctgtatttgtaggctagttcatattttaattacttgcctttttgtttacaggttcaggggcaagttcaccctactcttgagtctaatgatgatgctcttcagtatgttgaagaattaattttgcaattactaaatatgctatgccaagctcagccccggagtgcttcagatgtggaggtatggcaaatgaccgcttttgttttcttttaactgcatgtatctcgccgtacgttggctgtaatggcagtgaaggagaaaagggctctccagttcattcttccatctctgtaaactttgaactgggtatgtggtagcttctatgtgtcttagctgtgaaacgttcagattgtacttttcagcttaaataaacagcttcatgttactactagaatggtctgaggcaaaccctctctatgtaaaccaggatggccttgaactcagagatccctgttcatacatacatacaaacatacaaacatacatacatacaaacatacatacatacagacagagtgcacgcaaaggttttagtcccaaaacatttcctttaaatttcagagagtcaaaaggctgataataaaatatctcaaagtatctgagggagaattatagaaacattggggtcacaggatgaacatacaagttccctggtaaaagttacaaagcaaatgtggacatgtggtgacacactagagctgaaggttcccaaggtatggacggcatttaaagagttaagatgccaatcaccagtattgtggtacaaacctttaataatagcacttaggaggcaggggcaagaggattaggtttccagatcaatttaaactacacaggggagttcaaggctagcctgggctatgtgagaccctatctgaaaaagcaaaacaaaagagttcaaagagtactttatttttacctttagctccttcaagtcccaggacttcagttgggtgggaaggcgtgggacctgacatgtgagtgtggagcattgatgtaaggggtctgtatagcttattgactacatttcacgaagccttaccccatcctcagggttacagagggggtgatggacggaaggaggggaagaagaagaggaagaggaggagggaggagggaaagagagaaaacaaacaccaagtaacacgtttagtcaggtttagaaaatactgtatcctgggtaattctcatctctcaactcatttacagtagattctttgtggtggtttggttttgttgttgtttttgagacaggatgacatatagcccaatctggccttgaattcaacttgctgctgtatagtcaagagtgacacttgctctgcctgcctccatctcccaattgctgggatttcacgagtttcctaccaggcctgattggtttcttctgtaaagtcagacttttaattcataatttcttttaaatatgtgtttatgttgttgtttcacagagatcttgaatagtatggcttgcatgactctatcacattagcaatttcacttgggttttctttgatcctagctataatcttccatggtttggcagaatccagacttacaagaaaggctcacaaatctcaccttgtttattatattgatgttggtacattttagaaatttgctaatctactgacattgcaaacataaatcagatattcctatatatatatttacataactatgcttgtttaatttcatctttaataaaaacaaggaacagaaaaccatatgaaattctcatgtggaggttttggtgctggggatagttttggtgagaacatgtaagaatatgactaatagaagtaccagtcacgtatgtaatcagctttattatttctttttaacatatctattggcattgcatacagttttatcatctgtacacatctgtgtgtaagtatttacatgagcgcaggcacccacagaggccaaaggagttggatgcctgtcttggttaggatttctactgctgcagtgaaacaccatgaccaaaaagcaagttggggagaaaagggtttatttggcttaccctacataatagcattgacgtgcatcatggaaggaagtgaggacaggaacccagataggggaggaatctggaggcaggggctgatgcaacaaaggctgtggacgggtgctgctttttggcttgttccccatggcggcttctacctgcttgcttatagaacccagaaccaccagcccaggggtggcaccacccaaaatgacctgggccctcccccatcaattaattactaattaagaaaatgccttgcaggcttgcctacagcccagtcttatggaggcattttctcaatcgaagtttcctcatatctgatgagtctagtttgtcaaattgacaaaaacctagccatgaaaatctgaagttataggcagttgtgagccacctgacatcagttctgggaatctaacttaggtcttttggaagaacattacttggttttaaccactgaaatttaataatttcaaagtgctgttttataaaattctgtatcttacaacagttctatgggggtatgggaatatctttctctttgcttgcatatttgaaaattgaccctcagaacagtattgacataaatgaagatccaagaaaaaaaatcaattttccagggctggagagatggctctctgggccataaaatcactttagtgcattgatcatacaaaaagaagtagactagaaaatactagtgtgcttcataaaataagggcgaggtttatttaggaagccctcttacagctcagtttctttataagtgtataatataaactattgaaaagttattatctaactactgtatgtatttgtatgtgaatgcacaaagggatcggcgtgtgggttctgggcatcaagcttggtcgtcaggcagggctgccagggccctaacttgctgggctgtctgcaccagaatggaaatgtagtattttttactgcattctctccctctctccctctctccctctctccctctctccctctctccctctctccctctctccctctccctctcccctcccctcccctcccctcccctcccctcctctccttactttatttttttacgttcacatacaaagtagtgtgtgttttttttaatattttgtgtgtgtgtgtgtgtgtgtgtgtgtgagacagacagacagatagacagacagacagagagacagagagacaggtggggagggagggatgtgagtgtaagcgtgcgtgcagtgtgcgtagaagtcggaggacatcttctggagtctgttcttcccggcgtgtggatttctgagataagtgacggacacaagtcctcagggttgtgcagcaagcgcatgctccgagctgagctatgtcacggccaggcaggatgggcagctcccagacacaggtgaatgtcatttatacctagttcttacgcattctatccctcatttctcctttttgctggcttttcttccctcagataatcctcccgtctactatcatgtactgtgtctactttcgtgtactgtgagttgaggnnnnnnnnnnnnnnnnnnnncatagagcgggtttaattatttaccgcaacagctgagccatatttcctgactttaaatggataatatacacaatcaccaagttagagggaaaaaaaaaaccaaaagcataaatacaaagagagaaaacaaacaaacaacaacaacaaaacaaccaataactccataattgaagaaaaacttaataaaaataaatatggacaaaagcataatttaaatttaatctaaagttgttaaacagaagaccagagagtcaaatatcagtcaattctaaccaataataaaaagagaatttattaggaaacattggctgcacgttttgataaacatctttaaattaagagaatttcaggttaaaccgatagtttagaggaaagacccccatccaatgggggctgaaaatatgactcagtcagtaaaatgtttgcatactaagagtgaaaaatagaaaggtaagatgttcaatgtggccttttagaaagatttgaaaattaagagatgttacaattctggatggaaaaatcacataagtatggtgaccctatatgtaatctagtggttcagtacaatttcagccaaaagtcagcttggtttggaatctagattaagggaattgccttctcagacaaaaataggggtcatagaaatgttaaacaagaacacaaagaccaccatgtaacaggcagtattccaaaattaccttttaatcctgacacaacactcagaggtgggtaatatcatcactttttacagatgaaggagttgagtctcagaggcattagacaataaataaatgagtcagtcagactggctttaacacatgtcattggaaatcaaggtcagctttctactacaaatataattcaagttcacattgcacactcaataactggtgttaagacaattaaggtatcatttgtaggagaatataactggatccttaattcctacctgacagtgaagcaagttccagagtaacaaagtgtatataatatgcatatatcagagaacaacagaccaacagtcacataatcaaatgagaaggaatgcacttctaaacataacattaaaaagcataatataataaattaactaaagttatttaacgtgtaagtttacttctacccagtaattaaacaaatgccaaataagtacacaccaaagcctactaagtttcaaataacaattacaagacaggaaaaaattctaacactatcttataaagtcattaaataaatatatggccatcactttgtagacttcagagctttttaagaaccagttccatgagataagattaaggacaatggtgatgtccttggaagacggtgtgaagagctcctctgaaattcatgagggtccatggattgacaggttattaaaactattcagggaaaccccagggaatatgatttctttttcaattagtcatccaacaatgtttatctaatccctttctggactagtttctagggtctcagtggaaatggagcatacactaactgtagcgagcttgaattaaggcaactgagacactgagacagagcagctctgttaaatctcatacaaaaagccaatcgatactgtgacgggaagtgaattgtacagacattggaaggtagatgattcctagggaagggattgtgatagtcagggaactgatgatgaaatcaagggctaagttggcagtggtagagagagaggaaggagaatggattatattttggaggcaggtttacaatttgttaatttggatgctacaggatgagaagaatcagtggccctgttagtattttttgctactgttacttagagggcagaagttatgaggcgagtagacaatttagaatagaaggtacatgcatagaatctgagattcatgagttacctgccacgataggtttgagattccaaagatatctaaagagggatgtcaaataaccagatatgaagaagtgatttgtttgtttgttgttgtttggtttgtttaggtttgactaacctttaatgtaatcaggttactctccagatgagcatatcagtctacctgagaatacgaagatcagtttgtccaggttgtaagatacctggtcactcatgccatatatgttcgcatctttgcttatatattcttctaaagaggctacaagtgaaaacaagtaccaaagaaattatccttatgaccaaccaacgtttaacaggaatctattacaaagaagtcctaatcaaggtacgagaatgtctaggtcttcagtttgattccattgataaacatgttggtttttatgacaataccatgcactttttattactataggtagtacaacttgaaatcaggaatggtgatcccttcagatcttcttcttcttcttcttcttcttcttcttcttcttcttcttcttcttcttcttcttcttcttcttcttcttcttcttcttcttcttcttcttgttcagaattgttttagctatctcagggtttttgtttgttgttttttcatatgatgttgtccttttcaggtctgtaaataattgtttcaatgttaatggtgattgcattgtatctgtagattgctttttggtaggatggtcatttttactaacaatccatgagcattggaggtttttttaatcttctgatatcttcttctgcttctatttcattaggggatataagtctgtttaaattatttatctcaccttgatttaacttttggaatttgtaattatctatttcttttggattcttctaacttgttgaagtacaggtttttaaagtatgtctttatgagtctctgtgtttctttggtttctgttgttaagccttcccttttacttctgattttgttattttggatattgtctctctctgccttttagttcatttggataatggtttgtctatattgttgatttaagaacttagtctttatttcattgactctttgtaatttttttctttgtttctattttattgatgtcagccctcagtttgattatttcttgccatccactcctcttagatatgcttactcctttttcttccagagctttaagtgttctgttaagtttctggtctctccagttgtttttgtttttttgtcttttgtttttaatgaaggcaattaatgccatgaacttgcctcttaaaaccactttcactgtgttgcaaaagtttggatattctgtatattaatcttcattgaattataagaagtcttaaatttttttctttatttctgccttgaccaattttccattctgtagagagttgttcagtttccatgaatttataagctttctgttgtttctgttgttgatatccagttttaatctgtgatagtctgactgagtgcaggaaattttttaaatgttcttgtatttgttgaatcttgctttctgtctagttggtcaattttggagaaaggcccaagaagtgctgacaagaagatatatttttttgtgtttaggtgacatgttctgtaagtatttgttaggtctatttggtttataatgtcttttagctctggtatttctgtgtttagtttttgtctggatgacctgtccattggtgagagttggagagctatgtctcccattaacagtgtgtaggtttaagctgtagtaacatttcttttataaaagtgggtgcccataagtttaggtcataaattttaagaacttaaatatcatgtggattttggctttgatgaatatgttgtatcctcccctatctctttcaactagctttagtttaaagtatattttgttagatgttttttctttttatcattttgtatggcttcattttgttagatattaaaatggctataccagcttgcttcttaggtccatttccttggaaaatctattcccaaccctttaccctgatgtgatttctgctcttgatgtgagagggtgaatttgtacagagagattttggcatcactatcacatagttaacttttaattttaggatctagatacaagttttcaaggcccaaatgtaaacagaaagagaagaatattgagaaaataacactaaacttgtggtggtttaaatttgaatgcctctaataggctctattatatttggatatttggtcattagggagtgatgctacctgacaggaattagggaggnnnnnnnnnnnnnnnnnnnnttgtactagagttaggtaaatttgtgttaaaagttaaagtgaaatggttctattagcctatatgaaacttttactttaaagtagtaactctgttttaccaatggccattctgttgaaaaacagctcctttccccaatttcagtatcgaagaaaaaatatacttaggtagctagctacttgtaaattgctccaagctgaacaaagtgcttagaacttgtaacttgttcacaaaattcatgctaaagaagattaaaattaagattattgaatagagtctcacaagtatttcataattcctctactgggctcaaggacctaatgacagctggtgagaggagaaaaggaagaccaaaacagttatataaatgtgcaatattattttagcttatgaaaccttgtgatggaaaagatgttctgattccacatagagatattgtactgatgggtgtattgacattattgaagtaaagtgagggttgatcatttttgcagtgtggtcctgaataggaaagcttcacctgtcttttgttgatgataggattgctgctaaaggatgaaacaaacaattagatgaatcactactaccattattattgcttgagaaaggccgaataactaactacccttcatgatgggtgcaggtggacatgcaggcagaagtgcaagtatgatgtaggaagaggtatagaggcaagtgcagatgtaaagacaggcggaaatgcagtgccagaaaacagacagagtaactgcagcttccttcttcctcttggactctctcctcctgcaagcaactgcatcttcactcctgtccaggctatttctgcacgagaactcttgtccttgataaccttgtagaagacccagtcctctggttcttacaatctttctttccttcctttaaaacaatctacctcctatttatttttcaatattctttgagccatagatgtaagggttgcaaaatgacgaatttcccagacttagggatcagaatgatgtcgctgagctaagatgaatgtatgtcctacaggagacccaagggaggatttgcttttctattcttctgggtcccacaggctgcccatgtttcctggcttatggaagattgctcttccctttgctgtagacttataaatctctgtctctgccttccttttataagaacttctctgaattggtacatttacacaatggaatactactcagctattaaaaacaatgacttcataaaattcacaggcaaatgcatggaatttggaaatattatcctaagtgaggtaactcagtcacaaaggaacacacacgggatgtattcactgataagtggatattagcccaaaagttcagaatatccaaggttcaattcacagaccatatgaagcccaagaagaaggaagaccaaaatgtggatgcttcaatgccttttagaagggggaacaaaataactcacaggaggaaatatggagacaaagtgtggagcagagactgaaggaaaggccatccagagactgccccacctggggatccatcccatatacagtcaccaaacccggacgttatggtggatgctgtgaaatgcttgcagaggaaagcctgatatggctgtctcctgagaggctctgccagagcctgacaaatacagagggagatgctcccagccaaccattggactgaacgtggggtccccgatggaggaattggagaagggactgaaaggagctgagggtgtttgcagcctcatggggggagcaacagtgtcaactggccagacgcccaggagctcccggggactggaccaccacatggacacatgagacccttggttctggccacatatgtggcagagggtgaccttgttggtcaagggaggagaggcccttgggcctgaggctgtttaaaaccccagtgttggggaatgccagggagggaagacaagagtgagtgggtgggtgtggaagcagcctcatagaggcagggggaggagaaatgggatagggggttttggaaggggagacctagaaaggggtaaacatttgaaatataaataaagaaaatgtccaataaaaaattactgaactataaaaggaaagaaagaaagagaaagagagagagagagagagagagagaaagaaagaaagaaagaaagaaagaaagaaagaaagaaagaaagaaagaaagaaagaaagaaccaactactgtgttgacattgggtctgtgtggataatccaggagatattttcacctaaaatccttagttcagtcacatctgcatagtcctttggtcatggaagatgatataggctctggggattaggacagaacattttagaaagcccctcatttagcccatgaccacattcactgttattgcatcagatagtcaaggaaaaaatgcgaagccgaagcaagctttttcttcctctttttatttaatatattttcatacagtactttttagtcatattctcccttcccacgactcctctcaaatcctccccacctccctacccatttattttctatctctcaacaaaaatcacacccacaaaacaaaatcaaaccaagcaagaaaaaaaaccaacaaaatgaaaagctcacaaaacaaacaaaggaacaacaaccacaacacatggggttcattttgtactggacaatcactccggagcccagggcctgtcctggagtatagctggtgttctcagtgacagtcaactggagattttgctttgccaacatgcaaatagtttcttggttaagggtgagattgcatgcccacttccccttctcagtgctgagattctgtttggcttcttgaatctgtgcatgtcttgtgcttgttgtcacagtctctgtgagttcacatgtacatttttccctttgtatctggaagacactgtttccttgaagtcatcaaacatctctgtctcttacaatctttcttcctcttcctccacatagatccccaggccttgtgggggaaggggtttttgatgaagacatcccatgtaagaccgagtacactaaagtctctcactctctgcacattgtccagtgtgggtctgaaggcatcttttaaaattaataacaagagctggagttgcccacaaagtaaaagttgttaagtagttggtaatgagattatatttgagtgagttaataatttaagaataccattttggtttaaagccagggtctatataatccaataactacccaagtataacttgtttgaaaccctatccagcgacagcaaactggacaatctaattatttcttttcaaaggcacatacccagttagaaaaagcgtactagaaagatcagaaggatatgtggtgatgagtatgtctccaacggcctttgtttttgagccactcagtagctccttccagaggtaaccagacaccaattttctccacctgagtcatcatttccttaccctgaaattatgttgattatttagaagtcttgctctagaatcatttctgcaagagttaatccattcccacttttaaaacagtatctatactggttggtcagccatgaggaacatttcaattgagccaggttgattgtgtgtctgcaatttcagaaggctgaattaggaagcttgttgcaagtttgaggacatcctgggcattggtagagttcaagatcagcctaggcagtagaatgagactctatctatctatcatctatctatctatctatctatctatctatctatctatctatctannnnnnnnnnnnnnnnnnnncccatcatgtatttgaatgcttggtaccagtcaataaactgttacaaggcatgtccttgttggaataggtatgtccttgttggaggaagtgtgtcactgggactggactttgaggtttcaaaagcctacaccaggcccagcgtctctggctttctgcttgctgccttggatcagtatataaagctctcagctctgcctgcaatttcctgtttgcatggccccatgctctctgccctgttgataacagactcgtctctgaaactgtaagcaagcccccagttaaatgctttcttttataaacattgccttggacattgtatttctttacagcaacagaacaatgactaacacacagtcccaggagataagacgcccttgtttggccttcataggcagaaggcatgtgaatgcatagacaaacgtgcgggcaaatcacccatacacatttaaaaaaaagaaaagcaagaaagaaatttctattaatttcttccaaaatagtcttgtttatcgatataaaacatgtttgtttaagctatataatccctatattgacacacatatataggtatttggtcatgctttaattttattttcacttgtttccttttttttgtttttgtttttgtttttcaagacagggtctctctgtgtagccctggctgtcctggaattcactttgtagaccaggctggccttgaactcagaaattcgcctgcctatgcctcccaagtgctgggattgcctccggagtgctgggattaaaggcatgcgtgaccacgcccagccatttcctaaaaagacaaataaaagagcaattgtcagcaaagcaggggcctttaagaaacatctcctttagaatccgagactttcctcaattaaatggtttgcctttgagaagtcagttgactttttgttggcttcccttgtttataaaatgagcataattatatagggcctacttcctagaattatgtgagttaagttaagtactccataaaaagatggtttggggttgaccagatggcttagcagaaaaaggagcttgctgctaagcttgatgacatgagtttagtctctgtcactcacctggtggaaggaaagaaatggcttctagagactcggggcaacttgtcctctgacctctcccttgctcttcttcccatcccctccatatgctctaaatgtgatttttaaaatgtgatatttaccaggtatttaacaattatgtttatgaagaactcttattgttgtataagaataatcctcctgtaatttgctttatcaaagtgtgttactggtggctagtggccctgtgtgtgtgtgtgtgtgtgtgtgtgtatgtgtttccctggggtcatgctctccctgtgtgtgnnnnnnnnnnnnnnnnnnnntacaggataaagatttgctactttattctatgtttgtttgtttctttgttgttgttttgttctttaagacagggtttctctgtagccccagctgtcctggaactcactctgtagacgaagctggccttgaactcaagagaactgcctgcttctgcctccccagtgctgggattaaaggcgccccactgccgtgcaccaccactgcccagctgctgctgtaatttttaactacaagaattcttttgacttctaattaattaaaacatgacattttaaatattggtatctggacagccttgaacataaaatgaagagaggattagataagtgcctatagatctgctcctaggatgtgctaaatgcacctatgcctccctcacacccagctctagagtacccaaggcagtgtatttactgattgaactttcattcaggtttgcattcaaggggcaatgttcacttcattttatcctacatacaagttgaatactgaaaatttgttcaaggttttgtaatagcgacctctactggctctagctgaggtatgtgcaagtggattttaaacacctgaagggagctaatagtgaattacattaaagtagggaatttagctattataatggctcgttctttaactgaataacttctagatgttagaattgaaatagtctgctaaagatgggcctgttcgttcatggtaggtccaccatgttaaagcacgggttagcagtgcaggccactgaggctcgtgacctggatgatacggactctcacatgaatgctacttgtatttataactggggttaaagtaaggacgaaataaataagaatttattggagttgatatttgcaagtctccttccatgaaactgtgaatgatgtttaaggtgacttaccagtcttgccattagtgttaatgaaggtgggtgcaggatatgatttacctgttaataaaaactgtccttagtcccttagtgacctaactaagaaactaacacagtgacaatcacagacttttgtttgcagtgtaaattacgtgaaaagctcgcgcatactctttatttcacagtaagctttaagtgctgagctgtatttgcttgttgcttagttattattccctcttttctaaggaacgtgttcaaaagagttttcctcatccaattgataagtgggcaatagctgatgcccaatcagccattgaaaagaggaagagacgaaatcctttatcgctgccagcagaaagaattcatcatttattaagggtaagctgaaataagccacatgacctatgaaaagcaaaataactgaatggtaaaatccttttacattttccagggattcatgttgaggtaagggggtgctgtggtagtgagtaaaggttggacaacgtggtttcatgtcacttcaaaccagtagtagtaaatcaaagacacctggaaaagttatattatagattttatttactccagggttgctagaaaatataattgtagatatttctctctttctggtcagagctaaatatcccataaagctttaaagtctgttagcattttgtgtagggctatctgtgagactgcagtgagggtctgtgtttttgtgggacaaacaagctggtcctgcttaaataagttaaccactttagtgtacccagaactagaaaaatgccaagaatcctaagagtgctagtttgggtttatttaccatgacaaacaaaataannnnnnnnnnnnnnnnnnnngtcttacattattgcccaggctggccttggcctgagtgctggcattaaaggctggcattgctacgcccgacggactgacctgtgctttctcctctcctgtaagacttcatcttccttgggaacttgtggctccacagacgcacatactctctgtgaagtctaataataggatcatttaaatgcttagtagcacatagcatggagggtgtttgttttgtttttaattttgtttttcatggaaagccaagagtgtgtcatcaggtaatataccatatgctccccacaccaagctcagactttgtggttaaaccacttacttacacactactgtgtactgctccagtactgtacacaaccagagacgattctgcttccctctgtgtgtacgcacgtgtgtcctacacataatagggtgtgtgtgtgtgtgtgtgtttctcatgaatgaactagtgaaaattaaattattaaatattggtagtgatgggcttcagtgaaagttaagctgggttgatactgtttaattttgtagttgattgattagattttactgtgtatgacgtttaaatgtgctttccttttaatttttcaggaggtcctcggttataaaattgaccaccaggtttctgtttacatagtagcagtattagaatacatttctgcagatattttaaagctcgtggggaattatgtaagaaatatacggcattatgaaattacaaaacaagacattaaagtggcaatgtgtgctgataaggtaggagaatcagcttctttgtgttgtattcataaattattacttatgatttattggatgctaatatactcttcagaaagaatagaattgtgcactgcattatgttttggggagagatttccagtaacctcatagcatacatccaggttgttactgtatggaaataagatagaggtggctggtacttaagtggctttttaggaaagaagatattttctgatgggattctattccactttcttcacactctggccattctggttatagattctacttatgtatgtattagtgtttattctaacagaataaagtgaaagagattatctggcctgaagaattaaaagtgttgtgatatttttaaatggagataaagtacttgatatttatgattacaactgaaaatgaatacaaagtgtttgctactttgttttaaatgtgtgtgtgtgtgtgtgtgtgtgtgtgtacagcgcagggattcagagaagtcggaacaagtattcgatctcctagaaatgggcgcacagagggtttatggtgctggaaactgagcccaggtgctctgggcaagctgtgagtgcttttaacagccaagtcacctctctagcccatctgctaaaagatttatttttattactgtggcacatgggaggggcattctgtgcacatgagcacagttgtttgtgaagaccagaagaggtaccagacccctgaagttataagcagttgtgaattgcctgacatggcttctgggaactgatacacttgtgtgttcttaaccactcgcctgtctgtctaaccctcttgcttgctactttttaaatgaatcatataagtaaaatattttttagtatctattatgtgctcatacagaaatgaggtacagaaaaatgtgtttaaaagggggctgggatctttctaactggtagagtgtggcctaggatgcataaagccttggatttggtttctggtcctgggtaaacagaatgagatgcgcgtgtgcaagcagaaggatcagaaattcaaggccagtcttggctacatagtgaccctatggctagcttcagttatatgagaccatatccctatagtttaaaaaatttttaaaaaacaatgcttcaaagttgttgaaaggtgacttacgttgtagcataaggtaaactatactgcagtgacactgtacagggccacaagagtgggaagggtgagtttcagcaagagtaaccgtggaaaactttttgaagaaactttttgtatgtataggtgtttaacctgcatacatgcctgtcgccatgttgatgcctggttgccatggttaactgattctctagaactggagttaagattgtgagccaccttgtaggtgctaggaatgaagctcaggttctctgaagaacattaattgttcctaacctctgagccatctcttctctaaagccatctcttcctccccccccctcccccacagggcatgtttgtcctcttgtgggggtgggggggatgcctagggcattaaccttcaagggagactacactattattactgacactttcattttacctctgactacataggtattgatggatatgtttcatcaagatgtagaagatataaatatcttatctttaactgatgaagagccttccacctcaggagaacaaacttattatgatttggtaaaagcattcatggcagaaattcgacagtatataagagaattaaatctaattataaaagtttttcgagagccctttgtctctaattccaaattgttttcatctaatgtaagtatattttgttatttttgcatgtgttgttaactttcagttcaaatttgaagttatataattcatgatttctaatttgtcctgatcacaaataaagtgctgccacagtttcaagagattaaacatcagaaattgaaagacagaaatctaaaatagactaattatgtaagtgaaaatgaaatcacataataatcaatttatctcaggggatagagcgtcttgtgtaggtgggagatatttttgattcagtgacttatttgagtcatttaagtgatacttatcaacagcagccgtattgtgggacaccacattcagaggagtcagcaacagtcctgtctcgtcagggcggagctggaaatgtaggacgaagagtcgtaatgcaagagtaacagcggaattattgggaacacaagagatgagccgcagggcagtgcccgtgctaaccgtgctagacctaaagaacgttcagtgatgagaacagtgccagctctggagctccaggcatcgcagttcctgggcattaaataaaacggagagcagctgagagcacagcccagtggcagagcacttgtctaatctgcctgtgaaaccctgggttcaatttccaccacttagtttgtaaatatgccaaacactacttattgagttagtttagatgtatgaaatgcatggtatttaaattgcttcattaaatttgctttaaaaaatagcaaaggagggataaagatatctgacacaaaaatcagcaatcaaatttgctaaatggtattcagtatcagagaattacaaatcgaaaccctagcgagatgcttgcgtacacgtcttagagaaagttaaaaaaagacagtgtcagacatggagaagaatgcagtgattgactgctcatgggtttgcaaaatttcaacattacttgtaagttataaattaaattagtaaaattggctggttttgtaacacatttctacattttctgacaattctgttctgttagttttttgcttagaagaaacaacaaggccacacaaaatagcagttttattttatagctcagtgcctaccagttgtgaagggagactgtgctttgctcacacaatggtcagcttttcaccaggagtaaagaatgcagggctgacgcatacatctgcatagctgaacctccaggactcgagcagagattcgtagatttgtctctctacttcctggacaataactgtctagtcacagggagtgagcactcattttctggctgggaggatggtgggagctgatacagaggagacataagggaacttaaaaattttttttcaattttttttttttttttttttagttttatgtgtgattnnnnnnnnnnnnnnnnnnnncacacacacagtagagagagagagagagagagagagagagagagagagagagagttttccttctctttgataaaataccttgacaaaaacaacttaagggagtcgtggtttgtttttggcttacagttcccgttcagcccaggagagacctggcggagaaggcatggcggtcaggagtgtgaggcctgcttgtcattttatagcctcagtccagaaggaaagagtgaacaggaagtggggccagactataaaaccgcaaagctggttggtccccagtgactacttcctccagcaaggctccgcctcctaaaacttccataaccttactcaaagtagcaacagctaggaaccaaaggctcaaacctgtgagtctatggtggggtgagatggaggagtatgggggtggcactttatattcaaaccacaatacatacatttactttgcatccatatcaaattgtgttgatacttaatttcaagcatgtgaagatccgggttttgtgtcactgaagtttatatagtctaagaatctcagtgtgtgtgtttgtgtttgtttgtttgtgtgtgtgtgtgtgtgtgtgtgtgtgtgtgtgttctttgaatagggactacaaaattttgcggctcatatgggtggagtcatccaaactacaggcccagccttgccagtgtggtgagtgaacccagatccagtgcttggagtaggtccaacctaatatctactccatctgcgagctgctggtgtgtgtgtggaggaggtggtcctgcagaaccagatccagagcccatcatcaccatcaaagatgaaaacctgaagcacagttgtgactcaagagggtggcactcctcaggaccttggaactgctccgaggagcccgagagatctatggagctctgaggggagacaagaaggtagctacaggggagtctgcagagcctacagtatccctggaacaactagagaagggtaaatcctatgggaagatgctttttagaaagtagacacctgaaattggaagggaagttcagggacagagccactggtacaggggagaatggcaaaactatagacacgagggtatgggagctatatgggaatccttgccacaacaaataaagaatagggcatgactcaataatagggtctgaccttggcctgctgacatgaagctgctactggggctcgtgatactgagagaagaaaattgctggacctctacactgctttcaggctgcaaacattatggtcctgcccgatgagcctagggatcgttggcatcaaaagcctggaggtgtgtagtagtttggagctcacaagatcaccctgagtctgggccacaccaggatatccaagatgaatctcagccacagttcagtgtttattatcataataaacagaaagaatagaaaccttgaaccaaaccaatgactccttgtaatgagtatttgcatataaagctgtttgggcaaatatgtatataccatgttgacactctgcagtttgcaatgccactccaatgaacaaatatacagagaggtgggaaagatgtaggaacagaggagtatgtgcctggcagagagaggcagaactagagatgccacggtggtgacaggtgaggaagaaggatgcaatgaagaggagagcatcgatgcggaacagggcgggcagggtggtgtgcagaagcctggaggtagcacaggctttggtcccaaacacactgccaagctgcatggttgccctggatgttcaagatagagaaaggtccatttttggattgggccttttctggaaagccctccaaggtctgtgctagccctggaggtcatgttgttatctgtgatccaagctactgccagggcccatgctggtgtccatggtccctgctgctttctaggccccattgatgcccaaggtatatgatctgtgttgccataggaagccagattgatgagtgtggcctgtgctaccacctgaggtcatgttgttgtctgtggtccaattggccacccaatagtcctgtcagtgtctgtggtgcatggtgtggctgggcccaagttgatatcgatgttatcatgtaaccaccaaaggtcatggggatatctatgatctgtgctaccacctgaagccaggctaatgtctgtggcccatgttggacccagaaacttgtgttgacactgactataaagatcaaggaaatatgttttgcagccttatcaatgactggaaactcagttgagaatgagagatatagacggcttctgtgagaacctatctccatcccccaacctcactacccatcaacgaaagtctagacaggaagtcattgaagggaactcttaaaattatttgatagagatgctaaagtatagctcttcacagctgatagcttctgatggggctggtgaacagcttgggattgggatggggaaggactcagttttcattaaagggnnnnnnnnnnnnnnnnnnnntagatttgtctctctacttcctggacaataactgtctagtcacaggggagtgagcactcattttctggctgggaggatggtgggagctgatacagaggagacataagggaacttaaaaattttttttcaatttttttttttttttttttttttttttttagttttatgtgtgattgttttcctgtgaaggtcagaagagggcactagctctccttggactggagttaatagatgattggagctgccatgtgggttctaggaccttaacttaggtcctctgggagagcatctattaactgctgagccatctctccagttctcataaggaagttttttaagacaagaaaacattgtgaatagtgactgttaggaggttacagagaggaataactgtatacagtctcaccaaaaagtacatttaaagtaggtatatctcattgcatacaaaccatacttcaaaattaacagaataaaaatagtaatcaacagattttaatagaacagtataaaatttatatggtctccaagaaatgtaggaaatgaccaacttattagcagcagtataatgacatttgacctgtttgcatagaatgttcccagtagtagatacgcacagcagggctctggactataaatagaacaatgggaagtcacttttgctaatgagtttaagttgtcttttgcagagatgaccttagtttaagtgtactgaaagccagtcagtggtaaatacattttacagtttattcacgtgatccacacacaggaagataaaattgctttaaatgagctttttggtgagatcgtatggactcatttatccttattatttaaccatgccattgtagagatacacaatactttcttgccttagacaatttctttatatcccatccacattaaccttcgccatccttattcccagaaagccagttattttatgatatgttaattaaaggttgatagaaaaattacatgaatgttagacagaaaacaagaatatcacagttgaatagacaattaaaatattccttcattttcccattacatgtctggtaaacttatgtatctagataaagctgtactttatcctgttctccagccacaacagactgaatgcagagacaaatagaaaagtcctgttctctgttaaactgtattgaagattagtaaagagagtatgaagatgttctaaaacaaaatgattggtagagagacatatttcttaattgtatatctatcactaaagaataaattttgaagtattttcttattgtaagtcattaaaattcctcaatatctacattataccttgattataaaataatttttttactgaaaagatatcttgttatacaatacaatatgattgaattaatttttctttctcctccgcaggatgtagaaaacatattcagtcgtatagtagatatacatgaacttagtgtaaagttactgggccatatagaagatactgtagaaatgacagatgaaggcagtccccacccattagtaggaagctgttttgaagacttagcagaagtaagtatatcaattatattgtcaattatatagcaagagaagtctgtctgtaagtacattggcattaaaatggggttcataattcctatttccagctcaagtcacataccgttgcttcttttccatcataggtcaacatttattactgttaccaggtacagaaatagttatcaagcactacgcccagtctcggtgtcactctgaaactttgatagaaagatcaaggcaaggccacccgtgagtgagaaaagcttgggtgtagggtcctagtcctcacagctcactgctcagatcactgctgtgtattacatgtgtggctccaggcgagttaccgatattttgcttctctatacacatttgtaaagcaagaagaataacaataagaagtctcaaattttttttttgtaagttaagataatctcccttaaatatttggctaattccctttacatagtaaaataaccagtacgtgatagccacatttgtttttagaattgaacaatgaggtgctaggaaactcagcccatggcatagacagttcagatcccatgggagtctggtaaccctgagtatctccaatgctaactgtgagttaattgtagtgagtcatcactggtagtcactctggggtttcttgctcttgtcctgctctaaagcccatttagtcttttagtataatggtgctgagcccatgggaaagaagagaggaaccagggatctacctctttaggtaaactctccccagcaaacatgaggcccttggtttagttcccagggccatatgaactgggtgtggtggtgcacgcctcgtaaccctcagtaatgggaaagtagatgcgggggtttgagaagatgggtgccattctcagctacagagcacgctgggcgtcaggctagatccatgtgaagctcttagagctctgtggaaagcaccaagaccaagggctgcttggggtttacaggttacaacctgtcatggcaaaccagagtgggaaccttgaggcgggaactgcagaagactggaggatagcagctctggcttgctcagcttgctttcatatctaactcagaacttacacccggggatggcatcacccacaacccacagagggcttagaacttcatgtcagtcaccaatccaggcaatcagttgggggtgtttttctcaatatcggttctctcaatcttttgtcaagttgacaaatgactacccagcacagaggttctatctcagaaagcatgggacaaagccagtgccctgggtaggaacctccaggagagttaaggagagaacactgctcaaggggctgcacagcacagggtcagggatgggacagagcaagaggagttgtcttgtttatagtctatagttggcaaatacaagaaaacactaaaatattaggtgagttcacagtatcggcttagagaaaggacgagcattcctatgctgtcacacatgccagaacatagaactttacaggcagaaggcaccctgtctcagaggcacagtaagcatgtggggcaagcgcgatggccccgcccataaagcactgtgcaggcctaacacttggtacctagggtgtcccagccttaagagtttaatccctagaacgtgtggtagaaagagaactgacccccaaatgttgtcctctgacctgtgcacactagtacacacatacacatacgtgattctactattactactactattactattactactaatgataataaaactcaaaaacctaactaaaagtatataagacctattaagaaaaattgtaaaatatttaggttgatatggaatgtacaagtacatggtaatacattctatgttgtgtttatggatggaaaaactcagcattgcattcatgttagtcattcacaagtagccagagcacagcaagctgatctttaataggtacaaatgaggtgtggtccatgctcataatcccagcactgaagccaggctttcgttgcaagttctagctatccaatgagatcctatttaggttgtctcagccactgcctaccacccactcagaagaatgagggaagcacatggaggagatttgcttcatcacagatttcagtttattaaataggaatatcagagttgctaccagtataggcagacaacgaatgaaacagaatggaattacagttttgacatatggcacagattgcattgatcagtagggacagaacaagttgataattaaattacgagttgacccaaaatgtaaggaagcaggaaggcctggagcgtcacctgctacgtgacactgtatggtgtccagagccctagtccagagtgttcagatatggtattctggctagtaactctttcttaagtactttaaaaacagtactagaggtaattaatacataatttgtattttatcttgaatcgcttgtcttatttcttacctactacattcatccactgatcttctagaaccagccactgcagaggtgaggcgctctggacctgaagctgggtgtgtgtgtgtgtgtgccatatagtagaggtcggaggacagtttgttaagtcacttctatccttccactctgtgggtcagggattgaactaaggtcatcaggcttgtcaccagatgtgtcaccagatgtgtcaacaggtgtctttgctcaccgacctttgtctgtccctcctgacagttttataactggaataggccacaggatcaaagatgggaagggccctactctctgtgctaaaatcaatagacctactctgtgtttcatcagcaatcatcgtactcttttagaccttgctatgagtgatatctcaatggtgattggtatattaatgatgatggattttttttttcactttggattaagttagttttatgaaaacagaattttaggtgatagaaacagttacttcttatttacaaaatagggaagtaaatgtctaacaccaaaaatattttttagatttattctatgtattttgcttctatgtatttgtaccatatatgtctctggtacccccagaagcccgaagaggacatcggatatcctggaactggagttgtgatggttgtaagccactgtgtgagtgctgggaaccaagcctgggttctctgcaggagcaatagtaactgctgagccatttctccagccctccccccacacccggaagactcagtccctaccatcagcactctaaggctcgagtcttacataccgtctgttgtccaggttcagctgtgctcgtctctagggccgggtcaggccactctcagaacaactcctggttcacagaagcggaagctgtggccgagaagcagcacagcacacagtgactctgctgctcagaagaaagaactcgtggattctttcacttgaggatattagatttattctgttaaaattataatggccattcggtttttatttggagcctttaggaggaataggtttctgtagataagtttataatttaatcttttgtattttgtgtggtggaccatttcttatttatgactatttttactttactgtctcccttttttcaggaactggcatttgacccgtatgagtcatatgctcgggatattttacgacccggattccatggccattttcttagtcagttatcaaagcctggggcagcactttatttgcaggtatagtgattgttaaattgcacaatgttagaaaagtaaactctaaaaaatattaaatcctttccctttttagtccataggcgaaggcttcaaagaagctgtccagtacgtcctgccccggctgctgcttgcccctgtgtaccactgtctgcattactttgaacttctgaaggtaaaaaaactcagattgttatttataaagcattcaagtgtcatcgtttgccacttcacttgcaaacatgtgagcatccacacacattagtctatgttctttttctttgtttagctgagaagcaattttaagcacgttatccaaaagactaacgtgctttctgactacttaactgtaaagcagttgcccaggtttatttattttacttttatctgcatttattttatgctgactttattcgtgtgccatgaagttttgtttcttcagtttcttctggggtatctttttctgtgcagcctcctcttctggctttggaacggtcagtgaggatcatgtcaatgtggcaggggggccatgtatgggttaacccggccatgagctctggaggtgcgtctgtctgtctgtctgtctgcctttctgtcggcgtctcaggggccgtgttcacctggatttgctcagtgactagaaatctgtctaaacccttaagttcagcattactctctcatttttaagtgtgtgaagcaaaaattcagcactcttttggctactgtccgtgtgtccagccccactgtttggcctgggcacacctaccgccggaacggcacacattgcttctttaaagtgacatccttcagatccttggtggctttgtggatatgcatacccttgatggcctgggcagtctcccgggtgttcttaaagtgaactcgaaggtttgagcctcttgatttgtatgattttgtggggttttctgggtcaagccagtgttgaaccatcttcacaggtcacctctggccacttagaggaagagcccagttttatttttaatcatgtggtctgtttgcttatatggtgattctttgaaagcaactttgtatatatgcatccacatctccatctgaggacctcaatagctacagggactctcctcagggacccaatatgaaaataaggctaaagtaataaaaactgttagttcaatagattttcattgttcagcactgcagcaatgtctgttaaactcagtgttgttattattttagaagcagtgaatttgtataccagtaaaagttctccaactgatcatagttcaaaatattaagtaaaaaaattctaaaggattagtagccacataaaacttgaaaattagtttataaataaaagcaagaagctttaatgagaatttgaaaggttataaaatccaagcagtttaataaggaaaattaaggattgcaagatggcactgtgactggcactcgtcacagaagcctgacagcttgatgttgacccctgaagctcacatgggaagagagaaccagtgtcccagagttgtgcctgaccttcatgtccatactctcacacacaggcgcgcacgcgcacacatgcgcgtgcatacacacacaagagaacttataggatggaaagagagatggcttagcacttgctgctcttctagaggacctgagttcagtttctaacaccacactgggcaactaacaaatgacctgtaactctacattcagagagctccagtgtctttgtctggcctctttaggctcctgtgcacacacagcgtacaaacagacacataattcaaaatggcttttaaagaaaaagttagttaggtaccaagttcaaccttgtctcaaaacaatcagaaaggccagcaaggatgtgctactactgtgtgagtgactcctgggacccatgtggtagaagggagagacttctgcaagttgcccttcttatctgtctccatacatggacacataaaagcaagcgtgtgcacactctaaataaataacttactttttaaaaaggaatgctttttaaaattatctggtatggtggatcaaacctatagtaccagcacttgagagagactaaggcaggtagattactatgaatttgagaccaggcaaagctacatagagaattctaagccaatccgggctacagtatgggaaaccttgccttggggaggtgtgggagatgattttcatatagataattaagacttctcaggactttaggatgtaatgttgttctactgtgtgtgtgtgttcctggttcatagtatgacttgccttacattgcaaagcgtatatgatatggtagtacatggaacagggcacggatctgtccatacacacactcatcttttttccattctggattctttcagaatgaatgcatgacttgaatttttatttatttccatgtgtacacacaagcaaatgcacacacaagtgcaccaagtgtacatgaggccagaggacagctgacaaagttggttccctcctgccaccattgtgggtcctggggattaaccttgaacccttgttcctgtcaagctgtctgccagtcttactggcgcttcagctgtgtctgttggtttaccgctcagctcatttttgtaggggaggattttcaaggtgtaatactgtgtatgtctgtaggcaggtggtgcataagtatgcgtgacaggagtccacaccggggagctgaagaagtcttcagttattcatcaccttagttttgtgtgtatctgacagggtcttttattgaatgtagaacctgccaattcagctagaattgctggccagccattttaagggtctgcttgtgtctgtcttgccaatgctgagattatagctgcctaattgtggtctttttgtatttttaaaggcagggcctctgtatccctggatgtcctggaactcaatatgtacactagactggtcataaactcacagaaatccacctgcctctgcctcctgagttgtgggattaaaggcgggtgtgtagtgtctaactttttaagtggcatttgaacttgggtcctcatacttaggcaagcattttaccaactaagctattttcccagctgcctcaggttctgttttgagatgctggtatcatgacatactctaaataaatggagaactggtcaatatacactattagaaggtttgaaaagttgtatgatacaccaatgtatttgtaggttacttagggaaactattgaagaggttccaatgttcagtgaaccaaaagatgccccccactgcaccctctgattcttggtgttctattttcttttctttggagaattgttatgaatcctaaatgcccatctatgtactcagtaattctggagacagctgattgcatgagattgggcaggtggaaccgaatcataatttatctgtatgtggaatgggttcagaatttggtgacactgacgtctttctacctgttgtgcagctagagaaaagtcactttatttttttgatccctggttttcttgtttataacctgcttatttcacaaggtaaggcattcaaacagtgcatttgtaaaggttacttcatgaatgacaatgacatcggcacttgcatgttttcagcactggagatgtttcttactgtctgtaatgctggccactaaccacacccacattttcctgcccaccagagctctgcttttctttatagtctctgtctttgttggctagtgtgggccccacccatcacaccacctttgattcttctctcttccttactggcagcactcatgatttaacatcagaaatgaccatgtattcagcctcaagtgtccatttgtagtgacatcaccttcatatcactgtttagacacaataacaacttctttatatcatctttgtaattccttgaactctgagatggaaaggtacagttggttccctggcacctgcaacaggaagtctagattcttgagttccactgctgctgtctgtagttttatctcagtcgtcagttctgcccatgagcttgagcagccctgggtatgccagctccgtgcatggtgccatttttgttctttttcctcccccctggcctggtggaatccctctttttctaagcccccttttatttgagagtttgttgggttgcagggtcagatacccctttgttcccaagctgctgctgctgctttcacacctccttacagatctgtcatattggtattgtctgcctcgtcttcagacactatgttccctgaggaaacagaacaaagcctgtatgcttctgaattctgcctagcacagtacctggcatttaaattgtttattaaatgctcattaaataatgaggagcaaaaataggtattttctcaattcctatctgttgtagctttaaaaagtttaactgtaaatttatgtatatgtgtttatttgggaaacttagaatgccttaaactttacaaattcataggatagaattctgctgttatttgcctaacagtgtcagacaaagaaatagagtaatgtaatgtttcctgtgggttggggacattaggaagagatttgtcaacggatacaaaacttgagttaggactgaagaaggaaagaagtattaaactttatagtgttaatcgaaatatgattaaaatgaatttaataagcttactcagaaaatattaaatcacatggaagtataggattaatctaaggggctttgcctaactttgagttagcttcctaacatatgttacctaggtaatgtaggaagataaaggaaataggctctgacttcattagaatataagtgttctgcagttttcccttttttttttttttttttttttttgtaaatttgctttttcaaacccttttcgcttatcagaagaagtgagcatttgccacaagccttgaaatacaacctcggctccatctgcttaggtcttgtttgtggtgactgagactctgactctgtgaattcagaaaatgtggcttggggatggggacctaaaggccactcctagatgaatacatataagattacaacatcacagcccactctaaaggctcagggagattgtagctggggatggaccacttaagcattagctagggtctgtcccacactaaccaagagctctcctgtctgagtgcttgggtgaattccttactggattgggtctttttctcatgacagaaggaataataaattcaagagaatttcagcctagtgtagaacatgcttacagcatccagggcctggaacaaagattcaagactagccttcaaaatggaaaaacaaaacaaaaacaaacccatatacacatacatttatgcatacatacatacataacgtgtgtgtgtgtgtacacatacatatagtgcctatagcaataataataatattgtatagttttgaaaactgctgagcagattctaagaatttacatctgagaaaaatatttgacagtatatatttttaaatattttgtcaagcaccatattgtataccataaacatatataatttttacttgtcaattttttttgagacagggtttcattacttgtcaattaaaaagtaaaatttttcaaataaaaaattttattaagattttatttttaatcatatgtatgcctgtttgtgcgttcatgcgtgtgcaccctttctgtgtgaaggtgcctttagaagctagagttgttagacaccctgggactgcactttcaggcaactgtgagcaactgggtaggtgctgggagacaagttctggaagaacactatgtcctcctcttagtcagggccatctctttgatctaaattttgactgattttagtactacttgaatttttaaaattatttcctcaaaattagacagtccttaggcccttttattagttagaaacattaaagttaatattttatgaagtggaaaaaaaacttcctttgttgttgtttcttggagacagggtttctctgtgtagctctggctgtcttggaatctctttgtagaccaggctggcctcaaactcacagatctacctgcctctgactcctgacggcttggatcaaaggcgtgtgccaccatacctgaatcaatgtgagcttttgaaaaatcatatgctcctataaggtgacttttttatatgaaattttgctggctttattaagcaaatgtagattcttacaactaactgtagtgaccaaaactctgattactaggagttggttcacccaaacttaagcagcttcagttataccctcaagaattaccccgttctctttgcagtatgctgactccatcttactgaaggaaaagtgagttttctttcattttaaaaatcaggttaaagggggagtgggtgggtaggggattgggggggtgggtatgggggacctttgggatagtattgaaaatgtaaacgaggaaaatacttaattaaaaaaaaataaaacaatcaaaaaaaaaaaaatcaggttacctgatgcgccagaaaataaacctcttgcttttgcatcggggaaaaaaatcaggttaaagtctgttacgtatgtagtatgtactgttatgtagtatgtactgctgatattttctaaggctataccaaactataaacttagtggctgaaaacattagtcttcagtagtttattctttctgctctagaggcagagagcaggagttgagagggcctgcatcttcgagggtctaaggaacagcctcacttgctctgaggaggcagcagccatcagggttcccctgagcttcatggagagcctcgctctggacgctctggacgctctggacgctgtggatgtggcctctgcctgcatcagatcaggcacatcacttcccactctgtgtcaggcagcgtctcgctgccctttcctttctcacagtcgagctttagggttcggccataatctagcatggtttcatttgattacttaaacctgcaaaaacctatttctaaaaaggttttatttatttcagttaattgtagacattagtggaaaggtctttggactaacagtcatgacccttaagttctggtctttcctgcctattcatctaagtaaatgttactcattttatattatgttggagaagagtagcttctagaaatacaatcattaattcatatgttccttccttcttaaattagggaagccattctagctattctgtgttctgattaacgtgaactttaatcagttacacactgtggagggggaaaggaatgtaagtaactcagtagtagaatgcctgcttactatgaacaaagtcctggcttcagtccccagtaccacaaaaaccatctacagtttgttttgtgttaaaattgctgagtcttattcttgaaaatacttctgtaaattgtgttttctcccccccccccttttttttttggttttttgagacagggtttctctgtgcagccctggctgtcctggaactcactttgtagaccaggctggcctcgaactcagaaatccgcctgcctctgcctcccgagtgctgggactaaaggcgtgcaccaccacgcccatccggctgtgttttctttagaagctccttcacagcatctgtgccgtggtttcctgggagccgctctgtccgtgctgtccgctctgtccgtgctgtccgtgctgtacatggactataccatcagtactgctttgcctttgtttccttctgatagtcaggggccaggagcagatatgaaaaagcccagctctgtagcccagctagccttaaagttgaggggatctttctgcctcagactcccaagcgctggactagttatgggccaccacatcttatgcaggggcctccctactgcttatatctaaggaacccaaaagtcatcaagggtatgagtgactccttttctatgaaaaggtaaatttgggggctggagagatggcttagtgagcactggctgctcttccataggttctgagttcaattcccagcacccacatggtggctcacaaccatctgtaatgggatctgatgccctctctggtgtctgaagacagctacagtgtactcatacatagaataaatacatctttacaaaaacggtaaactttatcatctggataggccatacacattgtcattatcttctgcacagggcgtacacactcttactatgctttagaatgccttcttaggtgaggctgtgcacacacaataccatcttagtagagttttggtgttggtaacggtcgctgtggaaagcaatgagaacgcttctttgctgtcatttacatgactgcagctgctttgtttctgtggcaagaataagccgcctctttaaggataattagctttgttttacatgatttcctaatttaaatcaattaaaaaaaaaaagaatggacagacagaaaggtttttattagttgtgtgtgatgaccacgagccttgaaccccaacacttgggagatattcagtcgctcctctgagtttgaggccaccctagtctacatcgtgagactatctcaaaacagtctttcattacactgaaatgcggaacacttgcctgttaactgtgaggcaaaaagaacatttaaaagtatttcatcagagagcttcatgagttcaaaaacttaggggctggagtaagctgtgctgacccagtgcttttctagcacccgtataaacagtggcacagacctgtaacactagcactagaggggagccaggcctcaggattgggagttcaaggccagacaaaggcatacaaaactgtgtctcagaaaaaagaaaagaagaaaatggaagaaaaaaaaaacacacaaaactttgggtttgtgaattttaaaacactaacagagaggctgacggggtggcttagtggttaaagagcactggctgctctcacagaggacgcaggttcagtcccagcaccaacatgccagctagaaactgtctgagtctctatttgaaggggtatgacagcctcttctggccttcaaggcacattgtgcacagacatacatgcagccaaaatacccatacacagaaaataaaacacaagcagtattgtccatatgccaatatattcatatacaaaatgcaagttaaatgatacatgaaggactctgaaacagattttgaattgaaaaccagtgtatccctaaacatgttttgggtatatgctctatattagaattctgtacattgggaattctgtatatttgctgagttgtaacaaaaacaggagccagagaggtggctccctagggaagagcacttgctgctcttccagaggacaagagtttagttcctaatgtccatgtagggtggtttgggaacatctgtcaccgcagcactgtcatctgacctatgagggcactgcatgtataagtccatatccacacccacacacactgcactcacatgtataagtccatatccacacccacacacactgcactcacatgtataagtccatatccacacccacacacactgcactcacatgtataagtccatatccacacccacacacacttaaaacatctttaatcagaacaaaatacagaggggacaatactctccctattggcacatcttgctctgtatgttaatgacttgaatgcttctggactttacattttaaagactttttaaaaaataatcatttatttatgtcgggaggggtaagcagaggatggagtagcacgtgtttttggagatcagagaactgcttaagggagtcatttttctccacccaccatgtgggtccttaaggagaactgaggctgtcaagcttggcagcagctgccttgctgagcagtcctgccagccctggactttatttttgattctatccttaagagtatccttgtgcctagagccatgcttaaactcctatgggagtcggaaacagttctgtgttgcctcttctcaggaacatgaccaatgagtacatacgtgacactgcttttttcaaggcttaacagttctttctaaagtggttcctcgtggttttcacatggaaaacttggtgatgtgttactacacagtactacacagaaaagtaaagttctcagagacagagccttctgcttacagagctcaggctgaccttagactcccgctacagtgacacgcatgtgctgccaaaccttgcagaaacgataataagaactgctgtttttctttggagacagcttctcgtgtatccgaggctgccacttcttcctgtgtcctttgattatctgcaaccatgtctggactacatggtatcagagaatagaactcaaggctttatgcaaactaaacactaccaggctacatcagcctagaaaaatgcttcaaacaactgaaaggctggagaggtggctcagttgttaagacacttgttgcttctgcactggaccctagttcagctcccagcatccacacaatgggttacagccacttgcaactccagtaccaggggatctgaaattctcttctgacttttttgggcatgaagcactcatagggtgcactttcagacattcaggcaaacactgacacatgtgaaataaattgaaaaaatatatctatagaacatttaaaattactgaagtagggaaagctgaatgagcatcatttatccttaaataaagtgaggtcctccttctgccctttccacagcagttagaagaaaagagtgaagatcaagaagacaaggagtgtatgaagcaagcaataacagccctgcttaatgtccaaagtggcatggaaaaaatttgctccaaaagtcttgcaaaacgaagactaaggtaaatattctcactttaaagtctcttcctttctatcctgaaagttgtggtacaagttcaggagccttagcccccccccccccccccttgagtaaacaatgaagaaaacagtattagtgacaagcttggtctttcagaggaagtgacatcaaagccaggagagtttgttattgtttgaaaaacctttcatatttgtgcattttccctgcttactcccagacaggacctcctgaggagcagctggtaagctggaggggacggagcacagtgtaccgggcagagctgccagcgtcattgttgtagcagagtgaaattagcagtgttgcttagtttgggaattgtataactcagacattgattcagttagcaggtctactttcccattataacatgtgctgtatgcttttatctttgagtcttgtgcatttaaaaatacttaattcatatctcaatttttttttactgtgttgggctactttttaatagttatctttctaaatgtttactattcaagacagagataattgttttgtacctgagtttatatagttgaacatcactgttatttttataaatctgaaaaaaaaatctgtgcttagttcttatagttatgattatttgtggagttagtaaatatcacgtgagtgatgttgtaaattatattttgccctgtcaccttatctgcatgaactctcagatctgtcttccgtgtgctaacagtgtctttccctttaccccagtgagtctgcatgtcggttttacagccagcagatgaaggggaaacagctagccatcaagaagatgaacgagatccagaagaacattgatggctgggaggggaaggacattggacagtgttgcaatgagttcataatggaaggaactcttacacgtgtaggagccaaacacgagagacacatatttctcttcgatggcttaatgatttgctgtaaatcaaaccatgggcagccaagactccctggtgctagcagtgcagaataccggcttaaagaaaagttttttatgcgaaaggtacagattaatgataaagatgacaccagtgagtacaagcatgcttttgaaatcattctgaaagatggcaatagtgttatattttctgccaagtcagctgaagagaaaaacaactggatggcagcactgatctctttgcagtaccgcagcaccctggagaggatgctggacgtaacggtgctgcaggaggagaaggaggagcagatgaggctgcccagtgctgaagtgtacaggtttgcagaacctgactccgaggagaatattctattcgaagagaatgtgcagcccaaagctgggatccccattatcaaggcagggacagtgcttaagctcattgagaggcttacctaccacatgtacgcaggtaagaaacacgcggtggctagaacggtttcctgcttaaacgaattgatttgatgggtgggttactgtccctgaaatagaaaactaacaacaagcaaatccttctctaggagaggagcattggctaaaaccgtcactctgtatttctttgaagtttttatcttttctatcatatttacaaagagaaacggtcacttgtctttaacgttacccagtaaaaagcagtagaaataagaccaagcctcaacatgattgtctaaaaggtagaattactcagtataattatttttttcttattctataactgggttacaaactaagtgatgcattaggtattcacccaccatcaaaattgtgctggtggcaaaaatgcgtattttcttaatctccattcctacatctatttaggaaatctggaagccatttccatttcagtattttgttcttaaagttacttatgcaaacagttttaccttaacaggttttaaagaaaacctagagagatgctaggtagaattcagtacagtggttaaggggtaaagggcatactgagccgtcttgtgtggtctgacacacagtggggcgtttgatagctgccatttcagaattgccgtggagcagatagcgctccgcttagactttgccccttcaccagatcagggtccctttatgtcccagaaccatagttttcatctcaaaaatgaacatcagatctacaccatagtgtgttgtcagaaaacatacacgaaatactgactatgaaagctatttctaagtttagatggaaatttttaatgtcttttctttaagagaaatgtgtgatttaaaattatataactcatcatatggtattcttaaatacctgactatgaaaattaacctctccctatactcctcattcaaggatattcctatttttaggaaatgcaagtttctggggaagaatatttattttcctgttttttaaaatgtcctctaagtgagttctgtttcctttggaagctattctggtgctagtaagattaactctcaaaaatatcctttagttttcccactttgtaaaactgaagatcatttaacaaggacttccttcccttcaatttattaaatacaagtagcgcttcgtgtggttgggaactaccaaagggagagaaggtaatttgagtgctgttttttattagtgatctcaaaccgctttaaaatgtgtggttgcctttatctgtatagttctggtatacaagctggagtttagttctgctttaggtatctggactctttgcaggcctttcatagtacatcgatagtgttttccaaagtccagttcttacaatgactcagctcctctgaacacgcatttccagtggcagtgcccaggcgctgaggcacgctgaacatgtcatgtatgttcatgtgtatgagtcacgtcatcccgggctccactttactgtaaacttcaccagggactctatagtcagtgtgtttactattcaaaaatttaaaaaagaaaatttaagctgcctagaagttacataaaaaatagattacctttcttgttatatataaagctattttaaagagctacagtttttagtaattattataaactattcacataatcttcatcaaccttctgtatactgtttaaaattataaaataacaaaaatactttgttaacccaaaattgtggttttcaaatactctaaataatttttcaacaataaaagttcaagttgtctatcttgctacattgtctttgtttttaaatcttgtgaatttaaaacctgttcactgtatcctcaatacagcttggcttgttttttatggaaaggacaaaggaaaagccatataaactcaattaaaaaaaatcagcatgtggattgatggtggcactgcagtgtcacagggcctggctttgtgccctgggtaatcttttgaaggcgtcattcttagagtatttaggttgtctattttacctctgcttgtgaaggacacagttttctctacagcatggtcagcaatgatcactggagactaaatagggcaagctgctcttttttttttttttttaattaaatgtattaattatttctatattctaaaatttacattctgtttctaaaacatttctgtaattttctttgctgttgtatttgacaaaaataatttataattagcatttacaagctacaactgatttatttattgatttgctcttttcgagtgcgtctacacttgaacacaccccgtcagtagatcggtgtcatgtggcccagtagtctttacccctcgtgtgtgcaaagctacctttgtcatgatgtcaccatgcacacctaaggactgtactgctgtcaacttacgcaaaataaagtaacatttttatggtcttaaaataacactgaaatttctaactttataccgttttgatgaagtctagtttactgagattgaatgagattactttaccttttttttaagatttctttttgtctctctgtgtgtctatgcaccatgtgtgtaaagtgctagtggagtccagaagagggcgtcaggtttcctgggacttgctttacactcaggtcctctggaagagcagctggtgatcttaacctctgagccttctgtccgatcccgctttgctttttttatttaaacgtatatgtgtatgtgagtacactgttgctgttttcatacaggctcgaagagggcatcaatcccgttatagatggttgtgagccaccatgtgggtgctgggaatcaaactcaggacctctgggagagcagtcagtactcacttagccatctctccagtcccctgttttactttttaaaattaaaagaaaaaaaattaaatcctccagtattaaagaaaaataaaaccaagagtgtctgtgttataactaagtttttttacattgttctgaagtttaattaaatattttatttcataaatatgttactgatataactggtgtccaccagcaactttataagttgtgagcttgaagtaagtgaaattactgctattaatttactcactgttctttgatgtctttaacctgcagtatacgattatttttttaacctagactaactatcccgtcaagcccattcttgccttactatggcagtatagagtgtgcttttgatagacacccatggatctgtaagatataaaatgagtattgtaaggtctcctccagctacaatgacaacatatgtagctatcacttgttagatgattttacgagcttttaaaaaaagattttaagaactttcatgtgcatgtctctggagtgtgtatatgcagtgccagcttaactgatgtaaacaaacattagtctgtgtttttcttttattcagtctccccaaataaaaagggggttttttgatctggttaattggttattagggtgtttttgttaacatgcagtagaggttgtggcttacactgaaacaaaagctaaaattaataatgcttttttattatatagtaaaagacattgtatataatacatgaggaagtctgataactagtggtgaatatagcacttcgacatcatgtagagtattgtaagttacttagacaataaaaattgaagagaaattgactcacatttgattagttcacgttcagcttggcttcggctaacttgatttctcaagtgttacaacaataacttagacagagctacacacctgtatgccaggagctgtctacacctgagtttataacagaagccaagacccctgtggattgtttgagttgctagaaatcttaccagttaattacagaatgaaatctagaaatcaatttctttttaaaaaatatttatttattgtttatttatttaatgtatatgaatgctctgtcttcttaatgaaagccagaggagggaatcagatctcattacagatggttgtgagctaccatgtggttgctgggaattgaactcaggacatctggaaaagcagccaatgttcttaaccgctgagcgatgtctccagtccctagaaattaatttctattcagcagaatatattttctacccatgtcccactgacactttcaaactgaatttttaaaaactattttaatatgttatatttttaaaaggtatacatgatgaataataaaaatgacgttttaattactctcatggtggctattcatgtggtgcaaatgcaggtatactgtgaggagatagagttttgttttgttttgttttgttttgttttgtttttaattgaaataggtagtaagttctgagcattgtgatgagcagttctgtatgcagttggattctatttgtctcttttaattcagtccctggccggtactcagccttgttgtactttactttgttagctattgagagaggacaggcagccagcccggcatgttaacttcatcagccacctgagtgctgggattacaggtgtttgccactaggtttttccctgacagagcctagttaatactatcagaatagtatgctctataaataatgctttctggaagaatgtgtttatataacatgaattaaaagatggataatgtgcataaatgattacagtgtgacagtctaactgataacttgtctatcatccccagtattactggaccctgactagatcagacttgggggaattcaccttgaacactggcaggaaaattactcagttggattattttaaatttggcagtgatacgaagacagtctccttacctagagtaacaatcacaaagccgtgcgacaagggaaaggggagcaggaagttccttcacagagttctgtggacactgccctgtagctaacctgagctgcagcaactctgggagaaaaaggcttggtggtctggccatgagtggtagagaatgggctgctgaccctgaggcaggagggcagttaagttagctgtgagctgtgccacaccgtttcctcgctacttttgtagaagatggaattaagaacacttaagacactttcctgatgtatttactgctgtttttgttctcaaatataaaatgttcaaaaaatctacatttagatttgagtctgtatcttgcatgagttaggtttgggcgtttaacttttaaagtctctgaacaatttttgatctatagggcagtgctcttctatttttaaccttgcatttttttaagtgtttgtgcgtcagcatagcgtctgtttcctttttttaaggaattcaaaagtgattgtttgtaagtcctggctgaggagttcattgtttcttagggttgaaatggctgtattaaagggagtattgtcacatgaacagacatcctgattaacagtgttctaccatggcaggtgggggaggggtgctctgcataaatagctttttagtgtaataaatgtttcacaagtcttaagaccttgccatattaaatgccaaatgtaaattcaaagtagggccagaaaaaggaagattgatatctcaaatttaatatgctgtattctgaatactagatataatatggatagagttgaagttcagaagatttttgaattattgtgcaccaaataacaaagaattgttcaggggttgaattagctataaggccagcgaaataaccgtggtctggggtatggctcaggtggatgaatgcttgcctaacatgcatgaggctttgggttcaatccctggcacctcatgaactgggcatagtggcacatgcctgtcatctctgaatgtaatgttcaggagacagaggcaggaggattagaagttcaaagccatcctcagttatatagtaagttttgggtcagtctgagatacatgagggcctgtaccaagaacttgagactagcttcagtagttgtttgtataaagagtgtatgaaaacgaagcagaagcagagaaactctgagtgtggtggggtaggtcaggaggaggtcatctctggtggattagctcctctgcttgggttgaaattgtagggtcgtgtctgagtagtccatgtccagactgacttttggttatatatcagaagagacagtcaaatcaagctaccatcttattagtggccatttgttcatgtttgtaccttaaagccaaattctgcctgacttaaatacaggaaaggtcttttaaaataagtttgttactcagtatgaattgttcattgctttagattagaaacaaaacacacactctctctctttctctctctctctctctctctctctctctgtgtgtgtgtgtgtgtgtttaaaccagcatgggaatataggtagcttttaattttttcttaagtacgtaagcttctgccagttttcttggagtattttagtcgttcctcacacaccccaccctccctttttggcaaggctgcttttagcttccagccaaaataagaacaaatgaagtttcagtcaggttaggccacactacagtagtggccactgcggagcatttatttcgttcgccagcaccagaagctcctcttgtgagcagtgtgacaggaaggacagctgtgcattctgacagggcaccagttataaggtcatcattagactgtgcatttctagtgacttctggtgcctctaaccagcttagcagttacagctgcattctggattagtcatgtatgtaaacttgtatagtgacactgaaataggttgataacttgtatatgtttagaattcagagctaggtggggctgatggggatcctctgatcccgtctgccttgatggaagagcaccagggcaggaacaagtggccgtgctctcctgtgctccccactctgctgtctgacctgcgctgctcacctccccagagctcacacagcagcacggggaactggtgtggtcccgtgtgactgtgtggcatggaggtgcagggtgcctttcccggcactgccatcagctagtagcctaaattgaagagccccactttaaaaaatagccatatttttcttaaaacatactcagcacttctcttctgtctgaaacccacagcttttagcctgatgttgggtagcatttgaaaagaaatagttctgggtgtgatgttagattgtcagcctgaaataaacctgggtttggaggagcggtgggcacacacttgcaatgtggagcccagcccagagacactcagaggcctcatctagaatacacagctctctagcaagggcgggcagccagccgagcagcccactgtggccccgctgttgcttcctagacacacgctactttgagaagcctcaccttacaaatagatttgcagaacaggaagaagaatcttgaaagggagggtggtgatggtaccgataaatacctgtgttttaaaatcttgtacagccttctgttttaaaatcttttcttctggatgagactttagtctgtaactgaggatctctgtaactgaagacagacaataaaataccaacaagaaggaaattgttaaaagattttatgtatctaagatacttttactagtaacccactctagccttaggaggtataaactaaaggaacattaaataaaaccaaagaagtttttagctggaagcctggtcaaatatgcctgcaatcccagcactttgggcactttgggcactttgggcactttgggcactttgggcactttgggcactgagactaaaagctagaggactgtgaattcagggccggcctggatagctagctaggccctgtctcaaaagcaaaaacctcccacaataatatcctttgttctgtaatttttttcttcaaagtaaataagtattaagtactttaaattcagggatgtttgatagttaaatcagttcactatcttgatgataatatataccagtagattagatcaatccatgaattttagtttaaggttaaaaacttactgtgtgatcttttaaggtcaaatttaggtttctcagaatcaacttaaaatttttctaaatatactctaatttcactaaactttgtcctagtaaaagacttcttataaaattatgattgataatgtataggtttttactgcgatcagtggatttcccgtcactttatccatgttaataatgtaaacagagaaatgttcttacaagagactcaagttaacagatgttctcccttcttttaaagactttggactaatcgtgggtggaccctagagagatctgagttgtagaacgagtggttttttttcagacagtcttactgtgtgtctctgactggccttgagtcccggagacatgcctacttctgcatctgctgagactgaaggcccatgccaccatacgcaaggaaatggtttttgggttttttgttgttattgttgcttcctccagtacaagaaaatgtcctttccttccttatgcagaagaaaatagcctaggctcctttgtgcccatcccagctccctaaccctaacttagaagcgtgctctaaaaaaagatccaaggaggcaagactagagggtcatctgactcaggaactacttcaaataaaagcaagggctttttacaaccatgttctctctctctctctctctctctctctctctctctctctctctctctctgtgtgtgtgtgtgtgtgtgtgtgtgtgtgtgtgtgtgtgtgtgtgtggtgtgcggcgcgagtgtggagggcatagaggcgggagaacaaccgcctggattgaccgcagggccatcaagcttgtgtggcaaaagactttctcactgagtttgagactttttttttttttttttttttttttttttagcagttataaataaggcttttggcaattaagcgattttaaaaactatttaacttaccttactactttgtaagatttgttttctagttgtatgctttgttaacatgatctaaaggaaattaggaaatgtagttaattaaactggatgtcagacagatgggctgccgctgctgctatctctacaaggtaaatgaacaggcaggagaacttttgggatcctggtagcgatggcaacctggttcagttccctgtccttgcttttcttcactgaatgttccttgccaatgaggagttaagacagggcaagaagtcagttgattatattttacaattagtgttttgttttggttttttgagggtttttgttttgttttatttatttgtttgttttttgctaccaatttatgaagcaagtgaagctagcagtccattatataatccaaagccgtctctctggtaaaacatttaggggctttgtaagcctgagtatttgatctcttttaaaactaaaaataatagttttaatcattgtttatacaagactttaatatttttcctttttgttcctagatccaaattttgttcggacgtttcttacaacatacaggtccttttgcagacctcaagaactactgagtcttctgatagaaaggtctgtcggttttaaatgtttacgttctttgtttttaaaaggactaagatatgttccccataattgtgttaataagcttaactgttgaactcttgaaaataaaagctaactttgattttttttaaataatcaaaattttatattgctttagtacttaaaactcccaacttctcagggtctcagcagcactggggattgaaacgtgaacctttgttttaatctaagcagtattcccagcctgaattaatcaagttaaagaactctgtcagtatggatgacttagaacctcagctgggcacatgcctataatcagaacttgggagacagaggcaggaggatcagagctcaaggtcgtctttgactgtcataggaatttacggttcccctgaactatatggaactatgtctttaacataatgagacactagaaattcagattttaatggttcataagttctaaacaagttttcaagttactacatattgagtaaaatgaatcttgtcaatgagcaaatgcttttatcaaggaaaatatttttaatctacccaaagaacaatcaagtttcaagcattaatcatccttaaaattatgtctcctgatttaaagttatctacagactaaaaatggacattggcctcatttgttttaaattttacatatatttttattttgcttctagttttagctgttgacaaaactaaccttttaaaaatattaacttaaaaatattatcattagattagcctttacattataaaagtggatttttacttatgtgtctgtatatctatagtaatttttatattatctcttgattgtactgataaatataaatagaacatgaatttggatttgatataatattttcattattttttgtttcatgttagatttgaaattccagagcctgagccaacagaagctgatcgcatagctatagagaatggagatcagcccctgagtgcagagctgaagaggtttagaaaggaatatattcagcctgtgcagttgaggtaagcagtggagacacgtctgcagcctcaaacctgggtttcaaagtggggatgttcaaagcggggcagtggtggtgccatcccagcacttgggaggcagaggcaggccagtctgagttccaggccagccagggctacacagagaaaccctgtctcagaaactgaagccaggaaaacaaaagtggaaatgttcgagaaactgtccctaagcatggtggagggaagcggtgtgaatgagagtctcgtttgaattgctacagctttatgagaccgttgccttgtttcatgtgtgcactcaatgttagattctgtgttgtgtcgatgccacagggtgttaaatgtgtgtcggcactgggtggagcaccatttctatgactttgaaagagatgcagaccttttacagagaatggaggaatttattggaacagtaagaggtatgtttttcttaagttcctacttttacatgtgataaaattaccaatatggttactgccagttgataccattagagttcatttgaaaatattgaactttcttatcatacagcatttagactggatgtgtggtgcgtacctttattcccagcacacaaaaggcagaaggagtatgatttctatgagttttagtacagccaggactacagtagtaagaccctgtctcagaaacaaaacaacaaaacccagcattgacaactgtaaatcactcagcagccaccctgctgactccacacacttccatctgttctagaacatcctgctgaccccacacacttccatctgttctagaacatcctgctgaccccacacacttgcatctgttctagaacatcctgctgaccccacacacttgcatctgttctagaacatcctgctgaccccacacacttgcatctgttctagaacatcctgctgactccacacacttccatctgttctagaacatcctgctgactccacacacttgcatctgttttagaacatcctgctgaccccacacacgtccatctgttctagaacatcctgctgactccacacacttgcatctgttttagaactggttcttttagtctcaggttaagccagagccttaactgaaactgtggttacccttgatacaggctggaattcttttaccactgtaacaccattgataaaagtgcatggttagataagtagagcagatcaggaagaaatagtgtattacactgagagattgctttttaaacatcagcactaatcagaaacataattttgagtctttagactcattcaatttacttatgaaaaactaatgttgcttatctccaaggtttcctttactttcaaaaattctgtgattatatgactccaagtttgcctagacaaactttgtttttgcatctattgttcagtctaaatgaaaatcagaaaataaagggttaagtagattactttcctatacagtacaaaagacaggcatatcaaaaaatagactaatatgatcaatcagtcctcataattgggttataaaatacaatattaattagatttgtgaatatgaaacttattcttgttaatctttcatttcgtatggaatatggattgtgaaaatagtattttgaactaagcttcaaaatgttggaggtgaaaaaaaatcaagttactttaaaatatgtttaggaaaggtatagatacatgccaaactattgacaatgattacctgtgaggaacaaggatgagagggagatgggggaggggaacttttagtatttactttgctcatttgaactttatagcaatggtttattcatgtatcacttgtattactttaaacatttttttaaaaacaaagtgttaaagagtatttaaatgtttgttaaaatgtatttcaggtaaagcaatgaaaaaatgggtcgaatccatcactaagataatccaaaggaaaaaaattgcaagagacaatggcccaggtcataacattacatttcagagctcacctcccacagttgagtggcacataagcagacctgggcacatagagacttttgacttgctcaccttacacccaatagaaattgctcggcaactcactttacttgaatcagatctataccggtatgttattcaacattcaaactcagaagctatctcaagagttcattttaaaaatggaatacattatctgccttttagggctgtcgtaagatgtaaatgagacagcatatgatgtgtatacagcattaaggcattgcagtcagttctggttgttttgcccccttagtcatcttgatctgcttaaattaactttgtgctctttcagttacccctgcttgggaagctcggttcaaatcctggcagtcccagtggcttggccaaagcctgtactgtcttgtaggtttgaagagtctggtgtgtgcctgatgcatccaaggctgagcacaaagcagaacatagaaactactgcagcagttactccacagtacacgatagagcgactgctgtgttacagctaagcctcagccagttagaaccctttatagtttaaattgattaaactatctgaaaaatatgattctggtttgaaattttacttaaaatctcaaaattattattaatcaccaaatgagaaaaagagctaaatttataaattctcccatctccatttatcatggtccctgagtgaccatgttagataatgtctaaagtttattctcagaggcatttgcaggatggctttctcttctgtccactgtaagagcaagaacaagccaagaatgcgttagtaattgccctgtcctagttggctacttactagataccatttaagtaactacctcaccatcttaacttagtaaataatacctacaagtgctaggaaagacattatgcaaaagtatgcagtaaatgggaaaacgaccatgctgctctgcgcagtcgtgctagcgctcaggacactgaagcagaggactgccatgtgttccaggccagctgtgccagacagcaagaacctagccagggctacatagaagacactgtctttaaaaataaacaaatgagcagtaaatgtattatgcaagagtatctactaaaatagttctaatctgaaaacataaaaaagttataaatattgttttcaccaactttctgttgatgaaagagaacttaaaaatgtcgtttagtttttcttctgtagtaagctatatacgtgaggagaaatgtgacattgccattttatgttgatgattttagggctgtgcagccatcagaattagttggaagtgtgtggacaaaagaagataaagaaattaattctcccaaccttctgaagatgattcggcacaccactaacctcactttgtggtttgagaagtaagtgtgggcgtttcctcctggggcagaggcaggttttgaatccagcggggctgttttgcttctttagtgctctcattcccctttcttgtaaactcagtatctttctaatgtgcattttaatttcactggtactttggtttttaatggttgcctggcactaaccacatgcgtcttactttatcagtctaggctagagatggctgcagcttcttcccagcaggtagatgctcctcccatacgcggctctcattgctccctttctacatttgaacagacctaatcaatggtgcaaatccaacaatgcttcatgacaatgattactctgccgtctgctgtcaccattttatcttacagagcttttttccattcactcgtgtcctctgttgacagtgtgttacatttttatactacaaacccaaaagtacattcagataccttaaattagttgctttttaaacaaggtgagaggaaaaaatgggcatttatagtgtttgtataattctataattacctttactgatgttctttgtgtagactgacattgctgtctggggtccctggttttaagcctgaagagaacctcctgtggtccagtgggtcaactcacaacaagtgtgcagatttattgctgttttgaacagcagctctctcttgagattagttctgttttattctgtctgttcatatctattattgagcccccttgcctttcagtccatttgttttccatttggtgctgtttaaaattttaactctttcctcatctctttctagatgctgctattacacttctgtgcgccttaaccgggctgtcctttagctctgtgaccatactctctgatggcgactttgaaatacttcagttaattttcatctagtcactcaaacaggcagtttctgctccctgcttttattccactgtttaggtcataccttttatttctttatatgctttataatggatacagcaacttttcaatactgccctctgccttccacagctttctctttgctacttaaatgtgatgcggactaagcaggttagatgtggggatggatgcccatagttaggactttgggaagactggttccagtatggttcacattctctctcccaggctgcaccccgagctgctaaatgttgcactactaattcccgtcttcattcctttgtcgtgaacagttccctggtagcacaggttgctgtgaagaataagccaatgaaattctggcttcttggaagtaaagtttttaagctccttaataactgatatttgttctgacctgcaactatcttcctggttcacaccgttcctagctaacacacatttggggctacatatcttccttttatctccagatttctttccagttgcctttcataacaacttccactgttcctgaacacacctttgctctagatgtgacacaattctggagaggacatgactacaagctgtctttacattctaagagcttagagtcaaagtgccaagaatgatgctgtggcctcagggtctagcatggaaccctgtcaggagccaagcaaagagctattttcccagcgttctaattaccctacagcctcagcccataagtgggcaaggggagggctccgtacatcttaaatattaaggaaataaatattatagataaataaatatgaagactgcactcagtgaagccctaactcagcagggtaggaacccatccagatgtgcaccccaacccctcaaaatcccgggctgggattaggtgctcctgccccagggctcaaacaaatgctccggagggaggaagaggaggggacaggagcttagttgaaatactccagagtctcccttttaaagagattattttgtagattttcttgaacaatttttcgtttgtagcttgttcttagggtcacctccaaagactcatccgcattatgagttatggtgagtgggtgtggtttgctttaagatcactggagtccatcagccgagctgcaccgtctgataaagccgagacgtctgtgcgctttcataactggggagcggacaccttagctttgtatactggatattgttttctcagtgaagaagccagagtccacagattgtactgg

SEQ ID NO: 86 - DNA, 4783 bp, Mus musculus
gtgtgttctagttgggtgcaaggtctagcctaaggcaatgcttgtctcccacctcatcctgccaaggaagcagcaccccgcgggcaccatgcaggcgcagcagctgccttacgagtttttcagcgaggagaacgcgcccaagtggcgggggctgctggtgcctgcgctgaaaaaggttcaggggcaagttcaccctactcttgagtctaatgatgatgctcttcagtatgttgaagaattaattttgcaattactaaatatgctatgccaagctcagccccggagtgcttcagatgtggaggaacgtgttcaaaagagttttcctcatccaattgataagtgggcaatagctgatgcccaatcagccattgaaaagaggaagagacgaaatcctttatcgctgccagcagaaagaattcatcatttattaagggaggtcctcggttataaaattgaccaccaggtttctgtttacatagtagcagtattagaatacatttctgcagatattttaaagctcgtggggaattatgtaagaaatatacggcattatgaaattacaaaacaagacattaaagtggcaatgtgtgctgataaggtattgatggatatgtttcatcaagatgtagaagatataaatatcttatctttaactgatgaagagccttccacctcaggagaacaaacttattatgatttggtaaaagcattcatggcagaaattcgacagtatataagagaattaaatctaattataaaagtttttcgagagccctttgtctctaattccaaattgttttcatctaatgatgtagaaaacatattcagtcgtatagtagatatacatgaacttagtgtaaagttactgggccatatagaagatactgtagaaatgacagatgaaggcagtccccacccattagtaggaagctgttttgaagacttagcagaagaactggcatttgacccgtatgagtcatatgctcgggatattttacgacccggattccatggccattttcttagtcagttatcaaagcctggggcagcactttatttgcagtccataggcgaaggcttcaaagaagctgtccagtacgtcctgccccggctgctgcttgcccctgtgtaccactgtctgcattactttgaacttctgaagcagttagaagaaaagagtgaagatcaagaagacaaggagtgtatgaagcaagcaataacagccctgcttaatgtccaaagtggcatggaaaaaatttgctccaaaagtcttgcaaaacgaagactaagtgagtctgcatgtcggttttacagccagcagatgaaggggaaacagctagccatcaagaagatgaacgagatccagaagaacattgatggctgggaggggaaggacattggacagtgttgcaatgagttcataatggaaggaactcttacacgtgtaggagccaaacacgagagacacatatttctcttcgatggcttaatgatttgctgtaaatcaaaccatgggcagccaagactccctggtgctagcagtgcagaataccggcttaaagaaaagttttttatgcgaaaggtacagattaatgataaagatgacaccagtgagtacaagcatgcttttgaaatcattctgaaagatggcaatagtgttatattttctgccaagtcagctgaagagaaaaacaactggatggcagcactgatctctttgcagtaccgcagcaccctggagaggatgctggacgtaacggtgctgcaggaggagaaggaggagcagatgaggctgcccagtgctgaagtgtacaggtttgcagaacctgactccgaggagaatattctattcgaagagaatgtgcagcccaaagctgggatccccattatcaaggcagggacagtgcttaagctcattgagaggcttacctaccacatgtacgcagatccaaattttgttcggacgtttcttacaacatacaggtccttttgcagacctcaagaactactgagtcttctgatagaaagatttgaaattccagagcctgagccaacagaagctgatcgcatagctatagagaatggagatcagcccctgagtgcagagctgaagaggtttagaaaggaatatattcagcctgtgcagttgagggtgttaaatgtgtgtcggcactgggtggagcaccatttctatgactttgaaagagatgcagaccttttacagagaatggaggaatttattggaacagtaagaggtaaagcaatgaaaaaatgggtcgaatccatcactaagataatccaaaggaaaaaaattgcaagagacaatggcccaggtcataacattacatttcagagctcacctcccacagttgagtggcacataagcagacctgggcacatagagacttttgacttgctcaccttacacccaatagaaattgctcggcaactcactttacttgaatcagatctataccgggctgtgcagccatcagaattagttggaagtgtgtggacaaaagaagataaagaaattaattctcccaaccttctgaagatgattcggcacaccactaacctcactttgtggtttgagaaatgtattgtagaaacagaaaacttagaagaaagagtagctgtagtaagtcggataattgagattctacaagtctttcaagagctgaacaacttcaatggtgtcctggaagttgtcagtgctatgaactcgtcacctgtttacagactagaccacacatttgagcaaataccaagcagacaaaagaaaattttagaagaagctcatgaattgagtgaagatcactataagaaatatttggcaaaactcaggtctattaatccaccgtgtgtgcctttctttggaatttatctcacaaatatcctgaagacagaagagggcaaccctgaggtcctgaggagacacgggaaagagcttattaacttcagcaagaggaggagagtggccgagatcacaggcgagatccagcagtaccagaaccagccctactgcttacgggtggagccggacatcaagaggttctttgaaaacttgaatccaatgggaaacagcatggagaaagaatttacagactatctgttcaacaaatccctagaaatagaaccccggcaccctaagcctcttccgagattcccaaaaaaatacagctatcccctaaaatctcctggtgttcgtccatcaaatccaagaccaggaaccatgagacatcccacacctctgcagcaggagccaagaaaaattagctacagtcggattcctgaaagtgagacggaaagcacagcatctgcaccaaactcccctcggaccccactgacgccgccccctgcatctggcacctccagcaacacagatgtttgcagcgtgttcgattctgaccactcggcaagcccttttcattcaagatctgcttcagtctcatctataagtttatccaagggcactgatgaagtgcctgtcccccctcctgtaccccctcgaagacgtccagagtctgccccagctgaatcctccccatccaagattatgtctaagcacttggacagccccccagctattcctcctaggcaacccacatccaaagcctattcaccacgctattcaatatcagatcggacctctatatcagatcctcctgaaagccctcccttgttaccaccacgggaacctgtgaggacacctgatgttttctcaagctcaccattacatctccaacctcctcctttgggcaaaaagagtgatcatggcaacgccttcttcccaaacagcccatccccttttacaccgccacccccccaaaccccctctcctcatggcacgagaaggcatctgccatcaccaccactgacacaggagatggacctccattccattgctgggcctcctgttcctccacgacaaagcacttctcaacttatccccaaactccctccaaaaacttacaaaagggagcacacacacccatccatgcatagagatggaccaccactgctggagaatgcccattcttcctgagttcctctaagctgggatagtttcctagcccccagatccattgctggcaatggatgcactgaacatgccagcactggggagttcaaatgagaactccaaacactaacgactctacttcacgatgtagtataagacaatgagttttaacctacatggaattatggaataaaatggtattccagcttagaatgtggaaactgattgcacctggaaatcacgtgaagggacttttctggccattgggcagagtcctcatattgtgaagtgatctttatcattaaagggatggaaaacagtctaatgtccaacaagcccatatgttgacagtttttgtaattcaaaatattatgcacttttaaaaaatcttaaacagggatctcctcctttgttttcctttgctttactcttctactttagaatattttcgtaaaagttattcagaggactgtgagaaaaggctgtggtacctgaccttgttgaaatcaaggcccagcactgtactacagtcctgtttacagattattacagtgatctgaatgggtaccgaggcttcaccaaaagaggtactttttgttattgttattgtttaagaataattatgccaatttaagaacatcccctacccacccccactcacaaacaaaatgtggtggtgttgcctttaaacaaaaaatgtcaatgtcattaacatgatggaagaagaacattttaaaacgtaactgtcaagtatcattt

SEQ ID NO: 87 - DNA, 4011 bp, Mus musculus
atgcttgtctcccacctcatcctgccaaggaagcagcaccccgcgggcaccatgcaggcgcagcagctgccttacgagtttttcagcgaggagaacgcgcccaagtggcgggggctgctggtgcctgcgctgaaaaaggttcaggggcaagttcaccctactcttgagtctaatgatgatgctcttcagtatgttgaagaattaattttgcaattactaaatatgctatgccaagctcagccccggagtgcttcagatgtggaggaacgtgttcaaaagagttttcctcatccaattgataagtgggcaatagctgatgcccaatcagccattgaaaagaggaagagacgaaatcctttatcgctgccagcagaaagaattcatcatttattaagggaggtcctcggttataaaattgaccaccaggtttctgtttacatagtagcagtattagaatacatttctgcagatattttaaagctcgtggggaattatgtaagaaatatacggcattatgaaattacaaaacaagacattaaagtggcaatgtgtgctgataaggtattgatggatatgtttcatcaagatgtagaagatataaatatcttatctttaactgatgaagagccttccacctcaggagaacaaacttattatgatttggtaaaagcattcatggcagaaattcgacagtatataagagaattaaatctaattataaaagtttttcgagagccctttgtctctaattccaaattgttttcatctaatgatgtagaaaacatattcagtcgtatagtagatatacatgaacttagtgtaaagttactgggccatatagaagatactgtagaaatgacagatgaaggcagtccccacccattagtaggaagctgttttgaagacttagcagaagaactggcatttgacccgtatgagtcatatgctcgggatattttacgacccggattccatggccattttcttagtcagttatcaaagcctggggcagcactttatttgcagtccataggcgaaggcttcaaagaagctgtccagtacgtcctgccccggctgctgcttgcccctgtgtaccactgtctgcattactttgaacttctgaagcagttagaagaaaagagtgaagatcaagaagacaaggagtgtatgaagcaagcaataacagccctgcttaatgtccaaagtggcatggaaaaaatttgctccaaaagtcttgcaaaacgaagactaagtgagtctgcatgtcggttttacagccagcagatgaaggggaaacagctagccatcaagaagatgaacgagatccagaagaacattgatggctgggaggggaaggacattggacagtgttgcaatgagttcataatggaaggaactcttacacgtgtaggagccaaacacgagagacacatatttctcttcgatggcttaatgatttgctgtaaatcaaaccatgggcagccaagactccctggtgctagcagtgcagaataccggcttaaagaaaagttttttatgcgaaaggtacagattaatgataaagatgacaccagtgagtacaagcatgcttttgaaatcattctgaaagatggcaatagtgttatattttctgccaagtcagctgaagagaaaaacaactggatggcagcactgatctctttgcagtaccgcagcaccctggagaggatgctggacgtaacggtgctgcaggaggagaaggaggagcagatgaggctgcccagtgctgaagtgtacaggtttgcagaacctgactccgaggagaatattctattcgaagagaatgtgcagcccaaagctgggatccccattatcaaggcagggacagtgcttaagctcattgagaggcttacctaccacatgtacgcagatccaaattttgttcggacgtttcttacaacatacaggtccttttgcagacctcaagaactactgagtcttctgatagaaagatttgaaattccagagcctgagccaacagaagctgatcgcatagctatagagaatggagatcagcccctgagtgcagagctgaagaggtttagaaaggaatatattcagcctgtgcagttgagggtgttaaatgtgtgtcggcactgggtggagcaccatttctatgactttgaaagagatgcagaccttttacagagaatggaggaatttattggaacagtaagaggtaaagcaatgaaaaaatgggtcgaatccatcactaagataatccaaaggaaaaaaattgcaagagacaatggcccaggtcataacattacatttcagagctcacctcccacagttgagtggcacataagcagacctgggcacatagagacttttgacttgctcaccttacacccaatagaaattgctcggcaactcactttacttgaatcagatctataccgggctgtgcagccatcagaattagttggaagtgtgtggacaaaagaagataaagaaattaattctcccaaccttctgaagatgattcggcacaccactaacctcactttgtggtttgagaaatgtattgtagaaacagaaaacttagaagaaagagtagctgtagtaagtcggataattgagattctacaagtctttcaagagctgaacaacttcaatggtgtcctggaagttgtcagtgctatgaactcgtcacctgtttacagactagaccacacatttgagcaaataccaagcagacaaaagaaaattttagaagaagctcatgaattgagtgaagatcactataagaaatatttggcaaaactcaggtctattaatccaccgtgtgtgcctttctttggaatttatctcacaaatatcctgaagacagaagagggcaaccctgaggtcctgaggagacacgggaaagagcttattaacttcagcaagaggaggagagtggccgagatcacaggcgagatccagcagtaccagaaccagccctactgcttacgggtggagccggacatcaagaggttctttgaaaacttgaatccaatgggaaacagcatggagaaagaatttacagactatctgttcaacaaatccctagaaatagaaccccggcaccctaagcctcttccgagattcccaaaaaaatacagctatcccctaaaatctcctggtgttcgtccatcaaatccaagaccaggaaccatgagacatcccacacctctgcagcaggagccaagaaaaattagctacagtcggattcctgaaagtgagacggaaagcacagcatctgcaccaaactcccctcggaccccactgacgccgccccctgcatctggcacctccagcaacacagatgtttgcagcgtgttcgattctgaccactcggcaagcccttttcattcaagatctgcttcagtctcatctataagtttatccaagggcactgatgaagtgcctgtcccccctcctgtaccccctcgaagacgtccagagtctgccccagctgaatcctccccatccaagattatgtctaagcacttggacagccccccagctattcctcctaggcaacccacatccaaagcctattcaccacgctattcaatatcagatcggacctctatatcagatcctcctgaaagccctcccttgttaccaccacgggaacctgtgaggacacctgatgttttctcaagctcaccattacatctccaacctcctcctttgggcaaaaagagtgatcatggcaacgccttcttcccaaacagcccatccccttttacaccgccacccccccaaaccccctctcctcatggcacgagaaggcatctgccatcaccaccactgacacaggagatggacctccattccattgctgggcctcctgttcctccacgacaaagcacttctcaacttatccccaaactccctccaaaaacttacaaaagggagcacacacacccatccatgcatagagatggaccaccactgctggagaatgcccattcttcctga

SEQ ID NO: 88 - DNA, 96592 bp, Homo sapiens
acctggctgtgatatcagtttataataatagcaggttctttagtttgtttgggtttttgttgttgttttggtctctgagtagcttcccaaatcacaggggccacgtactaattgctctttcccagaatgcctagatccttaacctttgcctatgtttttcttagatgctttttttttccctttttttttctttttgagacggaatctcactctgttgcccaggctggagtgcagtggcatgatctcagttcacttcaacctccgcctcctgggttcaagcagttctcttgcctcagcctcctgagtagttggaactacagtcacacaccacgatgcccggctaatttttgtatttttagtagagatggggtttcaccatgttggccaggctggtctcgaactcctgacctcagggtatccacctgccttggcctcccaaaatgctgggattataggcatgagccactgcacccagcctttcttagattcttgatcagtcattccagctgggacctcctggatccttctaaatactcagaaccaagcatgttggttatgttacaggccaacagtaaaaggttgtcttctgacatccaactttgtgctttggaatttagggatataaagatgctttttgcttctactttgcatgttagaattttgtggttggtagtgaacttttgaatatacttttatttttgaattctctccagaattacttggtaagttttctggaattaaagaaaaagcctagtgttaaatgttattttaaaagagttgatgcgacattgaggatttcaaggttctaccagcatttctaattgagagaatagtagtttcctctggaaggaaacttcctatgaaagtcatatagtgatggcatttattctaagagtggatatggtaggtgagaaccacagagttgaagggaatctggagggtcattctaggctactcagcttccagaaatcacatcaatggataacaccaaagaatcacactgttttttcaagtagagagtaaatgattatatatttgggtcaaaaaactgaagtttggttatcagtgaatatagtaatcacagaacaaaacaacactttgttgtgagttagtgatataaactaacacagtagtataaacctaccccagagagagggggtttgccctgtttggtttattattttgggttcagttggaagagaatagaatccattctagctaaacaaaaataaatttattttgggccaggtgtggtgactcatgcctgttgtcccagcactttgagaggctgaggcaggaggactgcttaaggccaggagttcgagaccagcctggatggcatggcgagaccctctgtctacaaaaacaaaaacaaaaaattagccgagtgtggtggcatatggctgttagtcctagctatctttttttttttttttttaaacgtagtcttgctctgttgccgaggctggagtgcagtggcacaatcttggctcactacaacctctgcctcccaggttcaagcaactctcctgcctcagcctcctgagtagctgggattacaggcatgtgccaccatgcccggctaatttattttgtatttttagtagagatagggttttgccatgttggccaggctggtctcaaactcctaacctcaagtgatccacccgccttggcctcccaaagtgctgggattacaggcgtggtgagctaccttgcctgaccagtcctagctatctgaaaggttgagatggggatcccttgagcccaagagttcaaggctgcagggagctatgattgcaccactgcactccagcctgggtaacagtgagaccctgtctaatgataataataatacattcattcagagaatacagaatcattggaaggctaatgaagtagattctggttgagctttcaggaacaagtcccaaagccacaccacagaaccaggccactaagagagtaatttcaaaacaattatgatccacagagaactgccacaccatgagtctagccattgctgctgccacataaaactagtgactgaatggtgcttgctaacagaaatatcagagttgcggcttccaactcacttctgccttctttttttttttttttttttttttttgagagggagtctcgctcttgtcacccaggctgggttgcagtggtgtgatctcggctcactgcaacctccacctcctgggttcaagctattctcctgcctcagcctcctgagtcgctgggattacaggcgcccatcaccacgcccggctaatttttgtacttttagtaggcagagtttcgccatgttggccaggctggtcttgaactcctaacctcaggtgatccatccacctcagcctcccaaagtgctgggattacaggcgtgagccaccgtgcctgggctcacttctgccttctatatctcactctagtgtatctgatagactgggagctatactgaacagattacgaatacgttcgttgttgacagctcaacttcattaactgtcaggaatttgaaggattctattgcgataacataaataacaaaaatttgaatgatgctttttttcagtcactagttttatgtggcagcagcaatggctagactcatggtgtggcagttctctgtggatcataattgttttgaaattactctcttagtggcctggttctgtgatgtggctttgggacttgttcctgaaagctcaaccagaatctacttcattagctttccaatgattctgtattctctgaacgaatgtattattattattattgttagacagggtctcactgttacccaggctggaatgcagtggtgcaatcatagctccctgcagccttgaactcttgggctcaagggatccccatctcaacctttcagatagcttttttttttttttttttttttgagacggagtcttgctcccccagactggagtgcagtggcacgatcttggctcactgcaagctccgcctccggggttcacaccattctcctgcctcagcctcccgagtagctgggactacaggcatctgccaccacgccaggctaattttttgtgttttcagtagagacagggtttcaccgtggccaggattgtctcgatctcctgactttgtgattcgaccgcctcggcctcccaaagtgctgggattacaggcgtgagccaccacgcccagcaatgctttgccctttcaccttgattataggagatggtgtttggaacagctacttcccccacgtacaatgactttccacctggtggtggtggcaatatttggatgacctcggtggcatcttcataccttggagaaccagaaaacactctttttgctcaatagcacgttgtatgtaacatataaacatacaatgccttttttgtggggagtggggaggcatacttttaaatcgatcttttggagtttcatacaaaattatagttcctcttgggaagaccttttaggtatgctgtctcttacagggggttgggcatgagcctcccataagggtcagaggacaaaggcctgtctgagggcctgcttcaacttctttcaggcaggtggctgtgagaggaccgagctggctatggcagcaacccatgaaagtgagtgataacaacatttattgtttcctgtggcgttgctttgctttgctattgactggtagcacttgtagctttaaataaattgaggaagtatgagagagtaaatggaagaaatgttgagtaagtccttcttgaaaatgttttcaagtgggagaatattagtggtaaatttctaactgtcttttaacattttaattgggcttggatcattcacattttccccaaatcctttctaaattaaaaaaaaggtaaaggccaggtgcagtggttcatgcctgtaacgggtgcagtggttcatgcagtggttcatgcagtcccagtacattggaaggccgaggcaggaggatcgcttaagaccaggagttcaagaccagcctgggcaacagaacaagacccccatctcttaaaaaaaaaaaaaaatacaaattacaaaataaattagctgggcttggtggtgcatacctgtagtcctagctacctgggaggctgaggcaggaggaccccttgagcctaggagttcaaggctgcagggagctagtatgatcacgctaccgcactccagcctgggtgacagagcgagaccctgtctcttaaaaaaaattaatttaaaaagggaagcaaaattacaatctgtcaaattattggctgggtgcagtggctctcgcctataatcccagcactttgggaggctgaagaaggcggatcacctgaggtcaggagttcgagaccagcctggccaacatgactaaaccccgtctctactaaaaatacaaaaaaattagccggtcttggtggtgtgtgcctgtaatcccagctactcgggaggctgaggcaggagaattgcttgaacctgggaggcagaggttgcagtgagccaagatcgcaccactgcactccagcctgggtgacagagtgggactctgtcccgaaaaaaaaaaaaaatatattagcatgatagttagcatatttcagtacaaatttgtgattaagctttttgttatgtatacatatgccctccctcttatagtatcagtgtgtttaatacttgcatttttttgttttatttttatttttttgagatggtctcccttttttgcccaggctggagtgcagtggcgcgatctcggctcactgcaacctcctccacctcccgggttcaagtgattctcctgcctcagcctcctgagtagctgggattacaggcacccaccactattcctggctaatttttgtatttttagtagagacggggtttcaccattttggccaggctggtctcaaactcctgacctcaggtgatctgcccgcctcagcctcccaaatgctgggattacaggcatgagccaccacgcccagcctaattttttattttttaacacttgaagcaaaagtttatagttagactggaaatttttcattaaaaataactcttaattagtgttttgaataagtgccatttttatgtggttgcaaattcaaaagtcacaataaggggtctagacaaagttggctgacacctataatcttactactttggtaggccaaggagggaggctctcttgagcccaggtgtttttagaccagtctgggcaacatagcaagacccccatctcaacaacaacaaaagtcacaaaaaggtacacggtgaaaaatctccctttcatctccagccacccagttttcatccctgtggcaacaaaaatctttgtagccttgctgatatggtttggctgtgtccccaccgaaatctcatcttgaattgtagttcctataatccccaagtgtcatgggagggacccggtaggatgtgattgaatcatgggggcgattactcccatgctgcagttctcatgatagtgagttctcacaaaatctgatggttttataagggccttttcccacttttgctcagcacttctccttgctgccgctatgtgaagaaggacatgtttgcttccccttccaccatgattgtaaagtttcctgaggcctccccagccctgtggaattgtgagttgtttaaacctctttcctttataaattacccagtattgggtatgtctttattggcagcatgcgaacagaccaatacggtaaatgcagagaaattatttgagtcaaatgcttatataataaaatgctgcattccttatatatatatatatatgaggaaccatacttgcagtactatacatcctgcacttttcattttgcagcatatcttagataatgttccacagaggcctggttattttaaaataactttataggttccactgtatggatttactattatttattgaactagtcccctattcctactgatgattatttaaactgtttatttctagggcgttttttgttttgctttacttctggtataataaacaacactgcaatgaataaccttgtctctaagtgacttcatataagagcaagtatatctacaggacatattcctagaatttgctaggtcaaagagaaactttgatattatctagttccccttgacagaagttgaaacaatttatagtcctaatacacttacaatatattagaatgcttgtttcctcatatcttcaccatcatagtgtgtaatcaaactttttcatctgtgctattctaataggtgaaaaatgataacagtataacccccaaaagagaattatctttttctccacatcctcaacagcatttgttattatctgtcttttggatataggccattttaactggggtgagatgatatcttattgtagttttgatctgcatttctctaatgatcaatgatgttgagcaccttgtcatatcccatttgccatttgtatgtcttcttttttctttttttgttttaaattttttaaaaagtttttttatagagatggggtctcattatgttgcccaggctcgtcttcaattcctgggctcaagggatcctcctgcctcggcctcccaaagtgctgggattacaggtgttgagccactgtgcctggcccctttgtttttcttattgaattttagccttttaatttgtaggagctcttttatattttactgaaattaactacaaaaatgaattgcaccagcttgggcaacatggtgagaccctgtctctaccaaaaatacaaaaaattagccgggcatggtgacacgtgcctgtgattccagctactcgggaggctgaagtgggaggatcacttgagcccaggaggcggaggttgcagtgacccaagatcatgccactgcactgcaatccagcctgagttagagtaagaccccatctcaaacaaacaaacaaacaaacaaaaaacccacaaaaatgagttgctgctattttttccagtttgtcattttccttttggcttatctggtgattttttttgcccttttttttttttttttttttttaaagagacagggtcttactgtgttgcccaggctggtcttcaactcctggcctcaagctatgcttctacctcggccactggagttgttgggattacaggcatgtaccaccatgcccggctcatacatttataaaaattgaatttatcggtcttttagatcttgtgtcatagtgaaagtgtctttttccgttctgaggttataaatgaatcattgtatggttttattgtttacatttaaatctttgacatatctggagtttttgctagtgtattgtatagggtatggatccaacattttttctagatagcccatttgtctgaatgagaaacttttttttttttgagacggagtcttgctcttgttgcccaggctagagtgcaatggcgtgatctagctcaccacaacctccacctcccgtgttcaagcgattctcctgactcagcctcccgtgtagctaagaattacaggcatgcgccaccttgcccagctagttttgttatttttagtagagagggggtttttccatgttggtcaggctggtctcaaactcccgacctcaggtgatccacccgcctcggcctcccaaagtgctggaattgcaggtgtgagccacctcgcccggccctgaatgggaaactttttactgctgtcattcttggactatcctccacatgcacgtggatcatatttctgtttgctcagcccagacatcagaactcagatgcctgtagagactaggcaagttacataaaagggtgaagagtgccaggtgggaagtatagccaactggaaatggatggcatatttttataaagagggcagccactacccggtgcctgctgattactctcttgcacgaatgcagtaggtcccagtgttgccagatctttgtcaagagaagctgaaaatatacatttttatatgaagcctcttgattttaaaatgttaacaattaaatttaaatacagccttagctaaacaaaatatgtcttcaggcctgacttggcccagaaaagccttctgatattcctagccaagaatgagatttctaacaagtttactctcctatgagtaaagagaacatacatggtctagtagtttgacagcacagtagtttatagctggagtctgggaacaggagagaaaagtaaggaccctctatataagccaaagtcttcgctctcacagactgaaacattaatgggagaaatacaagcattttaccatcccaccttttatcccaagtacatgtgaatggatatggccatttattagaggatgttcttgatttagtggatactttagtggattagaaaaataatcttattttccaactctgccattctgattttgcccaaatgaaaaagtggtgcatgttttggggagaataattgctcagctactgatgccggaactgaattgtagtactgacttattttttgtaccctgttcgtcttttccctttctcactgctggtggctagggacagggagtaaaatatcttctttacaacctgttaaaagtaatgtgctcagcctctttagtgggatgaaatttgtggtaatgagttaccagagcctatgcctctttggattgaaaagcttgtcaggatcttttctgggttgctaatgagtgtttcctagacgccgatccaggttttgtaggacctgaagcctacacaatttggatgacacgattaagaaaacaattcgaaaatatcttgaaagttttgtaaaaacgatatgattttgtgaacgcacaggggcccgtgcaagtgaaggacctttcaattcaagcttgatcaacgtcactgtcatctgccccttctgaccctaccaccaggctaagggctttccacgcctcatctctcggtccccacaccatcaccctaagaaatagttactgtatctcctaacgatatattatatatagtacctactttgtgtaaacatacggtactcatgaaaacaagccacgtagagcacaaatacgttaaatatcctgtccagcccgaatgcccctttctctccacgtccctatgcagcctcccacgacggtagtcctggggctccagcgctacaagagtggcaccgagtccggattgtcttaagcaggtcgagaggagggagcatatgggtaaaaagcagtcaaactgaagagtctggagcggcccccagcacagtctcgggaaaagcggactcccccggggccccaggccccgcacccccgcgccgggctggcgcctgtgcctgctccgcggcgcgcatgctccgtgttaggcctcttgggctattcgggataatgagcgccgggccgagggggcgggccgagcctcggctgctgggactcagggctcagcggcgaccccaaggcactctgcgctgctgctaaaggggcagcaacggcggccagcgctgtgcgcgccatagcgaggctcgctcgcccgacgcgcactccgggtcggtccccagagctctgtggaggtgactcgagtgggcagggccgggcggcgctgtcggctgggagggcggggaggaggcgatgaggagacgagcagccgccgccgccgccgccgctgctcaccgcccgccgcggccgtagcgggagtcggggcggggctgggccagctgtacccctgacgggccgcgaacccagacaaaggaggaggagccgccccagaagcgggccagcgccgccgggaaaggaggtcgccgcccggggtcgcccgggcttgcgggtcgccgcgcttcctctgcgggcgctgcgggaggcgagggccgcctcggcggaggaagccgaccccggggtctccgccagcccgccggcgccgcctccgagccgcctcggccgtagcctcggcccgggcgggaggcggcggccgccggcgaggcgaggcggcccgcgccctgcctgtcaggccaccggcccggcccgcgggctgcccccgatgcggaggcgctgtcgccggggccatgcagcaggcgccgcagccttacgagttcttcagcgaggagaacagtccgaaatggcggggactgttggtctcggccctgcggaaggtcagtgctaggggcggggcggccggcgggtggcccgtggccccccgagcttctaacggggagcaggtcgtccctcccacagggctcgagtccccggggccgagccgtttctcgttggctggcaatggggggctcacaattgcctgttgcattctgaaggacgtttctcaagttttttttttttgcctggtcccggaaggaaggttttgttatgatcataaaactggatttcatgttgcagtcatttcgtcaggcaacttccgccgttgaccaatttgttgtcctcaggctggaatcgggcaagagaaagtcccgctggtatttagacagtttctaaaacaaaagcacattttcaggccgggtaattacttttaattaagttctttgggagtgttccccctaggcggtttgcttgtcaagggtatccacttatgaggcaatggttttttgtaatatggatgtttcacatgtgtgaaatgtcagtgagtcataatattcttattcattttacagttctcaaggtaaatttaaagcgccttcccacttcctgcaaacggtgtcttacctgtttacaagagattacccttagaaaatttggtcagtgtcttcagtgtcttcacgaccaaattgcgatttaggacttgaaatcattttaaggaacaagaaaggggcaactcctgcaaatcagtctttcatgtttgggtgcattgctagggtgcatctttcctgtagatggtggcggtcttcctctgtgaatttaggtagtaaccatacgatcatttttataataaatccttctgtaagatcaagacatttaaagactgtgaataggtgcgtgatcagctgtcatgcctgttgagcaggggctttctttctttgccgttaatgcagacttagtctcttctgccttttgtgcaaaataaccaagaatacattctaaaataaggaaaaaataaagattaatttaaaagactatacttggaaaatatatcctcagacattaaatttctataaatgaaaggaagtagtgtattttaaagttaaagacattttcctcatgcgatgagagttgcagattttcccttattttcataattcttacaaggaagtattgctttcctcagggcaaacactaagtcgtatctttttaaagaacctggcagaaatgactagtggcagctagacagttattccattggtataccaagtgctaaagtattaaattgaccttacttccatgtgcagcccaattctgtaaggagagggaaagaaatgaaaagtgtgctgagtggtgaaaatgaactctggcctgaattaaaagcaaagggggaaatgcctagatagtaattagccctttgaccacagacaagtgtgagtgcagtaatcaggtaggcctatattgttggcaatgtgacgcaggtatatacccatttataactttctggtagcaaatagtatttgggtgtgtgttgcataacttgttcaataggtagctttgattctaataatcctttatgtccagaaacagatttatgttttctttttcttcaaatagagacagggttatgctatgttgcccaggctggtcttgaacttctggcctcaagcagtccgcccacctctgccttccaaactgttgggattacaggcataaaccacctcgcaccagacccagatttttttttttttttttcaagttaggctggagaagccaagattagcatccaatcctagtccattgctttggtgctattactttgcatttatattgtgcttgttttcctggaactcaggtgccttgtagatactatgttatattccacagttctagtatgttctttatgaaataaatacatctaagaaaatttggtcttttgaggtgaattcagaaaacattttctattaacttactgttgtgatagaattgaaatacatacgtatggaaaatttttttatatttttggaaaaattttggtaaaagtaattaagattatgtccacttttatggtatttaggacattgcaacttgtaggtctgtagtgcctgctaagagctgtagctcttagggagctaaaggttcactctttctttgcaggaagttttaaattctggtatgcatcagccaccttgtctttgtaaaatgagaatttctaccattttgggggagtctctgtcttcacattcagagcatctagaacttggcatccttcctctagctgaccagatcgttacaaagacaactaggatttgattggaatatctctctccttcaattggtgttgccattgtacatgtggtgtattctagcttcattaattcacttaaccattattgaacacattttacatacttgacatgatgcgggatcctaagagtacaaagttaaaataaaggcccctccaaagatgtataccatctaaaccaaaaattctaaaatttgaggttttggtttatgtaaatgagagcggttctgagctcagagttcagtaaggggtatttgtgtgtctatgaaagcagcaatgtagcttacttggctctgtcagtttagtccacttggacatcttggtggaacctccaaaactgttagaacgtaattttcagaaaggtaaagtcatcacttccatgcaaatgtaaatgaacatgtatcaattattttgattcagcccattgatgagggaactagtaagatgttaaagtcacttaatatgaaaatttgaggaggtatttataggcaatttaataagggaatattaagactgttgggttacatacagaattagttaataccctacaagaaacataaaagagtaggctttgggttatattttcctctggctaaaaattacttgcatctcagtgggcgtggtggctcacacctgtaatccagcactctgggaggctgaggctggtggatcaactgagtttaggagttcgtgaccagcctggccagcatggtgaaaccccgtctctactaaaaaataccaaaaattagctgggtgtggtggtgtgtgcctgtaatcccagctgctcaggaggctgaggcaggagaatcacttgaacctgctaggcagaggttgcagtgagccgagatcacaccactgcactccatcctgggcgacagagcgagactccatctcaaaaaaaaaaaaaaaattacttgcatctctatctgctgaaaagctgtaacttaatcttatagatgtgtaaaatagtcagtagaaattaataaaagattcaagcatagcactgtactgaaacacagccagtattcttttgcttattttccagttttggctagtttttatgaaaactggatatctatgtctatatccatgtatatatccatatatacccatatatagatccatatatatatgtatttgacaaagtcaccattgtcaacattgaaaattcaagggatttttaaaaaaccaatctcaagtattcattgcattacatagaaacacagagatgggctgggcgcagtggctcatgcctgtaatcccatttgggaggccaaggcgggcagattacctgaggtcaggagatcgagaccatgctggctaacacggtgaaaccccatctctactaaaaatacagaaaaaaacccaaaaaattagccgggcgtggtggcggacgcctgtagtcccagctactcgggaggctgaggcaggagaatggtatgaacccagaaggtggagcttgcagttgagccgagatcgcgccactgcactccagcatgggcgatggagtaagactctgtctcaaaaaaaaaaaataccaaaattagccaagtgtggtggtgcatgcctgtgatcccagctactcgggaggctgaggcagagaatctcttgaacatgggaggcagaggttagagtgggctgagatcgcaccactgcactccagcctgggcgacagagcgagactctgtctcaaaaaaaaaaaaaaaaaaaagaaagaaagaaaaagaaacacagagatagacaaataggtttatggaaaaataattttgggaatagaaatgtggtgttctttagctttttgcttgttcttaaacttttaaaatagaacctcacctagatcatttaaaaacagagagctacaaagcagagtgaaatgacactactaatggataatgcatggattgttaacattactgctaaattatgtatcttccctaaaagagcctagaacataattgccttcaccactgctccccaagatcattgaagctattgtgttacttggggaaaaaagagcatggtgtatatttgtaaatgcagtttattacctgtgtcgttgaaatcccttggtactatatgcatgtgttatttgattatatgttgagataaatcagcattcttcatatgggaaatatgcctcaaaatcattttatcagattttacagtccctgatatttattttgtagatgtcttttctgtaaggtgtttttcaccaggctagccatagaaaagaacatggctgttttcttgccagctgtagttaaaaatgtcagagaaagctagaaagaattggttgaattactttgttcctgagtccaattagattcaggttaaatatcgacctccccaccctgtgacaatttgctcttagatatctaaaaggcaagaggtgtgagagaatgtctgggttaattaatagcagtctacggcaaggaaaaagatcggtaggggctttgatttaaaaatggttttgtgaagttctactgagatcctagtgtttctgcgtttgtacaaatgtctcttggaagtttgttttagaagatggcactggatctttcctgaggcccacaagaaaagtacagggtgatctgagaaaatataactggtgtcattgatatatgagagtcaaagaagactttaagcaagcaacatttgtgcttctttctggattatatattcaaatatagtaatattactgtctccaggctggtcttgaactcctgggctcaagcgatcctcccaccttggcctccaaaaatgctgggattacaggtgtaagctacgtcgcctggctgcagacactgttcttgatacggaagatgtagcagagcccctgctgttataaagcttgtgttctaagtggctgtggcagagagacagacaataaggaagtaaacaattatctgaaagatcagtagaattaacaagaaaaaaaaagggcgggggggaaggatttgaggctgaggggaaagtaagaacatgatttgtttgtttgtttgttttgaataggtctcagattctgaatttaatgacttattttaaaaaacaagaagaataagtggatgaagctagtatggtagactgtaggtacactgagttaaggtctctgcctgagaataggaagtcctgttgggttctcatttacatagcaaagtaattagattaacttgatcagaattgctttttgaaaagattacttcaagtcaaagccaaaaactaataagagatcctgtgatttttgtgacatgagcctgttctggaattcctaaagccgctgaatgtaacagtagaactcgagggagtcatttggaattattccaaactaataatgacccaaactgacccgaagagttcagccagaactagatgagcggtaggaatgtactttaacttgctgtacttggctccctgtcagcaatgattaagtagccttctatttttggtttaattttggtatggtatatttggagcaataatattccattaaagtgttttatgctgagtattcaaagcattacctgtgttaccccttgacataaatcaactatatgtcttttgtattaaccatggactctctttcaagggaacagtaatttgattatatcctgcatatttgaatcaaaaggaattttaatgtaactagtggatttagcattatctcatgttaaaaattaacaaccaaaaattattttcttccatgggccaggtgcagtagctcatgcctgtaatcctagtactttgggaggctgagatgggaggattgcttgaggccaggagttcaagaccaacctggccaacatagcgagaccccaatgtccataaaaaattattttcttcttttacataagaatatatgctagtacaaagttttttcaaatggataaagtattacacattcacattttaacatgtagaagtgaagcaacaagatgaaaataataccaagatctagatataaggactagtattagctcttctaagtaaagttttctgtactccagttttcttcctcattaggtcattttgtaaactcaaacactatttctctctctctctccttttttttttttttttttttttgacagggttttgctctgctacgcaggctggagtacagtggcatgatcatagctcactgcagcctccaactcctgggctcaaatgatcctcccactatagcctcctgagtagctgggactacaggcatgtgccactacacccagctaattttcttatttttttgtggagacaaggtcttgctatgtcctctggctggtctcaaattcctggactcaagtgatcctccagccttggcctcccaaagttctgggattacaggagtgagccacctgcctgccaaaaactacttcttacatacaaagtatattatagttctttcttaactgacctattagcagcatttgacagttgatctcttctttttttgaaatcctttcttcatttggcttccagaagaatatcaagctttcagggattttttttctctgaatattccttctagtttcccttcccttgattcctcctcatctttctgtgaccacatccttctgacctccccagagcccatttatatatatgtgtgtgtgtgtgtgtgtgtgtgtgtgtgtgtgtgtgtgtgtgtatatatatttttttttttttcctgagacggagtcttgctctgtcacccaggctggagtgcagtggtgcgatcttggctcactgcaacctctgcctcccaggctcaaccagttctcctgtctcagcctcccgagtagctgggattacaggcgcgcaccaccacgtctggttaatttttttttttttatatttttagtagaaatggggtttcaccatgttggccaggctggccttgaactcctgaccttgtgatctgcccgcctcggccccccaagtgttgggattacaggcgtgagccactgcgcctggccaatttttagacttctatttctattaacacatcctcctttggagatgccatcctgcctcattgcttcacgtataatctaaatctgataattaccaaatttacatttctggctcagacctctttcttaaacatgaatgttcaactctttttttgagacagggtcgcactctgtcacccaggatggagtgcagtggcaagatcacagctcactatagccttaacctcctgggctcaatgatcctcccacctcacccccctgccgcccccatatagctgggactacaggtgtgtgccaccacacccagctaattttttgtttgtttgtttgttttagatggagtctcgcttttttgccaggctggggtgtagtggtgcaatcttggctcactgcaacctccacctctcaggttcaagtgattctcctgcctcagcctcccgagtagctgggactacaggcgtgtgccaccacgcccaggtaatttttttgtatttttagtagagacggggtttcaccatgttggccaggatggtctcaatctgttgacctcgtcacctgcccgccccggcctcccaaagtactgggattacagggatgagccaccacgcccagccccaatttttaaaaaactttttgtagagacagggtcttactgtgttgcataaactggtctccaactcctgggcccaagcattcctcctgcctcagcctccaaagtgtttgagttacaggcatgaagcaccacacccggccaactttttacttgatatttccacagaggcatctcaaccaacactgtatccttttcttcccctgcaaacttgtttcttttgtagtggttaacatatcaataaatggctactccatccttccggttgctcaaactaaaaatcttaagttattcttgaatattgtctttttttataccacacatctaatttgtcagcacatccttttagctctacctcaaactatatatttagttaccgttttatactttttgacttttaccacctggaaccaagtcatcatcaccaatctcctggaatattgaaatatcttttcaactggtctctgatcatctgctcttgtcctatttagtttctttttctccccaaacacaaagagataagtgagatcatttcactcctttgttcaaaaccctctcagtgcttctcagaataaaagtcaaaaaagtcctcccaaaggtttactaggtcctctgcagtctagggctgccccacctcccgcttttacctctctgacctctttaatattgtcccttgtttgttctgcttctgccccatactggctttcttgtttctataacgtagacatgttttagtcttaggacttttgtacttgctgaattttctacctgaaacacccttccctcagataatcacgtggctggcccttttacctcctttaggtctttatagtcagacatcattttcttggagagattttctcttacagcctatctaaaactgctacatcctcctgcttcccagacagtcccacatcagtgttcacagtattttttcccataaacctgtatctccaatataaatgatgtatccagttctcaagccagaaacctagtcatcattcttcccctctttctcatgccaggctaacatgtattcatcactgaatctacttgattctttctcctaaattaggagttttctaactttttttgctgtgtatccccaaaagaattttgaaaaacttgcacatttttatgctgacatctagaaattttcattttacatttaaatagttgcagtagatgtaatttcatatgtgttataaatactgatgttttaaggtaaaacagttgcatcagtcttttaaatgtgctgaatggaatttaaataccaaaataatttgatatccaccatcattttttaaaaatacacatgaaaagtgtgtctttaaaagttggaaattttacattgtcctttttttctctgtgaacttttttcattatatttcccctgcataattctaatatgatatttttagatttaagtctttaatcgcacttttttatttatactccttacaacaacaaaaaagtctacatattgaatttaaaaggattttccctacaaccgtaaagctttaaaacctgtcttttgaactgaattattattattattattattaaagtctcattctgtcacccaggctggagtacagtggcatgatcatggctcactgcagcttcaacctcccaggctcaagcgatcctcccatttcagcctcctgagtagctaggactgcaggcacatgccaccacacttggctaattttttaaaaatcttaaagatgctttctttttattttcatgggcctgtcccctcaggaggatgtatttttccactaggctagaggatggaagaggcaagatacttaaatgaaaatatttgtaattatctctttgtttagtgtctaggatttatttattgcacttcagagcaacatgtatcctatagagaatttcaagataagtgagagatctgcctttcttagtaaaatgagagggcaactgtgaaaacaggtataaaaggagaccctgctttactcactgtgtgcaggcaccttgtcaggcagatcttctttaggaaagagtacatatggctgtttagaaagtgtcctgacagacgtgggtgtttggcctgggaatttattaaacataagtgaatgaaacaaatttaatagcgatcttttcccagttcacaggggaaaaaaagcaattattttttcaattttatttttcttccataaattagaaaaaaaaatctttgttgtctgctgcaatttacttgctagtgagtagtgaaagattgtaaaataaatgagcgaatgatcatggaggttttaaagggaaaatggcttttaatactttttggtttttttcttagaaacatgttcctgtagtttgattttaagttttaaagtcattactagcattgtccctgctgtgatagaatatgagtcttaaaatttcacgttctgcaaagaacactgatttccaaatgatctgccactggaacaaattgggaaccatttttctagcctgtactgtcttgggtttacaagcaaatgacctgcctttatgggaaggtgcttctgggtcataggccattcaaagaaaactttgatgacaaaaatttttgcttcagctaatcttttttacatatttgattatattatggtaagctctcacctaatattaagtagaaatagcttcttggcctgtacttatctgcattttaaataaacttacattgtgaaagcctgctgaaagtacctaattaagagcatggactctgagaattattaatggacagtgggaggaatagagaaacgtaagagagggaattccttcatttataatgttgtatgagaaccaggtctccagatacatttccagtgaaatgaaaacaaattttatggagtttaaaattttttccagtatccagataatttcagtgaggccaagagatctgtttgctgctgtgaatctatttaacaagtatttactgagtgctttctttatgcagggtctgttctttttttttttttttttgagatggagtctcgctctgtcgcccaggctggagtgcagtggtgctatcttggctcactgcaagctctgcctcccgggttcacgccattctccttcctcagccaccctagtagctgggactacaggcgcccgccaccacgcccagctaagtttttttttttgtatttttagtagagatggggtttcaccatgttagccaggatggtctcgatctcctgacctcgtgatctgcccgcttcggcctcccaaagtgctgggattacaggcgtgagccaccgcgcctggcccaatgcagggtctgttcttttaatgacatactagattacctgtatgctaagcatacaggtgtagggaaataggaggaggagaccgaaaacaagaaatgggagctggtgtggtagtgcccacctgtagtcccagtcacaagggaggctgaggtggaaggatcacttgagcccaggagttcgaggcttaacagtgagtggtgatcacaccactgcactccagcctgggtgacagagcaagattctgtctccacacctctcccctgccccccaaaaaacaaacgagaaatggttcctgatcttaatgagtttagagtatgcagctgtggtttcaatttttaattatacactttgattagaaaaatgttgccttagaatattatattttagaattattttttaaaaccttattgggatgtaattgatataaagtatatatttacagtacatatatttacaatgtacaatttgatgttttcaacaatgtgataagttatatatacacagtaaaaccatcccagtaaagctagtagacatatccttcagccccataaatttcctcttgactgtaattctccctcctatttctccccactctcaggagacatcccaagccatcactaatctgttttctgtcattatcgattgcattttctagagttttatattaatactgatagaatcatacagtacatactcttttttttcaatctggctttcagcatgattattttagattcatttatgttgcatatatcaatagttcattcctttttattgctcagtagtgtattccattgtgtagatatactgtggcttgtttatccattcacttatttatgtacatttagtttttcagatcttggctattcaaataaagctgctatgtatatttgtgtacaagtctttgtatgaagatatgtttcaatacaaagaatggaaattgctggtaattaccaaagagtggttggatcggatagtaggtggatgcttaacttttttttttttttgagacgaaatcttgctctgttgccaggctggagagcagtggtgtaatcctgactcacagcaacctccgcttcccgggttcaagtgattctcctgcctcagcctcctgagaagctgagattacaggcacgccccaccacgcccggctaatttttctatttttagtagagacagggtttcactgtattggccaggatggtctcgatctcttgacctcatgatccactcgtctcggcctcccaacgtgctgggattatagccatgagccaccacgcctggctgcttaactttttaagaaactttcaaactgttttctaaagtggttgtatagttttacattcccaccagcaatataagagatcctgttcctcccgccaatacttggtaatttaattttagccattctaatagcagtgtaatggtactttgtggttttagtttgcatttccctagtgattaatgatgttcaacatctttcatgtttttatttgccttccatatatcttctttggtgaagtgtttgttcagatctttggcccatttttgttgagttgttttgtttttttgtttttgtttttgtttttttttggggggatggagtcttgctctgtcgcccaggctggagtgcagtggcacaatctcagctcactgcaccctccgccttccgggttcgagcgattctttcacctcagcctcccaagtagctgggattgcaggcacccaccatcatgccctgctaatttttgtatttttagtagagacaggattttgccatgttgcccaggctgatctcaaactcttggcctcaaggaatccacccaccttggcctcccaaagtgctgggattacaggcatgagccatctcactcggccttttttttttttttttttttttccttttatcgaagtttcattatataccattctcttaatactatctttttatctttttctttctttctttttttttttttgtttttaagagatagggtcttgctgtgttgcctaggctggtcttaagctcctggcctcaaatgatcatcctgcctcagcctcccaaagttctgggactacaggcataagccactgcacctggcctatactatcttttggagaccaaaagttttttttgtttgtttgtttttgtttttgtttttttgagacagagtctcgctctgtcgcccaggctggagtgcagtggcacgatctcgattcactgcaagctctgcctccgggttcacaccattctcctgcctcagcctcccgagtagctgggactacaggcgcccgccaccacgcccagctaattttttgtatttttagtacagacggggtttcaccatgttagccaggatggtcttgatctcctgacctcgtgatccaccggcctcggcctcccaaagtgctgggattacaggcgtgagccaccgcacccggccaaaagttttaaatttttatcaatttgtttttttagggactgtgccattagtgtcatatctaggaaatctttgcctaacccagggttacaaaaattttcccttctagaaattttttatttatttattttaattttcaaaaatagagacagggtctcactatgttgcccaggctggtctcgaactcctgatctaaagtgatcctttgtccttggcctcccaaagttttgcaattataggtgtgatccaccatacctagcctgttctagaaattttatagtttaaattttatatttatatctatgactcatttgaatcactttttcttttttaaaaaaatctcaccttgtcttatggtgctgattgaatcattttatatatggtgtgataattctgtatatggtatgtttgtttttttgtatatggatatctggttgttctgtcaccatttattgaaaaggctgtccttttcctttgctaaaggtcttcatgcttttatttaaaaaatcagttgcccatatatgtgtggttttatttctggattctctattctgttctattgattgttttccttatctttatgtcagtgccgtactgttttggttaccatagctttatagaaatccttgaaatcaggtagtgttagcccttcaactttgttcttctttagagttgtttcagttattctaggacctttgtatttccatgagaatgttttaatcaacatatcaatttctacaaaaaagcttgctggaattttgattgagattgtgttgcatctacagatcatttgggaggaattgacatcagaacaatgttgagtcttccaactcatagtttaatctcttcatttatttaagtctttaattcctatcagcagtatattgtatttttatttttatttttatttattcatgtttattgtattttgtttttattttttgagattgagtctcactctgtcacccaggctggagtgcagcagcacgatctcagctcactgcaacctctgcctcccgggttccagcgattctcctgcctcagcctccagagtagctgcccagctaatttttgtacttttagtacagacggggtttcaccatgttggccagcctggtctcaaactcctgacctcaggtaatctacctgccttggcctcccaaagtgctgggattacaggtgtgagcaaccttgctctgccagtattttgtagttttagtatatatacttcaactaaaatttttattttctttttaaattgaattttaatatttcataatgggctgggtgtcgtggctcacgtccataatcccaacactttgggaggctgaggcaggcagattacctgagctcaggagttcaagactagcctggccaacatgatgaaaccctgtctctactgaaaataccaaaattagctgggcgtgatggtgcacacctgtagtcccagctacttgggaggctgaggcaggtggatctcttgaatctgggaggtggaggttgcagtgagccaagattgctgccactgcactccagcctgggtgaaacagcgagactccatctcaaaaaaaaaaaacaaaaaaaacccaaaacatttaataatgaaaacattgccagtattcttaattgatgtttgagatatttgcatccttgtggaaatcttggcagcacaatgaagaatttggcaaaaataaatatcagtcagactctatatccaaaaggatttatttccacattgtacctgaaactcaaatgttaattactgaacaagtgcattagcaagatttttaatttaaatgtgaagatggaaaactgaaaaatataaattaggaaataacatttctataacttgtcaaatgtagtggtttatcagggtaaaaagttaaagtgcttttgtgtgtgtctacacatggatttatagtatgagactattttgttttttgtttttttttattatactttaagttttagggtacatgtgcacattgtgcaggttagttacatatgtatacatgtgccatgctggtgcgctgcacccactaacaattctatttatagtgttacagtaaggaaatgccttctggcaatttgaaaatatggtgtaactaaaatacaggtctgacttgttaatctactgttaaagactggaaattattttaattgctctttttctgactaggctttcaaaaaatatgataggcaaattggttctgtcgtggtaattttatgtttactgtctctgtagaagtgtaaagcatggttctcttccattgtcctcttgatgtcctgttacagcatttatgggtgagattttaacattgtgtgtttatttttatgactgttttcatatttgaaattaagaagtttggcataagaaactttgatgcttgatgttcaaattgctttgtagcttatttaacaaaatcataatcacagaaaaagaatccatcccagttagacattatcttaattctcatgttcaatcattttcactgagtggggcccttggctttttatggaaagatgttataagaaacaaccttgccgggcgcggtggctcacgcctgtaatcccagcactttgggaggacgaggcgggcagatcacgaggtcaggagatcaaaaccatcctagataacacagtgaaaccccgtctctactaaaaaatacaaaaaattagccgggcatggccgtgggcacctatagtcccagctactcgggaggccgaggcaggagaatggcgtgaacccgggtggcgaagcttgcagtgagctgagatcgcgccactgcactccatcctgggggacagaacaagactccgtctcaaaaaaaaaaaaaaagaaagaaagaaacaaccttgcctcagggaggggggcctgaggaggcaggaggattgtttgagccaaggagttggtgaccagctcgagcaatttaggtaggcctcatctttaaaagaaaaagaaaaaaaaaaaaaaaaagaaacggccttatgaagtctactgccacacttacaatgtaaatgtttatttatttatttaaagatggagtctcattatgtttggaagcctgaaactcctcggcccaaggaatcctcccacctcagccactagagtagctgggactacaggcaccccactacgcctagttaaatgtctacttttttaaaaatgtcttttaaaagtcgattgatctattagaaatgtatggctaaaatgtaattaagttatctctggctgtgttaaagaagtgcagggtataagaggaaatatttatttctccaaaacctaatttgaatttattagaaaatatgttagaaacatatttctaacatagaaatacattagaaagcctgattttttttttttattattggtcctatatgaatttctaattgccttactgctagactttttggaccagacttcttcaaagagtagtctttccttactatggccttccacttccccattccccaattcaaaattatttttctttatcaattagtttgtattttgtcaaaattatttatgtaaataaaaagataattcgctctgcaaagcttgttatgaaaaatagcattacttcccccttaaacacaaaattttctgtttcctagagaaaaccattttaacttttcaaagtgatttatttacttctatatttctaagaaagaaaaagtgcttatattgctatttcatgtttttttctgttttggatgttatctgttgacttcctaccacggagggtaaggatttaatattctcttttttctctttttttttttttttcttggcagggactcactctgttgcccagactggagtgcagtggcacaaaggatttaatattctttaatatgcacatacattcccctccaaccacacacacactttccactttctcttcccccacttcaaagttatatcttaatttgagttggattaatattcaaagtttacattattatgactgtaaatgctatttttggggtttttttttggggtgggggggacagggtctcactctgtcggccaggctggagtgcagtggcacaatctccactcacctcaacctccacctccagggttcaagctgagattacaggcacgcaccaccaggcccagctaatttttgtatttttagtagagacggggtttcactgtgtaggccaggctggtcttgaactcctggcctcaagtgatccacccccaccttggcctcccaaagtgctgagatcataggcatgaaccaccacacccagcctataaatgctatttaatctgctttttcttttctaactcactgcttttactggagttattaattatcttgttttcttgtttgtgtgtttttctatgtagtacacttattaccaaattcaaactttttaccagttttctaaatatcctatcaagattttcatcccattgcatactctgtcaagtttgttttcttgagacagtctctcccagagccttctgacctgcaccagtgtggactggtcacctttattcctgttttacagctctcatcctataatttcctttcattttatcctgggcattcctttgacctttcttctctattgattcctttattttctttattccatatttttctttcttgattcatacccttgttttagtgtagtacaaatgacagaaggttaatgagaaagactacgtgagagataaagttttggaccttattctatctaagaatgtcacgttagcatggcatttgatattgctggtatcttggattccaggctgaacatcattaccatctagcttctagtattactgttgaaatctgaagctaatgtctgcttctcatatataatctactcctcctcacttccctgtcctcccagtcttgtaggatattctctttgtctccagggtcctgacattaaaattttgttcagtgacatgggcactagaaaagccctttagacttattttattgataatttcccccctcaatttcctctgtttgctagatgattctcaaacttttgaaaacctcatttatggtgaagtgtaacatataatcagaaaatgtgtaaaggataaatatacagtttaaggaacacctatttaacactcaggtaagaagacagaacattgtcagcacttttctcaggataactctccaaaaggtaaccgtttttgtggtattcactgttttgattttctttctttttgagacggagtctcgctatgttgccaggctggagtgcagtggcatgatctttgctcactgcaacctccgcctcctgggttcaagcgattctcctgcctcagcctcccgagtagctgggactacaggtgtgcaccaccatgaccagttaatttttgtatttttagtagagacggggtttcaccgtgttggccaggatggtctcgatctcttgaccttgtgatccgcctgccttggcctcccaaagtgctgggattataggcgcgagccaccgcgcctggcctgttttgattttcttaatagtttttccatctcagcgtgtatcccttaacaccattgtttaatttgttctgaatttgtttattttttatttttgtatttaattttgtctgactttgtgaatggaatcccattgtatgtattctttttatctggcttctttctgccaacattttttcagggtgcatccacattttatgtagctgtcattattactgcatttttttgactgtgtgtattccattgtattaataagccacaatttatctgtcccattctggatgaatatttgaattcttttctagttttggaaggtattattaataatgttatttatgagccttctagcgtatgtcttctggtaaacatttctctagagcattgctgtctagaagagatacaatgtgagccacacatgtaatttaaaattttccctcctaggctgggcatggtggctcatgcctgtaatcccagcactttgggaggacaaggcaggaggattgcttgagcccaggagttcaaggccagcctgggcaacacagcgagaacctgtctcaaaaatctaaataataataataataattaattaaaaaataaataaaattttccctcctgagtgaattaatgcaggaacaaaaaaaaaacaaatgctgcatgttctcatttacgggtgagagctaaacatggggtacccatggacataaagatgttaacaacagacaccggggactaatagaggaggtagtactatgctcagtacctgggtgatgggatcatttgtaccccaaacctcagcatgacacaatatacctaggtaacaaaatctgcacatatacccccttaatctaaaataaaagttaaaaacgaaaattatcatagccacagttgaaaagtaagaagaaacagatgaagttgattttaataacatatttttaacccaatctaatcatttcagcatgtgtcataaaaattgagaatttgacttcttattttaatactgaatccttgaatctggtttgtattttacaccaacatcccatttcaactcagtggagctacatttcaggtgttcagtacccacatgaggctagcgtctattatattggactgtatagctctaaagaaatatatgtaaatctatcctgaatatatatatatatatatcctatagtggaattgctcagtcatagactatacatatcttgaactttagtacttaatggcaaagtttttgaaagtgattgaaacattttacattccagtagcagtgtgtgatcgttcccattgctccacatagttaccaacatttgatattatcagaatttttagttttgctgcctggtgagtggatagttttcatggtcgtttaatttacatttttctgattacttaagagctagagcactttttaatatatatataggctatttgaatttattcttttgtgaagtgctagtttaagggttttttgcccattttttctcttgggatttttatcattttttttcttactgaatttttaggagttctctatatattctagatatgagccttttgttacatgtactacatatatcttctccaactctgtaacttgcctttttactttcttaaagatgtcttttgagaaacctaaattttaaagtttaatataaagtttatcagttctttccttcatagctagtaattttttgtgtcctatataagaaatctttttcaatcctgaaatcatgaagatattatctagttttacactgtcagagctttattgggtatatttatttattaggcctaacatgcagctaggattgatttttgggtaaaggttgaagtaggagttgattttctttttctgcagtggttcaacactattcatacacttccctgcctccctgcaactctctgccacacctcatactctacagtgccatctgtgtaaataagcgtctatatatatgtggacttgtttgtggactctgttatgtcccattgatttctttctctatccttatgccattgtcacattcttcattactatagctttgtaataaatcctgacaaccattggagcaaatccttgtacttccttacagacatatgactttgttgtcagtaattttaaaaaaagaatatatgactgattttcttagctttttgcacttttatttacatgttgaaattatcttggcatttttagcaaaacaacctgcttggttttgattgtgattttataactgcatgtatcaattttgagagaattcagttgtatacaatattaagtctgacagttcaccaacgtggtatcatctttcatttatttagctctttaatttttcttaaagtctagttttctccctaggagtcatgtgtaccttatcaggtactcaaggtacacggtattttaaattctactgtaaatgctatttaattttttttttttttgagacaaggtctcactctcacccaagctggagtgcagtggcataatcatggctcactgcagcctcgacctccgggttcaggtgatcctcccacatcagcctcccgtgtagctgggactacagttgcgtgccaccacatctggctaattttttgtagaagtggtgtttcaccgtgttgcccagactggtcttgaactcctgggctcgagcgatcctcccgcctcagcttcccaaagtgctgggattacaggagtgagccaccgcacctggcctaaaaattttgtttgctagctttgttgctggtacatagaaagaaaagtttattttttatgagttcaggtaatttatgtgtacaatatttttgtcctgcatgggtacattattttgtcctccatgggtgcatggattcttcagagaagcagaaccaataggagacacacacacacacacacacacacacacacacacacacacacacacacgacatttaaggaaataggctcatgaggttatggtggcccagaagtccaagatctgcatttgtcaagctgcagacccagaaaagccaatggtataattctagtcctagtctgaaggcctgagaaccagaagagctgatgatataaattccagtctgagtatcagtctgaaggcagaagaccggtgtcccagctcaaatacagtcaggcagagagaaagaattctttctcagccttttgttctattcaggcctttagtcaagtggataaggccacactggggagggtagtctgcttttctcagtctaccaactcaaatgttaatctcctccagagataccctgacagacatacccagaaatagtgtgtaaccagttatatgggcaccccaaaattaaccatcacaatgggcagtcagatgatctgcaaatttgtttcttctttaccaattctgaaattttctttttcttggtttactgcaatagccaggacctccaaatataatgtggaatagaaatgataatagaaaatatccttttccttgatctccaaaggaaagctgtcagtgtcttgtcttactattaactatgattttattgtagctttttttgttttgttttgttttttctttgagatggagtcttgctctgtcgctcaggctggagtgcggtggcatgatctcagctcactgcaacctctgcttcccagttcaagcgattcttctgcctcagcctcccaagtagctgggactacaggcacctgccaccacaccggctaatttttgtatttttagtagaggcggggtttcaccgtattggccagggtggtctcaaactctgaccttgtgatccccccgtctcagcctcccaaagtgctgggattacaggtctgagccaccgcacccagcctattgtagctttttagtatacatcctttatcaaatgaaagaagttcacaaagagattttttatttgtttgtttgagacagagtctcactctcacccaggctggagtgcaacagcacgttatctcggctcactgcaacctccgcctcccgggttcaagcgattctcctgcctcagcctcccaagtatctgggactacacgcgccttctaccatgcgtggctaattttttgtatttttagtagagatgggatttcaccatgttggccaggctggccttgaactcctgacctcaagtgatccacccgcctcggcctcctaaagtgctgggattataggtgtgagcctccgtgccgggcccacaaagagattttatcatgaatgaatgttgaatatttttcaaatggcttttttacatatatattgggatggtcatattatttttctttttttcttttcttttttttttttttgagatggagtctcgctcagtcatccaggctggattgcagtgatctcagctcacggcagcgtctgtctcccgggttcaagcagttctcctgccttagccacccaagtagctaagattacaagcctgtgccaccacacctagctgatttttatatttttagtagagacggggtttcaccaggttgtccagtctggtctcgaactcccgacctcagatgatccacccacttccagcctcccaaagtgctgggattacgagccaccatgcctggctgtgattgtataatcttatttgtatacattatggaatttagttaggtgacactttacttaggcttttttttttttctggattcataagtgaaaatggcctataattttgttttcttttagagatgaggtcttgctcattcccccaggctggagcgcagtggcaccatcatgtctcactgtagccttgaccttctgggctcaagtaatccttttgctttagccttctgagtagctgggactacaggcatatgccaccatgcccagctaatttttttattttggagagatgaggtcttgccatgttgcccaggctggtctggaattcctggcctcaagcgatcctctgaccttggcctcccaaagtgctgggattacaggcatgaaccactgtgctgagctaaaaatggcctataattttcatctttctttttgagtttttatataaagtctagtcccaaaataaattggagagtatctttttaaaaaaaattttctaaatgttcgcttaagattgttgtattgcttcctttatgtttgatgagtttgtcaatgaagccaggtagacccatataatgggctataatgcaagtctcaacaaatttcaaaagattgaaatcatagaaaatatgttttctggccaggcatggtggctcatgcctgtaatcccagcattttgggaggcagaggtgagtggatagcttgagctcacaagttcaagaccagcttgaggtcaaggctacagtgagccatgattgcactactgcattccaacgtgggtggcagaatgagactctgtctcaaaaaaattaaataactaaataaaaatgaaaaagaaagtatgttttctgacgacatgtgattattatagaaatcaattttaaaaaccttttaaaaaatctcatgtttaaaaattaaagaaatttgcttctagattcttaaggtgaaagaagaaaccataatggaaattagaaactatagtccaccattcttatccttgggttcttaatccatagattcagccaacctcagatcaacagtatttgggaaaataatggatggttgcatttgtactgaacacatacagacttttctcttgtcattatttcctaaacaatacaatataaccactattacatagcatttacattgtattaggtgttacaagtaacctatagatgatttaaagtatatgggaggatgtgtgtaggttgtatacagtgttacaccattatatataaaggacttgggcatccatggatttgggtatccacaggtgtcctggaactaatttcccacagacactgaaggatgactgtattttgaactggatgattacaaaaatattccatatgaaaatatgtgtgtttttacaaaagtagttttagagaaaacgtacatattagaaaagaaaggttgacaaaaatgagcaaagtatccatctcaagaagttggcaaaagaacataaaaagcagaagaaataatgaagataaagcaaaaataaatgaaatataaaacaaacataaaataggatcataaaagccaaaagttggttctttaaaagattaataacattgataaacctctgagatgctgatcaagaaaagaacgaatacacaaataactaatattagaaatgaaagaagggattttactataaatcctatagacttacaaaatatgaggctataatgcacaattttatgctattttttttttttttttgagatggagttgcccaggctggagtgcagtggtgcgatctctgctcactgcaacctctgcctcccaggttcaaacaatcctcctgcctcagcctccttagtagctgggattacagacacgtgccaccacacccagctaattttgtatttttagtttcaccatgttggccaggctggtctcaaacttctgacctcaggtgatccacccacctcggcctcccaaagtgctgggattacaggtgttagccaccgtgcctatgctaattttttaaaactctcattttgttcaggcatggatctcttaggaaatggcaaagtctaaatcgtagactaatcattgtttggcaatggttggtttagtggtggcacgtgatgtgatgttaggaagaattctatggtaaattttgagacttcaaataaaatggttaacttcaatgctgtgttttttgtggggagggttttaaattacttttgcttaactatgaggctattcaagttatctatttttgtgttagtgcttctgatatccttctgacttcatggcataaaaagttaaagcaggctgggtgcagtggctcatgctataatctcagcactttgggaagctgaggtgggaggatcacttgagcccaggagttcaagatcagcctgggcaacatggtgagacttcatctctacaaaaagttttaaaaattagccaggtcatggtggcacacacctgtagtgccagctacttgggagactgaggtgggagggttgcttgaccccaggtctgcagtgagcctgggtgacagagtgagaccctgtctcaaaaaaagaaaagaaaggaaagcaatacttttttaaatttctttcaacaaatatttataggacacctactgtatgctaggtactattatttaccatatttcttatatccagtcagactggattattatttaggacagaaaatttagaaacaaaaacggctcatccctagaaggatgcagctgcttaaaaaaaaaaagaaaagaaagaaaaaaaaagaaaaaaaggtggggtgcttagcatagctggtggtgacagtgctattgtgaaagctgagtagcacctatttcacagagcacctctataatttgtaaaggagtatggtttttcagatgttacctttattactgggattcatgacctgcgtagacttcaagtaggtttattgacttcagggtatccacagttcctctgaaattgtatagaatagtttatgtgtatatgctttttggtgatagggaagagagggttcaatggctttccatagatttttcaaagggtccaaaaatgcttaagaaccactgctctgtgggttaagaaaagtttacagagaccaacaaatagtttttttcttcattttgtgttttatgtctgttttgagtaaccattatagtaaaatattatatataagattctctttgacttttgttcaatttatattattttgccattactttaactgataacttttttctaaaggttcaggaacaagtgcatcccactctctcagctaatgaagagtctctctattatattgaagagctgatttttcagctgcttaataaattatgcatggcccagccaaggactgttcaagatgtagaggtaaaaattattttgtcatttcaaaaagtcactcaagcactgtatgaattaatttttgtatctatatcattctaatttattgtgaaaactaaaaccactgaaattatgtatgatatatatggtcagtttgtttttgacaaaaatgtcaaggcagttcattgaggaaaggcaagtttttcagaaaaaaaaaaacttagaacaactgggtacatttatgaggggaaaaaaccttgaaacctatctcatgccgtagacaaaaattaattcaaaatggatcatggccttagacataacagctaaactacaaggtttctagaagaaaattctggaaaatatcttcataacctgggtttaggcacatattttttagagaggactcaaaacatagtactttatattgaataataaggccaggtgcggtggctcacacctgtaatcccagtactttggctgaggcgggagaccgtctcaaaaaaaaaaaacaaaaaaaaaatgttctctatgtcagttgagatgatggttacacagacataagcatttctaaaactcaacaaattgtacattttaagatctgtgtattttactgcatataaatattacctcaataaaagattagtgtaaattttgaggacatttgctcagtgatttaaaaaaatgtatatgtatgtgtgtgtgtatatatatatatatctgaaaaactgtttaaattagtactaaaataattgttttgccttggttacatgggagtatttttggatttttagcaatatctgttagggagagttttacttcttttgtataaaagcaccctgtgcacataaaattaatattaataaaattggtattattttctcctgctaaaaacaaatgtctaatagtacagctatcaaaaattattttcatttttattttttgagatggagtctcactctgtcgcctgggctggggtacagtggtgtgatcttggctcactgcaacctcagctacccaggttcaagctattctcctgcctcagcctcccaagcagctgggactacaggcgtgcaccccaggctaatttttatattttcaaaaattacttttatactatactgtttacatttccttttgttttgaaatttgtttctataagcaacaactttctttctttctttttgtgaagtggcatgatcatagctcactgtagccttgaactcctgggcccaagttgtcctccggcctcagcctcccgagtagctgggactacaggcacgtgtcactgcgcccagctaatttttatttttatttttgtaaagactgggccttgccgtgttgcccaggctggtcttgaactcctggccttcagtgatcctccctcctcagccttccaaagtgctgggatacaggtgttagccaccatgcccagctacaacaactttcagtataaaggaaaatcttaatttgtagtgattgagctattaagattttccaggattcttggaattaaagcatttttttcccctgttctctgctgccaattgtttgggttttgttgtgttttgttttaagagacagggtcttgctttatcacccagactagggtgtagtgacaggatcatagctcactgtagccttgaactcctgggatcaagcagttctcctgcctcagccttccaagtagctgggactacaagtgcatgcaaccatgcctggctaatttttaaatttttttgtagagacagggtctccctacattgcgcatgctggtttcatactcctggcctcaagggatcctcccacctcagtctcccaaagtgctgagacttagaggcatgggccaccatgcccagcctctgctactagttttgaacatgaaataaacagactgaaagcatatttttcaatagctaaatttgctaaaatctgagactataactataaatataggaaaccctgctaaattagagtttaattcagatctcagtagttcttgtttttcatgccaatgaatcactgattaaattaaaattagatgaactgcctaggtgcagtggctcacacctgtaatcccagcactttgggaagttgaggtggacacaatcacttgagcccaggaatttgagactagcctgggcaacatggcaaaactctgtctctacaaaaaatagaaaaattagccaagagtaggggtatgtgcttgtagtcccagctactcgggatgctgaggtgggaggatcactggagtctgggaagtggaggttgcagtgagctgagatcccgccactgcacttgcacttcagccagaagtgacacagacagagtgacaagagtgagaccctgtctccaaaaacaaaaaagcaagatgaacacaaaggctaagattgtttttgtcaaggtacgtattttcataagccattctgagctctctcacccatttcatcttccaagagatacatgacgtcttttatttgaagctctaagattaacgaaaggagagtggctgtatactaatgattaaaaatgaatgaacaatttctgctctgctaggtaaatagttttaactctagaaacctaacttaaaatcactaatacactatttcatgttcgctttaatctttcttatatatcctatgtattgttttttcctttttccggttcatcttaattatgtttaaagctttctttttgaagtttacctttttgttttatccatgaaaattatgtggaaaaattttgatagtcctgttgaccttttttttttttttttttctgttgggggtctccctctcacccaggctggagtgtagtggcatgatctcggcttgctgcaacctccgcctcctgggttcaagcaatcctcccacctcagcttctgaagtagctgggactataggcatgcaccaccaccatgccgggctaatttttgtatttttaatagagatggggtttcactgtgttgcctggctggtctaaactcctgagctcaagtgatccacctgcctcagcctcccaaagtgttgggattacagacgtgagccaccgcgcccagcctgaccttttttttaagccaaaaaatttatttattacaggaatcagaatgtattgtgtcactattatctgctagcattaagaatagagatcaagttgaattttgtatgaatttcctatttatgaacacttttattaatactacaatggttctgctgtgattgagcaggagcgagttcagaagacctttcctcacccaattgataaatgggccattgctgatgcacaatctgctatagaaaaacgaaaacgaagaaatcctcttttactgcctgtggacaaaatccatccttcgttgaaggtaacaaaagattaaacattagttggggggtgttctttataacaagtaatattttatttctatatttataaagcattaatgtagcatggtctgtgttagtgtgtatatgtgcacttccatatgtatgcttgtacatacacatcgtatatattaatatgtatacaaaatgattatgctctggtgaaattggattgcttttcaaacaatattaaaaattattaatagtgataatgcattactattattttgtggcatcttttttttttttaagtagagacagggtcttgctgtgttgcccaggctggtctcaaactcctgggctcaagtgatccacctactttggcctcccaaagtgctaggataagagtcatgagccatcaggcctggcccattgtggcatctttatggcatcttccaatgactgctactctgactaattcctatgtagtaggccatgattctcagtcatttgttgattaagaaagtgtataatttcagaagctactgtgagttcagaactgtctttaaaattaatttatattatcacagattattttttatatactggaaaagtggactaggacctagtttggctattgcatattaacgcatagggcaaaatatgtttggtgtatatggattttaagagttttgtagcaaattcaagccccccccgccccgcctgcctcacacacacagacacttccatacctcccctcagtagaaactactgtaattaggggatactggttttaaagcagagtccttgaagatagcagatattttgatatttgtcagatgaattttggttaatgtattaagaggcttttagtggagtccaacccaagatttctatatcaagatcaactgttgttgtttgataaaaggcagagttgttagattagatgtctcttaaaagaaaaaaaatcccctaatacagggaccaaagattcattttatatcccgtggtacccatacatttagacatgtagttaatagaaaattttttataagcaaggatgttaaataggaattttttaagtgtgtaatacttgacagtgctacattttgcaattaaattatttattcttttcacaggaagtattagggtacaaagtggactaccatgtatccctatatattgtggctgtactagagtatatctcagctgatattttaaaattggctggtaattatgtttttaatatccggcattatgaaatatctcagcaggacattaaagtgtcaatgtgtgcggataaggtaagtgttacaaggtatttaaatttaacttgaatagcaactatactaatttctgcctcaatctttttgtgtacattattagataagtaatctttataattgctagtactggaagagagaaaaatcctggctttacagagtaaccatgatatttccaggtttttaagcatatggcaggatggggatctctttttttggtcaagaatcttttacttacaagaaaaaaaacatccaaggcctcaaaacaatttaagtagtttcagttttatatttttagaaagagaatatatagagttctactcaggtacttttaagtgtaagtaattttgaagaccctactttggtttcacagcatagcttagtgaggcacaggggagagaaaattagactgcaatgttgaagttactcccctctgatcatttttttgtttttatatctgtcttctttcctggctgtaagctacttgtgggaagaaattgagtcttccatattcttctatattcctttacttaccttcttattcttcttcctgttatttgagacaaggtctcactttgtcacccaggctggagtgcagtggcacaatctcagctcactgcaaactttgcctccctggctcaagcgatcctcctatctcagcctctcgagtagctaggaccacaggcgtgcatcaccacgtccagctgtttttatattttttggagagatagggtttcaccatgttgcccaggctggtcttgaactcctgagctcaagtgcttgcctcagcctcccaaagtgttgggattataggcatgagccactgcacccactgaagctataacgctgaataacatagcaatctttgtgttagaaggtatttattttactgcaaaataaaaatattataaacagataattacagaacaatatgattaaaactatcatactagtaagtccaaggtacagtggagaaagtaatgaactttagcacgggtgaggccagaaggactacagagaaaatgcctaaatgaaactctctcagggtgaacaaccttcaggacctagcacatgctggtggttctcagccttgactgcacatcagaattaatagaaagctttttaaagaatgctgatgcctgcatatcacccccagagatttaattggcctggattggatctccaaacctcagtgttctttgaaagcattccaggtaattctgatgtgcagttataatgactgagaccgattgtacgatgccataatttcagaaatgacttttcacttacatcatggtagcaattccttgttatctctattttgacttacaaaattatggctacttttttttttttttactttgaaaatatcttagacttttagaaaagttggaagtacaacaaaaagtaagcccttgccacttgaaccatatgagagtaagttgccaatatagtatgtcctataaacaagaacattctgctacattaccacagtatgactgacagtcaaaatccaggaaatgaatacatttgatacattataccatctaactttcaaacatcattcaagttttgtcacatatcctaatgatctttttaccaaaatcattcattccagaatcatatattgtttatgtgtcatgtatttttatcgtcttcagtctggaataattcctcattcctcccttaacttcaaaaaaaaaaaaaaaaagatggcaaagcaggccaggtggtggatcacgcccgtaatcccagcactttgggaggctgaggcgggcaggtcacttaaggtcaggagttcaaaccagcctagtcaacatggcaaaaccccgtctctactaaaaatacaaaaaaagtagctgggcatggtggcatatgcctgtaatcctagctgcttgggaggctgaggcacgagaatcatttgaacccaggaggtagagtttgcactgagttgagattgcaccactgcactgcagcctgggtgacaaagcaagactgtttcaaaaaaaaaaaaaaaaaaaggtggaaaagctgactttattcaagagaggccatggcaataggcacagggaccactgcagtgtaatcctgtggttggggagagagatgttagaatcaactctcctcccttaacttctataacctggacgcttttgagagttacaggtcagttactgtgtagaatgtccctcaatttcggttttctctgttgttttctcttggttagaatcaggtaatggtctttagcaggaatatcatagaaattgtgctgtgttcttctcattgcattttctcagatggcacacaggcacatgatttcattgtgtctcattagtggtggtgatgttgacttcgatgacttgattaaggagttatctgccaggcttttcatctgtgaagttactgttttcccttttgtaattaataaatgaatattttgtggagtactttgaaactgtgtatcttattctttatcacactcaaatttaatatggactaatgaattgttattttattcaatgggtcataatctgttacttcattatttagatgttgtaggccaggcaccgtggctcatgcctgtaatcccagcactttgggaggctgagacaggtggatcgcttgagctcaggagttggagaccagcctgggcaacatgtctctacaaataaaaaaaattatccgggcgtgtgcttgtgactatagtcccagctatttgggaggctgaggtgggagaatcactggagctcgggaggttgaggctacatggaatcgagatcacgccactgcacaccagcctaggtgacagagtgagacactgtctcaaacaaaaaaaagttccggttgttccagatttggttattaggagccctagcttggtttttctgttcctgtcattatttgagcactttattttcttttccccttcctatttattaatttatttaattataaattgacaaattatagttgtatatatttatggagtacaaggtaatgttatgattacaaagaaaatgtggaataattaaatcaagctgattaacatttattacctcaaatacttattttttgtggtgagaacatttgaaatttactcttagctagtagaatgatggttacaaggctaggaaaggtagctggagtgggggaaatggggatggttaatgggtacaaaaatattgttagaatgaatgagatctagtatttgatagcacaacagggtgactacagtcaacgataatttgttgtatattttacaacaattaaaagagtttaattggattgtttgtaacacaaaaaaaggataaatgcttgaggtgatggagactccattttattctgatgtgtgcattatatgcctgcatttaccccatacatatatacacctactatgtacccacaaaaatttcttttaaaaattgaaatgacaaaaaaatttactctttttgcaattttgaaatgtaaatacattattatttactatattcaccatactgtgcaataaatcttacaaaaaagacccaattcctcctaattgaggttttgtcccccttcccttcagcctctggtaaccacattctactctgcctctatgagtttgttccagattccacatgtaagtgaaaacacatatgcattttctttgttgtttgttttttgtttttgttttatttcttttttgagacggagtctcactctgtcgcccaggttggagtgcagtggtgtgatctcggctcactgcaacctccgcctcccaggttcaagcaattctcctgcctcagcctcccaggtagctggaactacaagtgcccaccaccatgcctggctgatttttgtgtttttagtagacggggtttcactatgttggccaggctggtctcgaactcctgaccttgtgatctgcctgcctcggccttccaaagtgctgggattacaggcttgagccaccacacccagcttctttgtttttgagagcttgagtctccctctgtcacccaggctcactgcagcttcaaacccctgggctcaggcaatcctcctgcctcagcctcacaagtagctagagctataggtgcctgccaccatgcccagctaatttctaaattcttgtaggaatggggtcttgctatgttgcccaggctggtctggaattcctggcttctagtgattttcttgcctcaacctcccaagatgctgggattacaggtgttggccactgcaccaggccataaactatttttttttaataagtcattcctttatttgaagcatttttccatgtcctaaatcttcaccttttgagagtttaaaaaaatcttcatgtggcaggattttcagatccccttgttatattgcttttagactgatttctaaaactgtgaagacaatagtccagatttggtctgaccaacagagtatattgaaatgcatgtacgtatccttcattctatatgctattctttaataatttcagcattaatattttggcaccacgttactctgtgtacttgttgagtctgcagatttctaaactcccgaggactgttccacatgaagtaccattatgttaggtctttgatttctccaacttgtgcttgttgattttttgttattgttgtaagaatgaacgtgaatttatccctagaaaacttcatactgttattgaggctatgttccagcatatgtagatattttaaaaattgaattctgtcattcagcattttagatactctacccaggtttttgtaaagtgtacaagtctgataaaccttgaattaaaattatttagtaaaaatgttgaaaaggccaggtgcctttgaatctgagaggcggaggttgcagtgagccgagatcacgccactgcactccggcctgggtgacagagcgagactccatattattttatttaatttatttattttttattgttgagacagagtcttgctctgtcacccagtatggagcgcagtggcgtgatcttggctcactgcaacctctgcctcccagtttcaagcaattctcctgcctcagcctctcaagtagctgggataacaggtgcctgccaccatgcctggctaatatttttgtatttttagtggagatgggattttaccatgttggacaggtgggtctcaaactcctgacctcaggtgatctatccacctcagcctcccaaaatgctgggattacaggtgtaagcccctgcgcccagccaatactccatcttaaaaaaaaaaaaaaaaaaaaaaattgaaagggattatataagaaatgagatttctagcatatgttattagtggcattcttctaggttaaaagttaccacttttcttcattcctgccttttagttagctattatttcacattttatttaattcatgggtcaacaaactttacctataaagggccaggggataaatattttaggctttgtgggccatacgtctttcttgcatctactcttctctgctcttgtagcatgaaagcagccataaatgaatgagcatgggctatgttccagcaaaactttatttacaaaaacaggctgcaggctggatttggcctgtagtttgctggtccttgtttcagacattcctgtcatgatcccctatttgtcacaagagactgtcatatgcttagctaaaatccagatgacttggccgggcatggtggctcacacctgtaatcctagcactttgggaggccaagacgggcagattgtctgagctcaggagtttgagaccagcctgggcaacatggtgaaaccccatctctactaaaatacaaaaaatcgtccagacgtggtggcgattgcctataatcccagctactcaggaggctgaggcacaagaattgcttgaacctgggaggcggaggttgcagtgagccgagtaccacttaactccagcctgggcaacaaagtgaaactatgtctcaaaaaaaaaaaaaatcccgatgacttgatatgtgggtctagttatgtaaccctaagtaatgagattgtatgatgtggtatgatcttagtatatccaaactgatatctagagatcactagttcaagagctcacagaccatttgtttaataaattatttgaatatatggtttctagggatatctttaatttgccagacagagaacttgagaatcaaccctatttctttacagttaaaaataaaaataacatgtggctatatgaggtatgctagcatatcaaagattgctgagaattagatgatcataggaaagaaccatagaatttaacttctagtatataagttactattaatgaaaatagtatttaaaactggaaaaactgaacataaatgcttaagaaggaaattgatgtttaggaaaggtaaaggccaggcacagtggttcacgcttgtaatcccagcacttttggaggttgaggcaggaggatagatggagcccaggagtttgagaccagcctgggtagcatagcaagacatcatctctacaaaaaatttaaaaaaagaaacaaagaaagaaaggtgagataccctggggaatatagcaagacctcatctctactaaaaataaaaaaaatattagctgggtgtggtggtgcatcccagctacttggaaggctgaggtgggaggattgtttgagcctaggacattgaggctatagtgagctattattgtgccattgggcaacagtggacaaaaaaaaccaaaaaaaaggtgagagaataagagggcacaaagctgctctgaggaagcttagttcaccagatctagatatactagcagttgagttctgtattttctttcttttgtttttaacctattgaattatacttttttttttccttctgagacagactctcactctctcaaccaggctggagtataatggcgtgatcttggctcactgcaacctctgcctcctgggttcaatccattctcctgcctcagccttctgagtagctgggattacaggcacttgccaccacgcctggctaatttttgtatttttagtaaagacagggttttgccgtgttggccaggctggtctcgaactcctgacctcaagtgatctgcctgccttggcctcccaaagtgctaggattacaggcatgagctactgcgcctggcctttgtttttgtttttgtttttttttaaagacaaggtcttgctctttcgcccaggctggagtgtagtggcgcaatctctgcccagtgcaacctctgcctcccgtgttcaagcgattctcccacatcagcctcctgagtagctgggattacaggtgcgtgctaccatgcctggctaattttttgtacttttagtagagacagggtttcgccatgttgggcaggctggtcttgaactcctgacctcaggtgatccatccaccttggcctctaaagttctgggattataggcgtgagccacccatgcctggccagaaaaatctgaagctaacaggagtggggtatgaatatattttctctttcatggtagtattactccatctgtttcaagagctagcttgctcgctcctttttttttttttttttttttttttttttttttgtgacaaggactcacctaagccggagtacggtggtgtgaacacggctcactgcagcctcaacctccagagctcaagtgatcctcatgccttagcttcctttgtagctgggaccacaggcttgaaccaccatgcctggctgtgtttaaaatttttttgtagaaactgggtctctctttgttgcccaggctggtcttgaactcctgggctcaagcaatcctcccagtttcagactggtgaccttctagtgaatagggtctctaggtttgttttttaaatttttgaattatttgccatccatttatatttacagatctaaaaattttacataaaaatgtaaatcccagacttttcatgaaaaaagaaaatcagaatgcctaacagaaaacagctggcactgagcagcacacttcctctttaggtgcatgtaccttccggtttaccataatccccactgtttcttatatattataatgttacttgcctgacccctgtagcatttaaattcaggaactttggtattatgtgaccaaaagagttttaagaatggaactctggagtgggtggtagagaaggtaagtcatagaggaggccccactgacagaatggtgtatcagaagccaagaagagaaaaattgtttggggctggggggtttatatgtgttttttcttatttagagataggatctcattctgtcactcaggctagaatgtggtggtacaatattagctcactgcagcttcgaattcctgggctcaagtgattctcccacctcagccttcagagtagttaggaccgcaggtgtctaccagcatacctggttattatttttttttacttttggtagagatagaatcttgctatattgcccaggctggtcttgaatgcctggcctcaagtgatcctcctgcctcggcctcccaaagtgctgagattgtaagcatgagccaccatgcctcgccctgagagttttaagagttttaagaatgagagaatggtcagctgtgtcaaaaactagagaaaacaagtaggaagactaaaacacaccattagatttgacactagatcaatagtgagagcagttttaatatagtaatgggcttgctaagtgaatgggagcaagaagttacagctagcaagtatgacctactctaaaagggtctctggtggggaagagaagagggtggtagctcttctgtgtgtttttatgtcttatgtcttcctttattttgcatgtctgtttgaaatcagagttcatcaccaaattccctgtgtagccttactggtttctttaaatttaaagtggctgggaagtggggatgatggtctccaatgacaagaaggtggattgcatggagtaagcagtggggaagggagggatttgagagtgtcacagaacatgagattaggaaggtgggttggagttaaattatgaatggcctttatcctaaagaagttaggattttatgcagaaggcaatgaaatccagtatcatttttatgtatcatttatttttagtaacatgattttagaactggggttgggaagacctgtggcaggcagatcaaattatgaaacttgtgtatctttttaagagatggtgattgtttagtggagtaatctaaagcctgcggtaagatggagagagctgaccagatttaaaagatgcttataagatatttctgagttagattcaaaaagattaggaaggcagagttcatgtttactttattagcatattttaccaacatgtggtacagtttatggtgatcagtagatgtttttcagaatgaatgaatgaatatctgttattgtgttgtcagaatttcctctcatccctttgaagtttttactttttgtagtttccttttcagggtatacctttatgctgaactctctgggtacgtttcggtcagtcttaaatatataattaactaggtccaatcatttttttttaaaaaaagtattattaattataaaatgtatggtcacagccaggcgcagtggctcacacctgtaatcccagcactttgggaggctgaggcaggtggatcacttgaagtcagaagctcgagaccagcctgaataacatggtgaaaccccgtctctattaaaaatacaaaaaaaaattagccaggcatggtggcgtgcacctgtaatcccagctactcaggaggctgaggcaggagaatcacttgaacttgggaggcggaggttgcagtgagctgagatcatgccactgtactccagcctgggtgagagagcaagactctgtctcacaaaaaaaaaaaaaaataaaaaataaagtatagtcaactttctttttcactttgatttatagctagttcttgcctgttggttgacctaagtccatggtagcatttctgaaagaagaagtggttgctacaacaatttaagcatctgtgagatgtttgggtttagcaaatgaacgtaatagcagtggtcattgtagtaaatgtgcatcagaaatgcatcgcactgatctatcgtgtgcctctaccatagtagcatttcacttttctccttttaaccctactcaaatatgtactgtcatccttataatatggcaaggaactaccatgttgaatacctactatttgctagatgtagtagtatgcattttatatacattaccacattgaattcttcttatcagctacattttactcataaggaatgtgactttcaaaagaataaatgtgttcataatcatagtcgagtagtggctgaactgggatttttggctcgggttattgttccccaaagacaggcttgctttttttttttttttttgctattatgtgtgtgtgtgtgtgtgtattacagtatacatatatacatatacatatgtattagtacatatttcaccattagttcatatctccagaaatatttattttgccatactcgattttatttgaatatttcccaccttcaacaactttttttccttttattctaggttttatcatataaatttacttataatacacacaactcattgtgtaatatttgtgtgtgcgtgtgtgtgtgtgtgtgtgtgtgtgtgtgtgtgtgtgtgtgatggagtctcgctctgtcgcccaggctggagtgcagtggtgtgatcatgactcaactgcagccttgacctcccaggctcaagcaattctcctgcctcagcctcccaaatagctgggattacaagcgcctaccatgacgcctggctaattttttgtatttttggtcgagacagggtttcaccatgttggccaggctggccttgaactcctgacctcaagtgatcctcctgccttggcctcccaaagtgctgggattacaacacccagccctgtttaataacgtatagatttcaagtactttgaggcagtttttataaaagtaaagaaaataaatttatacattattgatttctgtttctcaggttttgatggacatgtttgatcaggatgacataggtttggtttctctctgtgaagatgaacctagttcttctggtgaattaaactactatgatcttgtcagaactgaaatcgcagaagaaagacagtatctacgggaattaaatatgatcataaaagtgtttcgagaagcctttctttctgatagaaagctgtttaaaccttctgtaagtacctttttgggtttgaaattctgtgtaccccaaaaaaccagaccagcttaaaatcatagtcacttttttttatttttttgagacggagtcttgctctgttgcccaggctggagtgcagtggcgtgatctcagctcgcaccactgcagcctccacctcccgggttcaagcaattcctgcctcagcctcctgagtagctgggattagaggcatgcaccaccacaatcggctaatttttttatatttttagtagagatagggtttcttcatattggccaggctggtttcaaactgccgacctcaagtgatccacctgccttggcctcgcaaagtgctgggattatacgcatgatccactgcacccagcccataaatagtaactttaaatactttatgagtacattaaaaatactttcatgtatttgtgggctttataaacatgtgaattgttatataataggtacagtgacaatgaaaattaggcacaaaattagaaggaggtttatactggggtgaaatcattttccgttatgcagttctgatatttagagtcattcatttggaggtggtgaaaaagatgtatggtctaggaaaggaagacctctgcatttttctgtcttttggtaagtaccttaaggcagtagtttaaagttttagtttgaagctcagaataccatggggttaaaaaaaataaagttttaacggtggaacttttaaaaataaaagtttatgcagaatgccatgtttaacaaacaaaaaagttttttttctttcttttatcacatgatttatttttccatgtctatgtgtttggcccacactttaaaaataattagtcttgaccgggtgcagtggctcacgcctataatcccagcactttgggaggccaaggcaggcagatcacgtggtcaggagatcgagaccatcctggctaacacggtgaaaccccgtctccactaaaaaatacaaaaaagttagccgggcgtagtggtgggcgcctgtagtcccagctactccggaggctgaggcaggagaatggcgtgaacctgggaggcagagcttgcagtgagccgagatcacgccactgcactccagcctgggcgacagagcgagacttcttctcaaaaaaaaaaaaaaaaaaaagtaacaataataataataataataattagtcttggccaggtgcagtggctcatgcctgtaatctcagctgttttgggaacctgagacaggaggattgcttgaggccaagaatttgagaccagcctgggtaacagagcaagacccagtctctacaaaaaaatttaaaatttagctgggcatgatggcacatgcctgtaatcccagctgctggggaggctgaagtgagagatttgcttgagccaggaatttgagactatagtgagccatgatcgtgccactgcactccagcctgggcaaaagagcaagacctcggctcaaaaaaaagatacttagcctttgtcttatttatcttgtacctcctaacttcctccacaaaataactacattgtgagtaaataagagtgacactcagacacaggtggttgagtatttaaagttaggaacagatttagcttttctcattatattccaaaagaatgagttttaaatgataatcgaaagtgttttagttggcaattactttttttcttttggatatatgtttagtttaacaatgtttataataactcctactgggaatactatcataagtagtcagaactttatgtttttcaaagtactgttctattttatttgacccttataacaatcctgagggatagaatgggcaaatattgtcatctctactttacttgtaaggagattgactttttttttttttttttaaatatagatgggggtcttgctatgttgttcaggttggtcttgaactcctgggcttaagcagtcttccttctcagccccccaaagtgctaagattacaggcttgagccactgtgcctagctggaaattaacatcttaatcaagttagttatagagcttaatcttgaatgtggcttcttttctaccacgttataattggattttgtctctagtggtatgaagaataaaaacctaataaatgctggcagctaatattatctttgtctttttgtgtcccatcagttttcattcctcaggaattaatttttatgggtctcttttcactggattagtgctgatatgacagaaaatgtctattttaatactaaagggtcagatggaagagtgaatcccttttttatctatctctgtatctactataattttttttagcattaagtaaaatataaacttttgagggaaagactatctaaaatcagagcatagtactctgcaaatattaaagaagtgaatgacttaaaaatgatcttaagttactccttttgcccctcatcctatgttttcaaaaagctcgcatttctggaaggcctaatatgtgccaggagcattttacagaaatcatctaatttaaccctaagaccctgatgagctgggtattagcagaccaaatgtgtgataacgggcaaattacttaactgctctatgcctctgtttcctcatttgtaaaatgaggatgatgatagtacctatctaataaggatattaggttattacatttcaagtgcttagaagagtgcctagaatataatgtgcccaatacatgttagttgttattattgtccttttcattcctaagccagggtcattcatctggcatgttgtaaaagggaaaaacagtttttcctctctaatctttttttttttttttttgagacagagtcttgctctgtcatccaggctggagtgtaatggtgcagtcctggctcactgcaacctctacctcccgggttcaagcgattctcctgcctcagcctcccgagtagctaggattagagatgtgcaccaccatgcctggctaatttttgtacttttggtagaaacggggtttcgccatgttggccaggctggtctcgaaatcctgacgttaggtgatccacccaccttgacttcccaaagttctgggattataggcatgagccaccgcgcctgacccctctctaatcttcacactcaacacagaacatttctgtgacaacgtatgtgaggattttttccccatacaccaaagtaattctcctgtgtacaccaactaggtgtcctataatttagctcaattttgacattatttacctctaaatagtgtcagatctcacagattaaggactcagtcccaacacgactgtctcacacttcaggcgccaattgaaagtcccaggttgtgaactgtgctccgaactgatcagttataaattggagttcccatgaccccctccttgggttccattaatttggtcgaacagctcacagaaatcagggaaacacgtttaccagtttattatgaaggactttaaaatgatacagatgaagagatggacagggcaaagtataggggcacagagtttccaagccctctctgggcaagccaccctcctagcacctccacaaggtctgcaaccaggaagctcatcaagagtttttatggagcttgatctctagcctctcacccctgccctttttttttttttttttttttttttgggagacagggtctggctctgttgcccaggcttaagtgcagtggcaccatcttggctcaccataacctctgcttcctgggctcaagcagatcctccagcttcagcctcctgagtagctgggactacaggcacacaccaccccacccgactaattttgcattttttgtagagatggggttttgccatgtttcccaggctctttccccaattttttagaggtcagtgggtggggctgaaagttgcaaccctctgatcctttttctttttctcatgagtcagtttggtttcaagtaacccttcaatcctctaatcatctggtctttttggtgactggccctatcatgaggttatctaggggccctactgtaagtaacctcattagcataaactcagtatttatcaaaggtactcattatgaataacaaaagacattattatcactcaggatattcttagcgttttaggggctctaagacaggaaccagggacaaagaccaaaaatatgtttcatattataccacatgtggtggagccaggatccaagctcaggtctgtcaggttccaaagcccgtgatgtttccattataagatgccagagtgaataatagttggccataaccgggatggtcagtcatatgatgtgtttgtgttcagagggcttgaacctgtcttatcctagatatatggctatctgccacatatgatgttttagtcagtgataagactataaatacccatatatatgacagtaatcctgtaagattatactatatttttactgtaccttttctctatatagatatgtttagatacacaaatacttaacattgtgttacagttacctacagtattccatacagtaacatgctgtacaggtttgtagcccaggagcaacaggctatacctatatggcctaaatgttgtagtatatcatctagccgtgatatttgcacaatgacaaaatcgcctaacagcgcatttctcagaacatacccgtctttaagcagtgaatggctgtaattcacagacgggagcttggatgaaatctgtaattccttctcagatccaggagatgggccctaaattgtgaaaccagattgtaacaggattaggagttatcttcattctcatcccagctcttaccattaatctataagactatatagcctaagctataagtaaaacctagggctctgtaagaccttgatcaagtcttttagcatctcagccagttttaaaacactcaaatgccagaattctttatgtaaaaagtagcttagaatcatccacagtaggaggttttagatttaacaaaactatctagaatctatattttgtagtatttttattgtctgttatccaagagatttttaaaattctcttcctgttcatgattgatttttactgtcttggaatatattaatttgagattcaatgaagatatacccttaactcttatattgtttctttttttttttgtacaagcaagtctctttatttccaaagtacgttgacctctccaacccaagttaaaagaatacacagtatgattccatcttttaatatattaacatcaagatgtacatgtttgaaaatggttggaattttatactggaataatgcatactaaactattaatagtttctacctctgagggtcatgggtgtaaggggggcatgaaagtaaacattcatattttactctctctgtcttgtgtttgaatcttttataatgggagtgcattcacatgtaataacttttatttttacaaagaatgagttttcccaagagcaaaatgcaaaaattctgctatagcttgttgacatttaatggaaatatattgctttatataatatatgaattgttcagaagtgataatagctttaatcatgctcccaataaaagatatgctagttaaagaaattctatagtttattccataaatttaaaaacatgtagaaaacgagtaccacccataaattaaatgatgtatttggtgcagggcaggtaagccccaaagttggggcttagctcgggacagttcttggctttgtctaagaaagaagtcaaaggcatgacaatggtaggaacctctgctgaagcggcagcgtacagcagcagcaaaagtactgtttcttgtggagcagggctattccataggcagtctgcctcgagtagcctatattgctctttatatttagtaattttttagcagaattctcaatctcacatttcttaaccttccttctcttttttcaggatatcgaaaagatttttagtaacatttcagatatacatgaattgactgtgaaacttttaggtttgattgaagacacagttgaaatgactgatgaaagcagtcctcatcccttagctggcagctgttttgaagatttggcagaagtaagtttacaaaactacttatattctcattaaagccctaaatgctgtagtaagaaacttagagatgagtcttggcaacatagtgagaccccgtttccataaaaaagtaaaataattatccaggcatggtagtgcccatctgtggtcccagtgactcaggaggctgaggtaggaagcctgggagatcaagcccatgattgtgtcactgcactccatcctgggcgacagagtgagaccctgtctccaaaaaacaaaatttttttgtaagatattctttatgaaaattagaagataccactggccattataaaaagatatttaagatttaactgataacaaactaaaatcacattgcctatatagtgacactttctttatagtgtgtttatggcaatatttatagtgaaagtttatatactagagtagtatataaactagagtagtaacatttaggtttttttttttttttagtggtaagtatattcaagatgaaggaagatacattttattgaccatagctctttaccttctatggattttaaacttaaagttggaaagaagctttatattattttaatgttttccaaagtaaaaatcattttatcttttaaatgactataaaaataatgtagctcattgtaaaaatattcagaaaaatagatatataaattagatgaaagtcactttattttataacacccagagataacttatccttatatatttctgtgcatacatacgaatgtatgtgtgtttgcaaaaataggatcccactattttataacttactgtttttactctgtatatcataaacattgtccatgttaatgtatatacttcaacacaatttttaagtataaataatgtgatgttatatggagacaccataacatattttaactatctattatccataggttgtagagttttttcctttttttttttgttattgtaaacaacactgcaacaaacatatttgcactatgccttgatattctaatcattttttttttttgacatggagtctccctctgtcacccattctagagtgcaatggcacgatctcgtcttactgcaacctctgcctctcaggttcaagccattctcctgcctcagcctcctgagtagctgggattacaggcgcctgccaccacgcccagctaattttttgtatttttagtagagacggtgttcctctctgttggctaggctggcctcgaactcctgacctcatgatccgtccgcctcggcctcccaaagtgctgggattataggcatgagccaccgcgcccagtcatatattctaatcatttttaaggatatattcctggaagtggaattgtagtgctaaagactagatacatttttagaacttggaaacactttgccacgttcacttccagctaagttccagtgtatgtaagcttccttctttcttcaccctttcccttcactaactcggtattaccttattctttttctttttaattctttttttcaaaatttgttttgttttcatatcggttctgcagatatcccattaatttttgccagtctaatgggaaaagaaatctttcttcttctcttctcttttttcttttcatttctttcttttcttttgagacagggtttcactctgttgctcgagctggaatatagtggcacaatcatagctcactgtaacctcgaactcctgggatcaagtgataataatctgtaccatattggtagaaaatatattcttttaaacctaatgctttttctctttttaaaaaaataggagcaagcatttgatccttatgaaacattatcacaggacattctttcaccagagtttcatgaacatttcaataaattgatggccagacctgcagttgctctacactttcaggtaaacttaaattgaaggttttttttttttttttttttataaagcaaataaatatctcactattttatccttcaaatatttgtaattctggaatcctcgtaatccttcaaatcttgttcattctaaacctgttttggattatcttctgttttctctctggagttctgtctgttcttattgtagaaatcttttatagtacaacatcatgagtactgaatgaccagaagaatttggcacatactagatctggggtataaagatgaatttggctgggtgcagtgactcatgcctagaatcccagcattttgggaggccaagacaggtggatcacttgaggtcaggagtttgagaccagcctggccaacatggtgaaaccctgtctcgactaaaattgcacaagttagctgggcgtggtggtgagctcctgtaatcccagctactcaggaggctaaggcaggagaatcacttgacccggaaggcggaggttgcagtgagccgagatcgcgccactgcactccagcttgggtggaatagtgagactctgtctcaaaaaaaaaatagaaaaataaataaaaaataaagatgaatctggagtgtgatttcaggattatgttccctataggaggaagatttggagaaatcttaaaaagttgagataacctcaacctcctatgtactcatactgatttttctatgaggcctacaatttaaaggagataaatactgtattgagggagagtatgcaagttagttggttcaggaatacacttagataaaatgaaaataagtggagagatacaaataaaattttatttttactatctcaacactaacaacaaaagttatgttggcataggtaatacttggctaaatatgtaaaacttctacatctaaactgacttttccagccagacgtggtggctcttgcctataatcccagcactttgggaggctaaggtcagaggattgcttggacccaggtgtttgagaccagcctgggcaaaatagggagacctcatctctacaaaatataaaaacttagccgagtgtggtggcgtgcacctgtggcatgccaggagaattgcttgagcctgggaggtcaaggctgcaatgagtcatgatcacgccactgcactccagccttgggtacagagtgagacccagtctcaaaaaaaataaaaataaaaaataaactggcttttaccccttgacgtttgaatatggtaaaaatccttatagtcctgaaacaaacaagcaaacaaatgaacaaacctttcttcactctagtagaataattaactagagtgaagaaagttttttcatttcctctctcattttttctttgcagccaattgtctttatattattttttaccattctttatgaaaacactaccatgtatgttttaatcaggatataaattgcctttgacaagtaacttaattgccaaatccagtggatatttttatttcatacttaatgtctgtagtatttgttactgctcttatctcttggttcctgtatacctgaaggctgggcgtgatgtctcatgcctgtaatcccagcactttgggaggctgaggtgggtggatcggatcacctgaggtcaggagttccagaccagccttgccagcctggcgaaaccctgtctctactaaaaaatgcaaaaattagctgggtgtggtggcatgcacctgtaatcccagctactcgggaggctgaggcaggagaattgcttgaacccgggaggcggaggttgcagtgagccgagatcgtgccactacactccagcctaggtgacagagcaagaccctgtctccaaaaaatatatatatatatatgtgtgtgtatatgtgtgtatatatatatatatatatatatatatatatatatatatatgcacacacacacacacacacacactagcgggcatggtggtgcacacctgtagttctagctactacagaggcagaggcaggaggatcacttggaggcaggaggatcacttgaacccaggaggtgggggttgcagtgagccgagattgcaacactgcactcaagcctgggctacagagtgagactctgtctcaacaaaaaaaagaaaaagaagactgagactgggtgatttataaagaaaagagatttaattggctcagagttccacaggctctacaggaagcacggctggggaggcctcaggaaacttacgatcatggcggaagccaaaagggaagcaggcacgtcttcacatggtcaaagcaagaggaaggagcagggaggtgccacacacttttaaacaactagatctcctgagaactctattacaagaacagcattaaaggaagaaatccacccccatgatccagttacctcccactaggccccacctccaaaattggggattacagttgaacatgagatttggacggggacacaaaatcaaaccatatcagctcctgtgatactacatgttcccaattttcgtcttctctgatttcttcttctcagtctcttaattattatagctattatccaacttctgttatcagcccctgtttttctgttctgtgctctccttgggtgacttcatgtctatatactggtgacttcttatttgtatttccaggccatcactttcttttaagcactgtgtaccgtgtacatatgtgtatgtatctatacactttcatataaccagctgccttgaattgatgcacttggataccctaaacgcacttcaaatatgacatgtttaaaactgaacttaccatcttctccctgccttctgtactataaattcccattgtttattatcttccacttctctattgtcaaaaatttgttatcatggaatacaaattatacttaattctcaaaattacttcaagagaggaatatttttaaagttaactcatatattcatataaagtatgcattaaatacacagtctataagaactttggatactcattaaaagcactcaacacatttcttgtttcagtcctattttattaggaatttttgctgtggaatttgaatgttaaagggcccagttattaataaagctgtcatcctagatattcagtgaaattggaagagttagatgaaatcctttttcgggccaaactcaattgttttaacttaaaaaaaaattcattcagtttaagataaaataatgcttccttaataaaactaaaaacaaaaagcatctttagaagctgtgtagcgtactttatttatttatttatttagagacagggtctcactctgttgcccaggctggagtacagtggcacagtctcagttcattgcaacctccgcctcccgggttaaagcgattctcctgccttagcctcatgagtgactgagactacaagtgtggaccaccacgcctggctaattttggtatttttttggtagagacagagtttcaccatattggctaggctgttctgttgaccatgaggcaccatacctggactgtgtagcagacttaaaaaaataagatttgaagttagaacttaaggctttgggccaattaatagttttgtttgtttgtttgcggcagaatctcgctctttcacccaggctggagtgcagtggcgcgatcttggctcactgcaacctctgcctcttgggtttaaggagtcctcctgcctcagcctcctaagtagctgggactacaggcgcatgccaccacacctggctaatttttgtatttttagtagagatggggtttccccatgttggccaggctgttctcaaactcttgacttcaggtaatcctcctgactcagcctcccaaagtgctgggattacaggcgtgagccatcacgcccagccccagttaatggttgtgttaccttgagcaattcacttaatctctgagactcagtttgctcatttgtaaaatggtgatcatcataatatatacctcttatagttattaggaaattaaatggtaatgtatatataaagcataagcataatgtttgatgtgtattaaatactcaaatgtagctcctgttattatcagaggactccttacactgtaaatacatgctacaaaaattttagaatgcactttatcaggcattttagtacaaataagcaaaacagttgatcttgtagactaattttgaagtttcatattggttccagttcaagcactgtatataaaatatccagaataattcactatattaattagtttaatactgtcttagtctattcaggctgctctaataaaatatcataaactggatggcttataaacaatagaaatttatttctcacagttcacatttaggaagtcccatatcaagaggctaacagatttggtgtctagtttggtgccctagtgagggtttgctcttctggttcatagatggtgctttcttgttgtgtcctcacatgatggatagcacaaacaagctcccttaggccccttttataagggcactaaccccgttcacaggggctctgccctcatatccaatcacctcctaaaggccccatctcttaatactgttgcattggggattaggtttcaatatatgacttttgagggaacacaaacattcagatcataacaaatgtgaaaatgaattaatctttaggaaaattggtggcactttttgtgtatcctagtaagaagtttggttactgggtaataagtctgttgaaaagattataatttaacaaaatgtgaaaattatggtaatatttatgaagatttttttaaagcagcatatcagattctttctcacattttatattggtgtggttggtgtttttcttatggggagaaatactagtaagtgaactatatagacatttaaaattaacatgagttaaatccattataaattttagaaaaccatttattctacagtagtttccaaaactggggtatacctatcccaagctatacactaagatttttcaggatatataaaggcacagagagctttaagggaatctgtttctagtcttcggagatcttgtttatgttttttgcattgtcttttccaaagtctcttacttgttaccttttgctgttatgtatttcccattatgcattgatccaagatgtaaaaacctctagggcaccaaacaggaaaaaaaaaaaaaaaaaaaaaagtattactcctattggagagttcactgagtaccaagcaaaagagttcacaaaagaatgttatagggggatgatagtaaaaattcttggtagccaaaatgtcatctatctatgttatgtcatatctatctgtctaagaattaagaagtgatatggttatcacaaagatttatgttaaccttattgtaagtacttcatcatcatttgggataaagaagaggagaagcttgtaaagttctcataccttgatgtaatatgtcagaagcagttgtagtttcctccagaggcttctaatccttgagaccatgacattaataatgtttgtttgaatttaacaataaagtttgacttctgacaaactgagtctgatgttgctgtttattttgacagtgaagatcgactttgtcaattaagttgtatgacagacgtttttcataaatgagctaaatctgaaagttattcaattattgtttggtgaaatagttataaatcacatttacagtatacagcattccctgaaatgcatcttttgtaactatttaaatttaaaacattttaaaattgtgcaggagagtacatagcttttcagaattcctttagggtatatggaagccagaacataagctgtagaggattattgtgaaagctattttagccacataaaagaaaattaatgtatatatttctctaataacttaaaggaggaaagggagaaaagaacaacttgatagcacttcagtttcaatatagaatatgcattctgttgtagttttgataagtctgtatctcaaatttttagtagccgtttctgttaggcactgctgttgcatatccttgatgtcagagacatacatactgtgatatctttttgctttgcagtccattgctgatggttttaaagaggcagttcgttatgtccttccacgtcttatgctggtgccagtgtatcactgttggcactactttgagttactaaaggtaaggttttataacagaatctcaaagtacttatctaatagaagagtttactttttaaaattaattttggagacacacagtaccagtcttttaattcttattttatgtaagtaataatttttatatgtaacattgctctaaatttctatcttgttatcttataaaggaaataacttttgaagttaatatttttttctgtgcagtgttgtattcttcctctcttagctgggacccaagcaacacattaaaaatatataacttaaaaaaaatgactctcttctctattttaattaactagccaaccactagtcctggtcacattggctaagagggtttggaggctagtgattaattggtggcaaaagtagctgtggcttaggatgagtcaggccattatagtcaatgacctgatcttaaatgcagacctagtagcaaggatttttaaaaagcaatcatctaggtaggggaaaaatttttttaaattatatggtcaaaccagcatttttaaatgttggccagtattagagggcaactctaagactaatgataggacctctaataagacatgaaccttatttttaaaaattaaggcatccaaatatatgcttatatattattcatatgaagcctgcatatcttttgatgagttctttatggatccactagtatccatggagacttacacaatgaagttgctcatctatttgtggataaaagctgactactgccgggcgcggtggttcacgcctgtaatcccagcactttgggaggccgaggcgggtggatcatgaggtcaggagattgagaccatcctggctaacatggtgaaaccccgtctctactaaatgtacaaaaaattagccgggcatgatggcaggcgcctgtagtcccagctacttgggaggctgaggcaggagaatggtgtgaacccgggagacggagcttgcagtgagcagagattgtgccactgcactccagcctgggcgacagggcgagactccgtctcaaaaaaataaaaaaaaaagctggctacctccagtatcaaatgctgtgggtagtagcactccataaaaaagaacgtaaaaaagagataagtattcattagaaataatcatatatattccttgcctagatgcctacaaggtatacatagaattattatggcttttattttaatgttactaccatggattagacggaaaaagtcgtaactgtctatctaaaccaacgatgtggtatcctaaaggagaggtacgaaataatcaagcagaaagatactttgcttctaaagagcagttaaaaagttggaagctgggcatggtggccacaagcctatagtcccacctacttgggaggctgagataggaggatcacatgaggtcaggagttcaaggccagcctgagcaacatagcaagaccctgttaaagaaaaaaaaattgagaaagaacattttactgagcaagatatgtgggaattacagttgaaaatgggccataatctgaaagtagacagaagttcttagatgttagctagagtcagtgaaaatcagtagcagtaatagagagaaatgaatggattgtcaccagaaaatctccatctttcacgtgctcactttggtaatcactcctacctttaaaagatcaagggaaattgtgtaaggaattagaaatgggaaaagaaacactcactgatgagtactcatgcttgtccaaaggcagcagatactctttattactaggtagtagtaattttgggcttcaaagaatgaataaagagagccaggtgcggtggctcatgcctgtaatcccagcactttaggagtccaagggggagggaatgacttgaggctaggagtttgagaccagtctggccaacatggcaaaatcatgtttttagtctctactaaaaatacaaaaattagctaggggtggtggcacatacctgtaatcccagctactcaggaggctgaggcaggagacagcttggacaacagagcgagactccatctcaaaaaaaaaaaaaaaaaaaaaaaaaaaggagtgaataaagagaaactacccatgtctgatcaatgaaactgtaaccgttagaataaatatggaatatactcagttttaattaatgcacagcaacaacaagaacaaatagaaatgtggaatggaaagacaagccttagaagagattagaaatggcaaaagatttgaatcacttcacaaaacaggatatccaaaatggcagtaaatgtgtattcaaaccattaatagtcaaggaaatgcagttaaaaccacaggataccactacatacacatcagattacagaaatttgaaagtctgaaaatatccataaacagcagcatgaactatttgcattctgttaggaatgtaaactgtataacccactttggaaaactgcttggcattaccttttaaattaaaaaatatgtatactgtctgactaggcaattccacccttgaatatatactctaaagaaacaaaatgcaggcacatgtatgccaagagaaatgtacaagaaagtctgtagcaggtgtcagtaatagcaaatcctgtttgccaaccagaaaagggtaaataaattgtggttcattcagataatgaaagaaacttacactagaacaatacacaacatcaatgacgcttacaaataaactttgagagatgataatatttcattggtgtgttataccatattttatttatccattcatctgttgatagaccgttgaattttttttttttttttttttgagatggaattttgctctgtcgcctggctggagtgcggtggcatgatctcggctcactgccacctctgccccctgggttcaagcagttctcctgcctcagcctcctgagtagctgggactacaggtgcatgtcaccatgcccagctaatttttgtatttttagtatagacagggtttcaccatgttggccaggatggactcaatctcttgacctcatgatctgtccatcttggcctcccgagatgctgggattacaggggtgagccaccgcgcctggctgactgttggatttttttctaccttttggttactataaataatgcttctgtgaatgtgagtgtacaaatatgtctttgagaccttgctttgaattattttatgtatatacccaggagtggaatggatggatcgtatggtaatgttatctttaattttttgagtaactaccacactgtttttcatagtaatggcaccattgtacattcctaccaacagtgcacagggttctgatttctccacatctttaccaaaccgtgttaatttctttttctttttcttttttttttttgagatggagtttcactcttgttgccctggctggagtgcaatggcatgatcttggctcactgcaacctccgcctcccaggttcaagcgattctcctgcctcagcttcccgagtagctgggattacaggcgcctgtcaccacacccagctaattttttgtatttttagtagagacagggtttcactatgttggccaggctggtctcgaattcctgacctcaggcgatccacctgcctcatcctcccaaagtgctgggattataggcgtgagccaccctgcctggcctgtttttttttttttttttaataatagtcatcctaatggatacgaggtggtatctcattgtggttttgattttaattttcctaatgactagtaatgttgagtatcttttatatacttgttaactatttgtatatcatctattttattgtgttgtttttgggacagggtcttgctctgttacccaggctggaatgcagtgatacaatcatggcttactgcagccttgacctcctgggctcaggcgaccctcccacgtagctaggactacggatgtgtgctaccatgcccagctaatttttaaattttttgtagagatagagtctcaccatgttgcctaggctggtcttgaactcctaggctcaagcaatctgcctgcctcagttttccaaagtcctgggattacaggcatgagccaccatacctggctatattttttttctttggatataagaattatgttataaagttacttataaatcaagaagtgattttttttcttttccttcttgcatgaagattgaattatatgttaagataataatctaaaattatgtttaaaaagcagtttgtagaaatttatctaaaatttatcttagaaagtggggtaaggtgcctcatgcttataatctcagcgctttgggaggccaaggtgagaaggtcacttgagcccaggagttcaagaccagcctgggcaacaaagtgagaccttgtctctacaaaaaaaaaaaaaaaatcagattagctggacatagtggtgcatgcctgtggtcccggctactagggaggctgaggcaggaggattgcttgagtccaggaggtcaaggctgcagtgagccatgtttacgtcagtacactccagcctagatgacagagtgaaactctgtcttaaaagtaaattaataaataaacaaaatttatctgagaagaaaaatgaaaacagtagtttgtgatcaaccttatggggcttaaatttgaaaagaacaaaaaagtattatctataaagtgaatatattatagatatatattctatatatctgccatgagttaactatatatatgtaacaatatatattgccatgcaatataaattgttgcatggcaacaataatataacattattccaacaatgtatataacaatatatattgccatgagtaacaataaaccaacaatgtactttgtttgttttttgaggcacggtctcactctgtcacccaggctggagtgcagtggtgcaatcttggctcactgcagcctctgcctcccaggttcaagtgattctcctgcctcagcctcccaagtagctgagattacaggcgaccgccaccacacccagctgatttttctatttttttttagtagagatggggtttcaccatgttggccaggctggtctcaaactcctgacctcaagtgatccacctgccttcggcctcccaaagtgctgggattgcaggtgtgagccactgtgcctggcctgtttgtttgtttgttttttatttttatttttattttttttgagatggagtcccactctgtcgcccaggctggagtgcaatggtgcaggctcggcttactgcaacctccacctcccaggtttaaacgattctcttgcttcagcctcctgagtagctgagattacagatgcgtgctaccatgcctggctaattttttttaatatttttagtagagacggggtttcaccatgttggtcaggctagtctcaaactcctgacctcaaatgatccgcctgccttggcctcccaaactgctgggattacaggcgtgagccactgcaccaggcctaacaatgtactttgaaataattttaggtaactatatatggtatcctctaatttcttgtcatatagttgtttttccatcttgttttatcataaatctgattttggaaaataaaaaataatatttaaacactaaatccaagaataaatctctcttggtagatcaccaaagcagatactttaaaacagtgggttaaaactgttccaggattgtgttttctactactaaagggatgtaataacctttgagtcacactagtccagccttctttcttatgattctcatcccaaagtaggcttaacatgagacagaatttattttggatgagtactgagccaaaacagtatcacgaaacggcattctatagaatgggaaaatatttgtaaattatatatctgataaaagattcttatccagaatacataaagaactcctacaactcaacaacaaaaaacaagctgactgaaaaaatgagcaaaggatttagacatttctctaagaaggtatataggcgaggcacagtggctcatgtctgtaatcccagcactttgggaggctgaggtgaaaggatggcgtgaacccaggagtttgagaccagcctgggcaatatagtgagacctcatctctacaaaaatttttaaaattagctgagcatggtaatgcatgccagtagtcacagctacttgtgagactgagatgagaggatcacttgagcccaggaattagaggctgtaataaactgagatcacaccacggcactccagcctgggcaagagagcaagaccttatctcagaaaataatctatgtctgtccttttttactaaggacatgttaactctctcattttagaactggtttattcaaaggcaagtaatgttctcttactctcctaactccctggtcattccttggaaatttagtaatggaaagaataaaaattattctctctcaagaggaattaatttagtttaaagcttaacaggaaaacttagtaataacttcaatgaggttcattgaggaagatcaaccagtatttcaatatgaaacaattgagtttataggtaatatttttttaccttttactttgaaaaacagaaaaaagttacagaaatagtggtgagcacccttcacctggactcactttttttttcttttttttttttgagacagagtctcactgtatcgcccaggctggagtgcagtggtgagatctcggctcactacaacccccacctcctgggttcaagcaattctcccacatcagcctcccaagtagctgggattacaggtgcacaccaccacgccattctaatttttgtattgtttgatagagactgggtttcatcatgttggccaggctggtctcaaactcctgatttcaggtgatcctcctgcctcagcctcccaaagtgctgggattacaggtgtgagtcattgcgcctggctaccagttgttaacattatgcaacatttgcttgttatcattcctgttttttttagacagagtctcactcttgtcgcccaggctggagtgcagtggcccattcatggcttactgcagccttgacttcccaggctcaatcaatcctcccatctcagcttcccgagtagctagaactacaagagcatgccaccatacccagctaatttttgtttttttattttttgtagagaaggggttttgtcatgttgcccaggcttgctttgtcattctttttgtgtgtgtgtgagtatattcataacataaagagcttgcaatctctattgaaagaaatctctcaactcttaaaaaagaccataaagaggattttactacatatttactttttcagtactgacatatgattcaggtacatatgaaagaaagttaataacagttaactttcttatgtgtttttttttaaagttagtgttttttttaaaaaagcacgtaaagaaatatgatcacgggttttttgtttgttttggggtttttaggttatttctttttagagagggagtctcgctatgttgcccaagctgatctcaaacttctggcctcaagtgatcctcctgccttgaccttccaaagtggagagattacaggcatgagcccgtgtgcccagcctagtcataggttttaatggatttaatttcccaccaaattaccaactccactcttatgaaaatctagagagtttattactaataaaaaagaattgattacatgttttatttcacacctagactgaactcctagtacagtgaattagagacaaattcataatttattgaaattccccttgctgtgggcacatatgtccatagtagatgtagcatttggtaggagtttcaagaaaagcagggtaaatatttcagtgaagtctcatacagagttaagaaaaaacttacatgaaatataaaatcttagacaggatacacttatagacaactaaggataatgatgagtatcaggtagcaaggaatatattcttcagctaggttcataagatattacccattaaagctaggcgcggtgggtcatgcttgtaatcctagcactttaggaggccaaggaaggtggattgctggagctcaggaatttgagaccagcctgggcaacatggccaaaccccatctctacaaaaaattcaaaagttagctggatgtggtggcaatgcctgtagtccaagctactcaggggttggggggttaaggcaggaggatcgcttgaacccgggacatcgaggatgcagtgagccgagatcgtgccactgcattccagcctagttgacaaagtgagactttatctcaaagaaaaagaaaagatattacccattaataaacaatcacttttatttttaattttaagcatatgtagcaagggtatcttttctctttgacctcttttccagagtacactcatttcattttatttcttaaactcagtagttatccagtttgttttcaacatagaaagaatccctttcaactcagtggtcatcagatttagacacagaccagtgttttgcgtagctgtgtctggtgtcatggtagagccacggggtattagtgtagcaaaaaagcagagactttggggtcagagctcctgggtttggatataaactctcctatttatattgggcaaattacttaatttctctgtgcctcatttccttcatctgtaacatatgattatagtacctcgtgttacagagttgtaataaaaattaaataagctaatgcataaaagagcgtgcacagagcagagctcaaaaaacattcattattggtctaaatacttaacaaaatcatacagtagtcatttattccagttacttctgacaaccacctagtggatacctaccacatgcaggtaaactgaaaaggaataaaacatgtccctaggcattaagatgtttacaatttagtgaagaaaatagatgtcaaacaaataattacaatattataagagcctaatagaggtagtactatgagatcaatgaagcaggagttactagctctgcttagggaaggcagaaaaaaattcctattgatttttcctttgttcagtggagtaaaaaaaaatacataatggttttgggtattcgtcctactgagagagagaacagtgtgtgcgcgggtgtgtgtgtccttatttatttgcgggagtcatgaaagacaaatgcttaggaactctccagaataaaagagacaatagaaacatgacaatttagtgcttcactgaccagttcctgttttgggggaaaatattaccttaaaggatgttattaaaacagttggcaaaattggaatatacactatagattagattatgcagtagattactcggtgttaaatttcctgaagttgatcactatactgtgattctgtaaaagaaaatccttgttgtaagatgagctatgagaaatattaaaggagtaaaggagaatgatactatttgagagtaatttgtgatacatttgacttttccttatattccaaaaactactgcaaaaccattcagccgtagtcccccttcctctggaaggaactgagtggatagtatcacaactactaaaaaaacgatctgcacacactggcacacagaatgatgaagcatgtgacaaaatgttaaaaattggtgattcagagtattacaggagttatttgtgttacttttacaacttttctataaatttgatatttcaaaagaaaaaatttaagagggaaaaggcataatcagaaggcatcttcaagaggaagcatttcaactgtatcctagtggctaaattcaccgggtggataaggaggtcagagactgttgtgtagaaagcgaatgggggcatgaaagtacattacttgtttgcacatagttcagtacagtaatttttcttttctttttctttcttttttttttttggagacagaatctcgccttatcacccaggctggagtgcagtggtgctatcttggcttactgcaatctccacctcctaggttcaagtgattctcatgcctcagcctcctgagtagctgggattacaggcatgcaccaccacgtccagctaatttttttttgtattttttatttttattttcatttttttgcgggggacagagtctcactctgtcacccagactggagtgtaatggcacaatctcagctcactgtattctctacctcccatgcttaggtcatcctctcacctcagcctcccaaatagctgggactacatgtgcacatcaccacgcccggctaatttttgtattttttgtagagacagggtttctccgtgtggtcaggctggtcttgaactcctgggctcaagtgatctgcccgccttggcctcccagtatgttgggattacaagtgtgagccaccttgcctggcccagtaatttctgtgtaagatgtttggaacacattcttttaagtatctgtagaatattagttggatattcattaatatgatgtttatcaaatctcactgctgaaaattcaagaaatatttagcaaattatcagattattatgccaaacagagccgttgtttaatatacttccattaccaggaaatcccactctaaatatcctcaattttgttctcctttacagcttataattattacatggttatttaaaaatgacacgtggaagagtttgagcagccttaagaccaagtagacaatgaaaatcatacctttttggtaggatatcactactggtgataatttagatatttggataaacaaaaacaagaataaaacagttctaattaagtgtttgatgtcatcaacattcatatttattaaagaaatattttagagtggagctgagaagactttctgtaagaaatctttaaagcagcaaaataagtgattttgccagtaactttcacctgtagaagtcagaataaccaagcacagatcttttttcaaactttctatgatattttgactttgcttccatcctttctattgcttagtctagagattaaggtattacttctaataatagtcatttacattatttatgttgctaatctcttgatgacaagacctctacatgtgtcttgaaataaaatcaaatggctctgtgcttcatatagagactaatttctaagacataaataaaaggtaatggacaaagttgtcaaacaatagccagttagttctttgctgaggaaagggaaccattgctgaatgcttttgagattgctcttggaatataaggaaaattttaatttatcacaaaatctctaataagttaaagatcacaaaatagatttaagtttttaaaaattttctgaagtgatcataattccccatatccttgcataaatatatatttataaatacataatatatataatatctatatgatgttccactttgaactcttctttcaaaagattaaaacagtttgagggcagcctgggcagcatagtgagaccccatctctacagaaaaattaaaaaaaaaaattagccaagcatggtggcacacatctgtagttctagctacttgggaggctgagatggaaggatcacttgagtccaggaggttgaggcaaggctgcagtgagccatgatcacctcaccgtattccagtttgggtgacagagtgagaccctgtctcaaaaaaaaaaaaaaaaacaaaacattggagcacaatacaatacaatctgaattatttattataagtaaatttgctttctttctgagagtgaaatacaagagaacattttggggcaaatgaaatagaaccagagttttagagattaataagtcagtttctaaatcttctaaagattgagatagaattaattttcatggtttcttgacatttcatattgtaaaaaatagcagtggaatcctttgagagatgctgtttacggaaaagtttatgatagattgaagtgttaaaagttagtacccttgattatgttatataacaaagatttgtaaacttgaaattgctaaaacaaagtaatcattagagaatatgaaatagtttatagttacttattttctctattcatagttgctaatgaataaaagtaagttgtaagcttcatgctttaggtgttttaaactttttaaatatgtttggaaaatgtggcctggcacagtggctcacacttgtaatttcaacactttgggaggcagagatgggaggatagcttgagtccaggagtttgggaccagcctagtgagaccctatctctacaaaaaataaaaataaaaaaattagctggatgtggtggcatgcaactgtggtcccagctactcgggaagccttatgcccaggagatcgaggctgcagttagccctgccactgtattccacccttggtgacggagtgagtaagaccctgtctcaaaaaaataaaaaataaaaataaaatgtccgaatggtttttacagttgcttttttttttcctgattactatgctcatgttagtttatatctgtattgtgtttatgtttatagaaagaaggttgggccaggactggtggctcatacctgtaatcccagcactttgggaggcagaggcagaaggatagcttgagcaggtgttcaagaccagcctgggagacatagcgagaccctgtctctacagaaattttaaaaattagctgggtgtggtggcattcgcctgtggtctcagctacttgagaggctgagagtggaggatcattagaacccaggagctcaaggccacagtgagtgagatcctgtttcaaaaaaaaaaaaaaaaaagaaagaaaaagggttggtttgagaggtcagtaggtatatataaaattatagctgtttttattaagtatatataaaattaacttagagttgataatatttgttgctgctttttctattactagaaagttgggggaagaatcaaacaatgcagttttgatttttctttctgttttttcttagcaattgaaagcatgtagtgaagaacaagaagacagagaatgtttgaaccaagctattactgctctcatgaatctccaaggtagcatggaccgaatttacaagcagtattcacctagacgtcgacctgggtaattccaaagtgttgaaaacgtgaatgcctctgcttacttcgctgtctctgatgcctggttttcaaagaagtgtgatttattgtgatagttacattattgaaagttgtgcttgtcatacttttatatacttttatgttggtcttttactctcttttttccttttcctttcctttttttttttttgagaaggagtctctcttgcccaggctggagtgcagtggtgtaatctcagctcactgcaacctgcaaccttagcctcctgcgttccaatgattctcctgccttcgcctcccaagtaactggaactacaggagcccaccaccatgcccagctaatttttgtatttttagtagagacggggttttaccgcgtcggccagactggtctcaaactcctgacctcagcctcccaaagtgctcggattacaggtgtgagccgctgcgcccagcctttttttcttttttttaagagacagggtctcactctgttgcccaggctggagtgcagtgatgtgatctcagctcacagcagcctcaacctcctgggctcaagcagtcctcctgcctcaaccctctggagtagctgggactcgagtagctgggtggcacatgccaacacacctgcctaatttttgtattttttgttgaaatagggttttgctatgttgcccaggctggtcttgaactcctgggctcaggtgatctgcctgctttggcctcccagagtgttgagattgcaggtctgagccactgcacctggccaacccagcctagtcttaagattagcattgttggctgggcacggtggctcacgcctataatcccagcacttcgggagtccaaggtgggcagatcgcctgaggtcaggagtttgagaccagcctggccaacatggtgaaaccccatctctactaaaaatacaaaaattagccaggcgtggtggcaggcacctgtaatcccagctactcgggaggctgaggcaggagaatcacttaaacctgggagggggaggttgcagtgagccaagatcgtgccattgcattccagcctgggggacaagagctccaaaaaaaaaaaaaaaaaaaaaaaaaaaaaaaaaagattagcattgttatattattaggatagacttaataaatgtttaaaaatataatctatgaaagaaatttaggattttttgtaattttagttcttatagagccagtagtacttctctttcataataatgaaattgagggctgtattatttagtggcaaagttagaactaaatgctgtgcgtaaaagctactgtttggttatttaatattttactcacttgatttgagatggtttatgcttgaaaccatttgggttgctagctattgaataagctatattgtttgttttttctagagatcctgtttgccctttttatagtcaccaattaagaagcaaacacctggctatcaaaaaaatgaatgaaattcagaaaaatatcgatggatgggaaggcaaagatattggacagtgttgtaatgaattcattatggagggaccattgacaagaatcggtgccaaacatgaacggcatatttttctgtttgatggcttaatgatcagttgtaaacctaatcatggccagactcggcttccaggttacagtagtgcagaatacaggttaaaagaaaaatttgtcatgaggaaaatacaaatttgtgataaagaagatacttgtgagcacaagcatgcatttgaattagtatccaaagatgagaacagcataatatttgctgctaagtctgctgaagaaaaaaacaactggatggcagcccttatttctcttcattatcgtagtactctagatcgaatgttagattcagtattattgaaagaagaaaatgagcaaccactgagattaccaagtcctgaagtatatcgttttgtagtaaaagactctgaggaaaacattgtttttgaagacaacttgcaaagtagaagtggcatccccattattaaaggaggaactgtagtgaaattaattgaaaggttaacatatcatatgtatgcaggtatgtgaaactcattacaactgctgacctagggcctgggacccaaaagctttttaaggatgctcaaaaatatttgaggcttggggaaaaaatggattgcctccaaaatataaaaatactgcaaaaacaaaaggaataaataagagaaggaattaaaggtctaaaaatgtaatattgttaacttcattaattattgaataaatattcataaaatatgcatattcatgaattttttttttttgagacagagtcttgctctgttgcccaggctggagtgcagtggcgctatctctgctcactgcaagctccacctcctgggttcacgccattctcctgcctcagcctcccgagtagctgggactataggcgcccgcaacaatgcccggctaattttttttttctttatttttagtagagatggggtttcaccgtgttagccaggatggtttcgatctcctgacctcgtgatccgcccacctcggcctcccaaagtgctgagattataggcgtgagccacctcacccagccatattcatgaatttcaaatttgaaaacaatcctcgcttattaaggatataccatagtatattctctatgtcagtatttctctatgtatggcagggataccatggtatcctgccagtaccatgattgttaggaaaagccacaatctgaggagccaaagtaaaaagaaaaagggaggaaggcctccaaatatggtactttgagttaattaaactgaatacattaaacatgaaacctattttatgctctgccttttcagatcccaattttgttcgtacttttcttaccacatatcgttcattttgtaaaccacaggaattgctgagcttactgattgaacggtaagaaaaatatgtatttcagttatattgacattttgtgaaaaattaactgtattttgtaaagtgcctagtacctaataaatactcaagttaattattgaacatattttatttggcattaaattggcagtattactattctcttcaaatggagtactccctaaaatctgtttataaacacagatcttttcagctcttagaaatatttcaagtggtaatcagaaagactaatttagaggatgaaagcactatattttaatgaatattgttctgtgtaataaaatgatattttcttaaaagagacttttctacttaccactatttttttttttggaccgtagactactttgccaaatactttccacttttaaaacaaacttgttatgaaaactttcaaaacacatacaagagcagatacaagaatataataaacccatttattcatcaaccaccttcagtaattatcaactcattgtttcatctgtttccctacaaatttaaacaccccaccccatgattattttgaagtagatcctagacaacataattcatctataaatatttttctatgtatctctagaaaatacgggatcatttttaataatcagatatcattactaaacctaaaaaatcagcaattcctttattatgattaacttttaaaaattagtgttgggttgaatttgttttacctagtattatagtggcattttaaatgttttatagtttaaaatgtagaatctggactccagaatgatttttagttttacgttttaaaacttactaaaacttattattataccaaagcttattaactgtattatcaagatataattctagatctctatcactatgttgttttatcaaactaaatttaccagactgagtcagtgtaatgtgctatgaggatctacttagttgtttccatgtccagaataaggaaagcacacgttagacttatagtttagctgtatttcctatgtttgagcaaggttttttatctttatcttatccacttaggtaaattatttaaatattgttaaatattcggttttggccctctctttgaatttgtactcatttaaataaatttattagcctactttcattttaataatataaatattaaagacattgttagataagcaatttctgtcatgttctttaaattccttatgaattctttccttggctcttttccctggaccttttctgtattatcagtgctaaaagacaaaactttagtttttataaaagtaagaatacaaaacgtcagttttgtatagccaaaggacagttttttgtagtatatcatacctcaagggaagtttaacagtaatccacttttcgtggaagtggtaggaaagaaggttgcttgctgttttcctccttgtattttcattatgtatgaacggatttttctccttttgcttttcttcttaggtttgaaattccagagccagaacctactgacgcagacaaattggcaatagagaaaggcgagcagccaatcagtgcagaccttaaaagatttcgcaaggaatatgtccaaccagtacaacttaggtttggcttgaatattttttatatatatatatacacatatatatatacacacacacacatattttatgtgtcagttttcaatatatagttaacacaaaagctctcagcttttaattcaaatatagggaatatttttaacttcacagcagttaagttaaactaaaagagttctttctcagtgaagctattcttaaataccctgaagaaattcaaatatttaaatatcctatgtttgcatcacatatctctggcatgtgatatgttatgcttacgtatcaggatacctattttttattgtaagtaaaaattataaaatttcatgtgagctttcctgctgtcaaccttttttcacacttttttccttcatttccctttgcgatcatacagtaatcctggctttttttacaatttataatatttgtggaagttctagcccttttcccacttatctctcacaaaatatatagacatttgttagtttaattgcaataatttctaaaaatgtgtttgattgtagaagcttccagttaataaatactactgtgtgccggggattaccctaaatgctttatcttttttatctcattcttacaacatgattactattcctactttatatataaggaaattgaaacctagcaaggtgaagtaatttgagctaagttatgtaaagggagtggcaggacaagattcagactcatgtctgactttctttgcgtgtgtgtgtgtgtgtgtgtgtgtgtgtacgtaccactaagcattgaaaattggaagcgccttctcttagccctctttactgtccaagtaaccaaagtattatcttcctccttccattggaaaccaagttatcttattaattatatgtaatttaaattttttttctctctaaatttcaagtttccttgattactgttgaccaataaattgtaattttggaactgagtatattagttatttatttcccaggataattgccacaaacaaatgcagttttagaagaatgatagtgctcccagctatatgtctttcactaaaacttttaacgtcattctttgtataagaagatgagattatttatgtatcagcaataaataagtaattcttttctactagctgtgatgcatttgtacttatctacaatcacattaaatcccttgatatgacacatacatttatgaggttgctattgggtggggtagggggtgggagtataatcttcgtttctcagtcatataagctctttatgtatttctaagcatttgctgtgttctcagtcctgtacttataactatgctaagtacaaaaataacatagactgtcatgatattgtggctttcttggggactttactgggggaaaaagacacatgaaacagttatatattgttctacttggagtgcttaagtgacttagaaaaatacatccctatacaatttcaggaatagcaaagattaggccagagtaattagggaaggcatcttggagaaggtaaaatctgagactgcccctaaaggatgtataggctttagataggtagaaaggtgactgtaggtattcagggtcatgagaaatagtatgaacaaagacaagaaggcagaaatgagaatggtgtgctgaggacacagataaggacattgacctgagaggaatgtaggcattgtattgcaagtagtagatgagattacctgtatggaattggatggagtggaaaactgtgaaatccaagccaagttattaaacctgttatataaatattgaaagatttctagtaaaatgggtggtagtaatttttctaacattttattatgaaaaattttaacatacagcaaaactgagaattttacaatgaacacccataaacccaccacctagatatgtattcatctattcatatctattcatttatgtgttcatttatcattcatctatcagttcatttttttgtatgaattttgaagtacactccttaaatacttcaacttgtatgtcattaacagttcagtgtttgtttttcttttgttctaaaatgtgcatataattaaatacatttttttcttgctgccactgaagacagaagatacacacatcttaagtgtacttttgttgagttttaacaaatacatgtatctccataatccaaacgcctttcaagatatcaaatgttactacaccccagaaagttcccttatgttccttctcatcagtttttgttcccactgcccaaaggcagtgttccaatttctccctccatagattagttttacctgttttagagtcttaataaatgcattcttaaaaactcaattttgtgtcttctttcactcaacatgcttttgaatttgtatcaatggcttattttattgcgaggttgtgttttattatatgaatataccagtttattcatttttcccattgaaagatacatgggctttttctcgttttttattattatgaataaagccgctatgaactttatcttacctgtcttactgtgaatatttttcacttttcttgggtaaacaactcagagtggagtggctgggtcagaaggtatgtgtatgtttagttttgaaagaaactgccaaaacttccaaaacattctcaccaacaatgttcaagttgcttcatattctcaccagtgtttagtaatgtcagtctttgtgccttagccatactgctggatgtagtggtatttcattcatacttattttgtggagaatctgttcaaatcctctaatttttgttgagatacttgtctctttattactgagttgtaggagtaaattgggtaggactgaatgccagtcctttgtcagataaacattttgcaaatattttctttccatggcttgcctactagtttccttccttccctttccttttcccttcttcctcttccatttccctcctcttccctctccccttgtctttcctttcctttccatttgcatagttgattaaatctctctttgcaaggttataggtaatcatttttgtgatactgtaaaacaaaacagttctatttttgtcttttgaaatgaaataagagactgtagtatatgtgtagattacatagaaatttgatgataggctgggtgcagtggctcacgcctataatcccagcactttgggaggctgaggtgggcggatcacctgagatcaggagttcgagaccagcctggccaacatggtaaaacgtcgtctctactaaaagtacaaaaattagcccagcatggtggcgggcgtctataatcccagctacttgggaggctgaagtaggagagtcacttgaacctgggagttggaggttgtagtgagctgagatcgcaccattgcactccagcctgggcaacaagagcaaaattccatctcaaaaaaaagaaagaaatttgatgatagcacttgcatttagaaccagatacagtacatcttagttggttttccattttaagtgaaaaagtaccaaaatttaaatcttaaaaatgctttttatgaacttaaaatagcttttgtaatatagagcataagttttctacatatgaataaagggtacttttccttaacataaatgggaagcacagaaaccactatttttatgcttataaatattttaaaagtatacattttattaataaataatacaccgtttggagacctactctcctcttgtcattgaagcatttaaagtattaattaaatacagattagagagtctttgagtattatgttgacccttgtatgtaaagctattatcgtggcattagagaaggaagaagtgtaattgaacacttacgtttcactaaaatgtgtttctttccattttatcaggatcttaaatgtatttcggcattgggttgaacatcatttttatgactttgaaagagacttggaattgcttgaaagactagaatccttcatttcaagtgtaagaggtatattatataaaggtttgattgaatcttatattgaacatgagtttatgttcaaatttgtgtgactttaagaaactaaaacatttctctctctttttttttttgaaacagagctttgctttgttgtccaggctggagtgcagtggtgccatctcagctcactgcaacctccgcctcccaggttcaagtgattcttctgcctcagcctcccaagtagctgggactacaggcacatgacatcacgcctggctaatttttgtatttttagtagagatggtatttcaccacattcaccacaagaccagcctggtgtcttgaactcctgacctcagatgatccacctgcctcagcttcccaaagtgctgggattacaggcatgagccaccatgcctggccagcatttttcatttttaaaaagctgaaataacatttggaatgttttttatagacagcaagaaactcacatatgtttagaccaatcatctgaggtctcagaactttgccttttcaagtttttgaggagaatatttcttttaaagaagtcgaaagttctttttaataaatttaagctatttaattttatctcattgcaaggttgccatttcttcaactgaataaaaatatgtgtaattttatgttttctttctttaatcttattcttttaatgattaacagctttcttataatatttacatcttctggaaatgtttttggtatatttctgaaatctgaaagagaggagttttctactttaagtttcagaatcatagcccaagaaatgaaaccctaggccatgaacatttaaacaaatgtgtcatcaaatgtatattattgaatcaagaacatttatgttttatctgacattatagggcattacaaatactataacaagtgtaacttatttcgtgttctacttgttctttaaggggaatattatttaaagttaagaatgttattcctttgtttctactttgagatgtttatgatacatttttatgtgtgccttgaaattgtcataatactacattttcaagttgtattctaggccactgcaatggctcacacctagaatatcccagcactttgggaggcagaggcgggctgattgcttgagcccagaagtttgagaccagtctgggcaaaatggcaaaacccagtctctacaaaaaatatgaaaattagccaagcatggtggcatgtgcctgtagtcccagctactcgggaggctgaggtgaagcgatcacttttaagcccagagctcgaggctgcagtgacccgaaattgcaacactgcacacaagcctgggcagagtgagaccctgtctcaaaataaacaaaaaacaaaaatttatattctaaatgagaatactggattagacacaatctaagaagcttctaaaatacacacacacattagaataaattaagtaaatggttatgttaatgtccaaagttcttttctatactagttatacttcagaataaccaaatagttcatgaggaaaagtttatttttgtggaagtatttcaactagtaagtgaagaaggaatggtagaatatcacatttctcaggtcctagtaaaataataaacctagggaattatcatgactggatgggtactatcacaaaaagttaactagacattatatgcctcctgttagaagtattcttggcaagtatttgtgtcataaaattaatcctgaatcagaccaagtcactatatctctgctttacagaaaatatagaggacagaaaaacatggcaaatgacaatttcttccacaaagtgcaagcaaaaatatgcaataaagcagtaacctgtagattaaaggagacttgagacacattgactcagtgcaatatgtgcaatcttgttcagatcccttttcaaactaaatataagaaaatatggccaggcacagtggctcatgcctgtaatcccaacactttgggaggccaaggcaggcagatcacttgagcccaggagttcaagaccagcttgggcaacatggataaaccctatttctactaaaaatacaaaaattaggccaggcgcggtggctcacgtctgtaatcccagcactttgagaggccaaggcaggcagatcacgaggtcaggagttcgagaccagcctggccaacatggtgaaaccctgtctgtactaaaaatacaacaaaattagccaagcatggtagtgtgcacctataatcctagctactcaggaggctgaggcaggagaatcgcttgaacccgggaggtggaggttgcagtgagccgagatcacgccattattctccagcctgggtgacaaagtgggactccatttcaaaaaaaatacaaaaattagccaggcgtggtgatatgtgcagtcccagctacttgggaggctgaggtgggaggatcacttgagcccgcaacatggaagttgcaataagttgagattgcgccactgcactccaacctgggccacagagcaagaccctgtctcaaaaaaaaaaaaaaaggaaaataatcagagagagaaatgtgaacagtgacaaaatacttcaagataacaatgtattaagaagttgtcagttttatgtgtgataatggtgttgtggttattactttaaagagtgttttaaaggtgcttaaatatgaatgaaatacgatgtctcggatttgtttcagaataacctaggaagtgacgggatggcatgagtagggttagagaaaataaaaattggccatgagttggtaactgttgaggctgggtgaaagttaaggattaaatgaagatttgcagtcatgtctgtcaagtaaaagacatttttctttatgtgttctttttccagggaaagctatgaaaaaatgggtagagtcaattgctaagatcatcaggaggaagaagcaagctcaggcaaatggagtaagccataatattacctttgaaagtccacctccaccaattgaatggcatatcagcaaaccaggacagtttgaaacatttgatctcatgacacttcatccaatagaaattgcacgtcagctgacacttttggagtctgatctttacaggtagacaattaatgttaatgtcttgctttatttttaagaatcttgaacattacctattttcaaaacattttgcacattattcatgagtgcttaaaaatacctcatctactctcatgggcttagaggaaaggtcatagcacagtttttaactagtctgccctgcaagtaaaagtcttatgtctagactggggactagcaatccattacaagaggaatggcaggaagattttcaagtccaccacccctcttcaactcctaataccttctcaccttggtttagtttgaggtcagtcagtcaagtcagttagtatggatgctaggcccttagcagctaagtgaatagaatattgtgtgagatgggttttcttttctcatttacagctcaggctgttgcgaagggtacaggccttgcatgtaacagctctctgtcgaaaaatgtcactatcattatcattccatcaaaaactttttctacaccaacctctctgttttcccctcctcccagtccttcccagccactaatacctgcagttctactctctacttccatgagttcattttttttttagttttcatatatgagtgggaacatgttatatttttctttctgtgtctgatttattttgcttaacataaggtcctccgggctcatccatgttgccttgaacgacaggctttcattctttttttatggccgaatagtgttccactgtgtatatataccacattttctttattcattaatctgttgattccatatcatagctattgtgagtagtatagaagcctcaatttaaaatataaatgtgcttggctgggtatgatggctcatgcctgtaatcccagcacttaggaggccaaggtgggcagatcgcttgagaccaggagttcaagaccagcctgagcaacatggcaaactccgtcatacaaaaactacaaaaaatagccaggcatggtggctcgtgcctgtagtgcccctgtagtcccagttgcccaggaggctgaggtgggaaggtcacttaaggtcgaggctgcagtgagccaagattgtgccaccgcactccagcttgagtgacagagtgagaccctatctctaaaataaaaatattttcatggagttatcctgattagcagccaatttttaaataaagattacacagggaaaagcaagaatatataaaatttagtgctaataggtaatatagtaaggtacctttactacattatgtttactttatgttctttagaatttgcctagtttgcactggccatgccattcagaaccagacttttagcacacccaccagaagttgtcaacatctgactcaaaatgttatgttatattttaagtaatttagaatccaggtagctttgtttatgttgtgggatttgtgatacgtagaaatgaagggacttgttacttgaggtaaaaaaagcaaatagtactgcatcatgttttttctcacaatgtaattgttttacatgaatggacatcagaaaaaaagcacttcacttcatgtggacctactttcaggacatagaaaaatacctaatactgacttcatttgtaaactaaattttttttttttttttttgagatggtgtcttgctctgtcacccaggctggagtgcagttgtgcaatctcggctcactgcaacctgtgcctcccaagttcaagtgattctcatgcctcaacctcccgagtagctgggattacaggtgtgtgccaccatgcccggcttttttatatttttagtagagatggggtttcaccatgttggccacagtggtcacgaactccttacctccagtgatccacccacctcagcctcccaaagtgctgggattacaggcatgagccactgcacccagctttgtaaactaaatttctggtgaaataatagagccactttaagaaaacatttcagaaactgttagcaagtacttatttatacacaaatctactgattaaaaaatatttttttaatgaataaccaagtctgtaggccattgatggcaatgccaccagtcaattaaaaagaaaaaaaagagatagggtctcactgtgttgcccaggctggccttgaactcctggcctcaggcagtcctcctgccttggcctcccaggtgctgggattacaggtgtgagccactgtacttggccaatttttaaattgtgtattctgactcactgtatacaatgttttaatctgctcttctgtctgaattttaattaaatactcaggcattcaaaaaatataggaaataatataatgaatattcatgaacaacaaaaacattttagataaaattgaaatcctttgtgtaattctcccaaatcttattgctctctttcccctaagaaatcactaccaccctgaatttgatgtttactatttctctttatatttttaaaatttataaacatacacggagattcataaacaacgtatagcattgttgtacacttttttttttttttttttttttagaaacagggtctcactctgttgcccaggctggagtgcagtggcacaatcatagctcactgtagccttgaactcctgggctcaagcaatcctcctgcctcagcctctcgagtagctagaactacaggcacgcaccaccatacctggctaatttttttaaaaaaatttcatagagatgaggtcttgctatgttgcccaggatggtcttgatcttggcctcaagttgtcctcccacctcaacctcccaaaacgccaggattacaggtgtgagctacagtgcccaactggttttttgttgttgttgttgtttgtttgtttaagatggggtctcactctgtcacccaggctgggatgcagtggcatgatcatagctcattgcagccccagactctaggctcaagcagtcttcccacctcagtctctcagtagcaggaactgcagggaggaaccactgtgcctgttttttttttttgttttatttttttgagataagatctcattatgattgcccaggatagtctcaaaccctttgcctcaatcaatccttccacttcatcctcccaagtagctgggattataggtgcgcaccactgcacctcagcttgttttgcactttttttaaactgcatatacttatgtatcattctgcaacatgctttttacttaaatcatttttggcatttgttcaagtcaatgaatacagttctagttagcttattttagatgctgtgtagtgttccgttatatttatactccacaatttatccagtctctggatgatgagcctctattcactcttgtaaataatgcttcactgaatattcttgtaaacgttttcttataactttgttttttgtttgtttgttttgagacagagtctcactctgttgcccaggctggagtgcagtggcatgatctcagctcactgcaaccctctgcttcctgggttcaagcgattctcctgcctcagcctcccaagtagctgggactacaggcacgcactactacgcccggctaatttctttgtatttttagtagagatggggtttcgccttgttggccaggctgttcttaaactcctgacctcaagtgatctgcccgcctcagcctcccaaagtgctgggattacaggcatgagctgctgcacctggctcttataaatttgtgtaagagtttatctagggtatatgcatacttaagagtcaaattgctgagtcatccgatatgtatctcttcagtactatgagatcttgccaaattgttttacaaaatggttgtatcaatttttacttccctattggtgttcctgttttattatatttttatccatttggaattatcagacttttttttcgtttctttttttctttttttttttttggagacagagctttgctcttgttgcccaggctggagtgcagtggtgcgatctcggctcaccacaacctccatctcccgggttcaagcgattctcctgcctcagcctcccaagtagctgggattacaggcaggtgccaccatgcccggctaattttgtattttagtagagacggtgtttttccatgatggtcaggctggtctcgaactcctgacctcaggtgatccatctgcctcggcctcccaaagcgctgggattacaggcatgagccaccacgcctggccttgagttatcagacttttgttcatctaatgagtaaaatgggatttcattgtagttttatgttattttccctgagtaagggataaagtgtgttttcgtgtttgtagctatttggatctattcctctctgaattacttgttcatatatgtgttcatctgtcttttgggttagttgtctttttcttattaagttttagaagatctttaagtaatacaaatcctttataggttaagttgcactgattttcaattccataggaaagttcaaccgtctgaacttgtagggagtgtgtggaccaaagaagataaagaaataaattctccaaatttattaaaaatgattcgccataccacaaatctcaccctctggtttgaaaagtaagttttaatttactcttactacctcctaatagccataatattaagtcatatttaagctaaaattctggctactcataattatcttgttttctaagtgaggtgaagaaacttttctaagccatgaatttttgttgttgttagatgcattgtggaagcagaaaattttgaagaacgggtggcagtactaagtagaattatagaaattctgcaagtttttcaagatttgaataatttcaatggcgtattggagatagtcagtgcagtaaattcagtgtcagtatacagactagaccatacctttgaggtaagttttaggcttaactttttcatttttctcggggatgataaaattagcataaaagaaatttcatctatcatctgtctttttaattaaattctttgtaaattcatccttgcttcataaatatgatataaatatattagaaaatatgttgatatattagttaatatatgaatatgatatataatatgtgaatcctaggcttatattagaaaatatatcaatattcaataaacaatatgagacttgcactgccgtgtaatgtacttaacctaaatgtaatgaagttccaagtggatttattcaataacacattgattgatagtctcaaatgacaaaggattttaaatataaaaatacaagtaatgtcttaattacctttaggtagtcaacaatagtataacacgggaagaactatttcaaaaacttaaatttggccaggcgtggtggctcacgcctgtaatcccagcactttaggagg

SEQ ID NO: 89 - DNA, 4002 bp, Homo sapiens
atgcaggcgcagcagctgccctacgagtttttcagcgaagagaacgcgcccaagtggcggggactactggtgcctgcgctgaaaaaggtccaggggcaagttcatcctactctcgagtctaatgatgatgctcttcagtatgttgaagaattaattttgcaattattaaatatgctatgccaagctcagccccgaagtgcttcagatgtagaggaacgtgttcaaaaaagtttccctcatccaattgataaatgggcaatagctgatgcccaatcagctattgaaaagaggaagcgaagaaaccctttatctctcccagtagaaaaaattcatcctttattaaaggaggtcctaggttataaaattgaccaccaggtttctgtttacatagtagcagtcttagaatacatttctgcagacattttaaagctggttgggaattatgtaagaaatatacggcattatgaaattacaaaacaagatattaaagtggcaatgtgtgctgacaaggtattgatggatatgtttcatcaagatgtagaagatattaatatattatctttaactgacgaagagccttccacctcaggagaacaaacttactatgatttggtaaaagcatttatggcagaaattcgacaatatataagggaactaaatctaattataaaagtttttagagagccctttgtctccaattcaaaattgttttcagctaatgatgtagaaaatatatttagtcgcatagtagatatacatgaacttagtgtaaagttactgggccatatagaagatacagtagaaatgacagatgaaggcagtccccatccactagtaggaagctgctttgaagacttagcagaggaactggcatttgatccatatgaatcgtatgctcgagatattttgcgacctggttttcatgatcgtttccttagtcagttatcaaagcctggggcagcactttatttgcagtcaataggcgaaggtttcaaagaagctgttcaatatgttttacccaggctgcttctggcccctgtttaccactgtctccattactttgaacttttgaagcagttagaagaaaaaagtgaagatcaagaagacaaggaatgtttaaaacaagcaataacagctttgcttaatgttcagagtggtatggaaaaaatatgttctaaaagtcttgcaaaacgaagactgagtgaatctgcatgtcggttttatagtcagcaaatgaaggggaaacaactagcaatcaagaagatgaacgagattcagaagaatattgatggttgggagggaaaagacattggacagtgttgtaatgaatttataatggaaggaactcttacacgtgtaggagccaaacatgagagacacatatttctctttgatggcttaatgatttgctgtaaatcaaatcatgggcagccaagacttcctggtgctagcaatgcagaatatcgtcttaaagaaaagttttttatgcgaaaggtacaaattaatgataaagatgacaccaatgaatacaagcatgcttttgaaataattttaaaagatgaaaatagtgttatattttctgccaagtcagctgaagagaaaaacaattggatggcagcattgatatctttacagtaccggagtacactggaaaggatgcttgatgtaacaatgctacaggaagagaaagaggagcagatgaggctgcctagtgctgatgtttatagatttgcagagcctgactctgaagagaatattatatttgaagagaacatgcagcccaaggctggaattccaattatcaaagcaggaactgttattaaacttatagagaggcttacgtaccatatgtacgcagatcccaattttgttcggacatttcttacaacatacagatccttttgcaaacctcaagaactactgagtcttataatagaaaggtttgaaattccagagcctgagccaacagaagctgatcgcatagctatagagaatggagatcaacccttgagtgcagaactgaaaagatttagaaaagaatatatacagcctgtgcaactgcgagtattaaatgtatgtcggcactgggtagagcaccacttctatgattttgaaagagatgcatatcttttgcaacgaatggaagaatttattggaacagtaagaggtaaagcaatgaaaaaatgggttgaatccatcactaaaataatccaaaggaaaaaaattgcaagagacaatggaccaggtcataatattacatttcagagttcacctcccacagttgagtggcatataagcagacctgggcacatagagacttttgacctgctcaccttacacccaatagaaattgctcgacaactcactttacttgaatcagatctataccgagctgtacagccatcagaattagttggaagtgtgtggacaaaagaagacaaagaaattaactctcctaatcttctgaaaatgattcgacataccaccaacctcactctgtggtttgagaaatgtattgtagaaactgaaaatttagaagaaagagtagctgtggtgagtcgaattattgagattctacaagtctttcaagagttgaacaactttaatggtgtccttgaggttgtcagtgctatgaattcatcacctgtttacagactagaccacacatttgagcaaataccaagtcgccagaagaaaattttagaagaagctcatgaattgagtgaagatcactataagaaatatttggcaaaactcaggtctattaatccaccatgtgtgcctttctttggaatttatctcactaatatcttgaaaacagaagaaggcaaccctgaggtcctaaaaagacatggaaaagagcttataaactttagcaaaaggaggaaagtagcagaaataacaggagagatccagcagtaccaaaatcagccttactgtttacgagtagaatcagatatcaaaaggttctttgaaaacttgaatccgatgggaaatagcatggagaaggaatttacagattatcttttcaacaaatccctagaaatagaaccacgaaaccctaagcctctcccaagatttccaaaaaaatatagctatcccctaaaatctcctggtgttcgtccatcaaacccaagaccaggtaccatgaggcatcccacacctctgcagcaggagccaaggaaaattagttatagtaggatccctgaaagtgaaacagaaagtacagcatctgcaccaaattctccaagaacaccgttaacacctccgcctgcttctggtgcttccagtaccacagatgtttgcagtgtatttgattccgatcattcgagcccttttcactcaagcaatgataccgtctttatccaagttactctgccccatggcccaagatctgcttctgtatcatctataagtttaaccaaaggcactgatgaagtgcctgtccctcctcctgttcctccacgaagacgaccagaatctgccccagcagaatcttcaccatctaagattatgtctaagcatttggacagtcccccagccattcctcctaggcaacccacatcaaaagcctattcaccacgatattcaatatcagaccggacctctatctcagaccctcctgaaagccctcccttattaccaccacgagaacctgtgaggacacctgatgttttctcaagctcaccactacatctccaacctccccctttgggcaaaaaaagtgaccatggcaatgccttcttcccaaacagcccttccccctttacaccacctcctcctcaaacaccttctcctcacggcacaagaaggcatctgccatcaccaccattgacacaagaagtggaccttcattccattgctgggccgcctgttcctccacgacaaagcacttctcaacatatccctaaactccctccaaaaacttacaaaagggagcacacacacccatccatgcacagagatggaccaccactgttggagaatgcccattcttcctga

SEQ ID NO: 90 - DNA, 4002 bp, Homo sapiens; identical to SEQ ID NO: 89

SEQ ID NO: 91 - DNA, 46456 bp, Mus musculus
  misc_feature (1)..(2876): "n" at positions 1 through 2876 can be any base.
  misc_feature (23821)..(24010): "n" at positions 23821 through 24010 can be any base.
nnnnnnnnnnnnnnnnnnnnnnnnnnnnnnnnnnnnnnnnnnnnnnnnnnnnnnnnnnnnnnnnnnnnnnnnnnnnnnnnnnnnnnnnnnnnnnnnnnnnnnnnnnnnnnnnnnnnnnnnnnnnnnnnnnnnnnnnnnnnnnnnnnnnnnnnnnnnnnnnnnnnnnnnnnnnnnnnnnnnnnnnnnnnnnnnnnnnnnnnnnnnnnnnnnnnnnnnnnnnnnnnnnnnnnnnnnnnnnnnnnnnnnnnnnnnnnnnnnnnnnnnnnnnnnnnnnnnnnnnnnnnnnnnnnnnnnnnnnnnnnnnnnnnnnnnnnnnnnnnnnnnnnnnnnnnnnnnnnnnnnnnnnnnnnnnnnnnnnnnnnnnnnnnnnnnnnnnnnnnnnnnnnnnnnnnnnnnnnnnnnnnnnnnnnnnnnnnnnnnnnnnnnnnnnnnnnnnnnnnnnnnnnnnnnnnnnnnnnnnnnnnnnnnnnnnnnnnnnnnnnnnnnnnnnnnnnnnnnnnnnnnnnnnnnnnnnnnnnnnnnnnnnnnnnnnnnnnnnnnnnnnnnnnnnnnnnnnnnnnnnnnnnnnnnnnnnnnnnnnnnnnnnnnnnnnnnnnnnnnnnnnnnnnnnnnnnnnnnnnnnnnnnnnnnnnnnnnnnnnnnnnnnnnnnnnnnnnnnnnnnnnnnnnnnnnnnnnnnnnnnnnnnnnnnnnnnnnnnnnnnnnnnnnnnnnnnnnnnnnnnnnnnnnnnnnnnnnnnnnnnnnnnnnnnnnnnnnnnnnnnnnnnnnnnnnnnnnnnnnnnnnnnnnnnnnnnnnnnnnnnnnnnnnnnnnnnnnnnnnnnnnnnnnnnnnnnnnnnnnnnnnnnnnnnnnnnnnnnnnnnnnnnnnnnnnnnnnnnnnnnnnnnnnnnnnnnnnnnnnnnnnnnnnnnnnnnnnnnnnnnnnnnnnnnnnnnnnnnnnnnnnnnnnnnnnnnnnnnnnnnnnnnnnnnnnnnnnnnnnnnnnnnnnnnnnnnnnnnnnnnnnnnnnnnnnnnnnnnnnnnnnnnnnnnnnnnnnnnnnnnnnnnnnnnnnnnnnnnnnnnnnnnnnnnnnnnnnnnnnnnnnnnnnnnnnnnnnnnnnnnnnnnnnnnnnnnnnnnnnnnnnnnnnnnnnnnnnnnnnnnnnnnnnnnnnnnnnnnnnnnnnnnnnnnnnnnnnnnnnnnnnnnnnnnnnnnnnnnnnnnnnnnnnnnnnnnnnnnnnnnnnnnnnnnnnnnnnnnnnnnnnnnnnnnnnnnnnnnnnnnnnnnnnnnnnnnnnnnnnnnnnnnnnnnnnnnnnnnnnnnnnnnnnnnnnnnnnnnnnnnnnnnnnnnnnnnnnnnnnnnnnnnnnnnnnnnnnnnnnnnnnnnnnnnnnnnnnnnnnnnnnnnnnnnnnnnnnnnnnnnnnnnnnnnnnnnnnnnnnnnnnnnnnnnnnnnnnnnnnnnnnnnnnnnnnnnnnnnnnnnnnnnnnnnnnnnnnnnnnnnnnnnnnnnnnnnnnnnnnnnnnnnnnnnnnnnnnnnnnnnnnnnnnnnnnnnnnnnnnnnnnnnnnnnnnnnnnnnnnnnnnnnnnnnnnnnnnnnnnnnnnnnnnnnnnnnnnnnnnnnnnnnnnnnnnnnnnnnnnnnnnnnnnnnnnnnnnnnnnnnnnnnnnnnnnnnnnnnnnnnnnnnnnnnnnnnnnnnnnnnnnnnnnnnnnnnnnnnnnnnnnnnnnnnnnnnnnnnnnnnnnnnnnnnnnnnnnnnnnnnnnnnnnnnnnnnnnnnnnnnnnnnnnnnnnnnnnnnnnnnnnnnnnnnnnnnnnnnnnnnnnnnnnnnnnnnnnnnnnnnnnnnnnnnnnnnnnnnnnnnnnnnnnnnnnnnnnnnnnnnnnnnnnnnnnnnnnnnnnnnnnnnnnnnnnnnnnnnnnnnnnnnnnnnnnnnnnnnnnnnnnnnnnnnnnnnnnnnnnnnnnnnnnnnnnnnnnnnnnnnnnnnnnnnnnnnnnnnnnnnnnnnnnnnnnnnnnnnnnnnnnnnnnnnnnnnnnnnnnnnnnnnnnnnnnnnnnnnnnnnnnnnnnnnnnnnnnnnnnnnnnnnnnnnnnnnnnnnnnnnnnnnnnnnnnnnnnnnnnnnnnnnnnnnnnnnnnnnnnnnnnnnnnnnnnnnnnnnnnnnnnnnnnnnnnnnnnnnnnnnnnnnnnnnnnnnnnnnnnnnnnnnnnnnnnnnnnnnnnnnnnnnnnnnnnnnnnnnnnnnnnnnnnnnnnnnnnnnnnnnnnnnnnnnnnnnnnnnnnnnnnnnnnnnnnnnnnnnnnnnnnnnnnnnnnnnnnnnnnnnnnnnnnnnnnnnnnnnnnnnnnnnnnnnnnnnnnnnnnnnnnnnnnnnnnnnnnnnnnnnnnnnnnnnnnnnnnnnnnnnnnnnnnnnnnnnnnnnnnnnnnnnnnnnnnnnnnnnnnnnnnnnnnnnnnnnnnnnnnnnnnnnnnnnnnnnnnnnnnnnnnnnnnnnnnnnnnnnnnnnnnnnnnnnnnnnnnnnnnnnnnnnnnnnnnnnnnnnnnnnnnnnnnnnnnnnnnnnnnnnnnnnnnnnnnnnnnnnnnnnnnnnnnnnnnnnnnnnnnnnnnnnnnnnnnnnnnnnnnnnnnnnnnnnnnnnnnnnnnnnnnnnnnnnnnnnnnnnnnnnnnnnnnnnnnnnnnnnnnnnnnnnnnnnnnnnnnnnnnnnnnnnnnnnnnnnnnnnnnnnnnnnnnnnnnnnnnnnnnnnnnnnnnnnnnnnnnnnnnnnnnnnnnnnnnnnnnnnnnnnnnnnnnnnnnnnnnnnnnnnnnnnnnnnnnnnnnnnnnnnnnnnnnnnnnnnnnnnnnnnnnnnnnnnnnnnnnnnnnnnnnnnnnnnnnnnnnnnnnnnnnnnnnnnnnnnnnactgcaatctccattaaaaagcttggatctgatttgtgttagctagctattcctgatcatgaggccaggcctggagtatggatgatgtagccagtgtcactccatgaaaacaatttggtgtgcccctctctcaccagctgtcaatttcagatagctttttggctaggggagggactttgtgcctacttctcctctgtgctgggattttgtctggtctgaacttgtatagaacgagtgcgtgctgacacagggtctgtgagttcatatatgcacccaccccattgtgtctggaaaactcagtttatttgaaattgttgaccacctgtggctcataatcctcttctggaatgttcctcagccttgagggaggtttgtgatagagatcccagttagggatgaggattccaaagtcattcattgtattagtcaggattcgctaagtaactgaactgatagtatgatgttgtgtgtctcacacacacacacacacacacacacacacacacacacacacacaaaccatatgggatttatttgagtggtttacatgtggtgcaagaggtccagcaatgtctgtctcctggtggaaagaccaatgattctggaattgtttagtccacaagacagtatgtttcaacaatcctagtctggtactggagtcgtagggaaatcctataaggctgacagttttctaacaccaatgaacaaatggctcagtgaagcgagggcaagcagacagaaaacaggagcttcctcatcccttgtgctttcatatgggcttcgaccagatgacaggggcccagaattagggtggcccttctgacctcaaatgaaccagatttagggtgagtctcccaccttaaatgatctaaccaagaaaaatctctctcagcgcacacagctgtttgggttttagttacttccaaatgtggtcaagttgatagttaagattagtcacctacccttcacacgaagtctgtgtgtcaaataccatcgatagcaagaagcaacttctttggtaagtgttgagtggtgtgtagatctaaagatatgacagtataccgtcagcagttgttttattgctacgttcttttagcaagataatagtagtaagttgtcccctagaatccatgacctatctatcagggctctggggaaccattttttaaaaaagattttcacatttatattatgtgcatgtttcctttatatgtatggatgtatactactagtgggcagtgtgtatgccttgggtcctcagaggccagaaaaggatgtcaaatctcatggatttgtagctacagatggccgtgagacactatatagatgctgggaactgaactaaggtcctctggaagagcagcaggctctcttaaccactgagccacaccttcagctcataagaagtaaaactacagttttcacaccaacttgaacatgggaactgtattttacttattttagcaatcccagtatccagcacaaatttcaacaccgcttgcattgttccaaccaaggatattcagaaatgtcctgaaagatgcatctcaaagttggacattgattgtgtagagttggaagaaggtactgttggcaatatggcaaaaatattaagtaaataaagttcattattcagtagagagtggtaaaagactatgctaaaacagtgtctttttggactgaaaggaccacatagtggacagaatagcctggaccctttctatttggcaaaggcaccccaggaacaaaaaagtgcatcaaagagaagagcctccaggctgtgttgactatctccatgattatttacggcgtacctataccatggataacaatcaaaatcacatggcccttgattttctcatctgaaaattggaacatgaacacttaccagatgtccctgtcaatggaaaattgtcattgtggctagaggccatctgtctggtgcagaggccattcaagaacagccataaagagagttgggcactctccagcttggcacagaggccagacactggtgcacaataaagcccttgcttctgaacactggagccagtccagaccatgttgttgattcaatcaccatttggttaggggtaggtgatttctttttcatagtgcctggttgtaatgtccaattatttgaggtgtgactatacaggaaatctcagccactaaatccatttttagataaggacccgccatgcagctgtcagccatatttgtagatgatggttgagaaattggagagatgagatatggtctggatctagcttctgttttgataagcacagcaggacttattttccccccacaccctccttgggaaagtagaaattagcaaagcttgaagggctccctgctctgcatgaatttggggaataaaaatgtaaaagaaaatccattgaaatagtctcttgattggaatgtgatgatacaatttttgtggatggaagattctacactaggctatggcactcattcgttatggttactttgtttccatttggaagaagaaaccacaactaagagagtttaaacaagtcaccctgctctcaaatcttttcaggggtagccagatggcaagccaggctctctacctctacagtagtatttcaccatactctgcagcctgccctattgggaaattacatggcaggatgaaatagcactcacttggtggagaagtgggtttagatagctctctcagtgtggaagggaatggaggggattcctcagagacagcggttaagtttagtattttatttgtggatttacccattttgtcttggagtccattaccctagcttggacttaggtaatgtcacatattttaaaatgtgatattattctatttctcttaaataagcagcagttattatctgtggagtctcagaaactctattgtgtatctcccaagaaaacatatagcagttagcattttctatgagaaattcatggactctctttaaaattatcctggtctacctacctctgtacccacctccaaggtcaacaaatctctttctttaaatctgattttgacaaatttccggccacatacataatctttagtctgctaatatttacattggtgacaaatcttgtattaaaaagtcatttgaattttctgtctatccagcaagaatttcctggttatatgatattgataatttctattttgcttatcattatatttctaaggtgtgactatgtggtatagtttatatagttcttgtgctcaatatttgtttcagaaaattatagataaaaagtttgggaatgaatctcatacaatagaacaaattgttattggaaagaatttgtatttctccattatatataacattattccatctcttattaagttaaggaagtttgcctctagtttaatttcctaagaattatttttaaaattgtaagactacattagaccttataaattttactttatgcattaagataattttataatttttcttttatgattcatcagtgtggtgagttactgtggtaagccatctaagaggaaactgttcttgcatccctgaggtaaagcctacacattgtgatatatgaccctcattctatcgtgatttattattatttctaaatacactatagaatcatgcaaaataatacttaggatttttgaatctatgcttagaagttaaatgtcctatagtcttcttaaactgataacatctagtttcagaatccagtttataataatttttatttgaaaacttcccgtcagtcttctttgctcatgactatggtgttatattgttagatcttagaaatattcaaattaatctagaattttttttctaattagtgaacttagtattttcacattcattacagcttctgtactattagcatgtaccatttctattttctatactttaaaaatattattttcttattctccatagagatgtccaaatttatctggcttagagataaaatatctatttctgttttcatattaagaatgaaggtggtgctctgctttaaggttgaactgaggtttcttttctgcaccgggttattacatttatctatcgtcttttttgagttgactattcctcatatcaaaatccccaatctgaaatgtccacagatcacaaaatttttaaatgttgatgataccgcaagtgggaggtgtcattcctgagctcatgtgacagacttaggaccagtacagatacactaaaaatattgcctaaaattgccttcagggtctgtgtaagatgtagaacgtgcataagggaacctggatttcattatcaagatagtttgttatatatgccagtgttctaagatctgaaaagaatctgagatttacagtgcttttggtcccacacatctgagagaagattgcctggacctctgtgttcctctttttacaatagtagcaacagtgcaattaagtgccctctggagttcccctaggaccacacaaaacgttattacatacaaagtgtgattaatataaattatattttttgaacttgtgcaagtgtgccgatagtttgttctggaggaattttcttttcccaggtttaagaaaatccccgtaataaacttgatccccgtgtgtgacagacatcctctagtgtttcctgtgacatcctcccaggagcactttccgttcaaatacttcctccaagagcaatgctcatgtggggctttgtaggccctgtgatatttttgttatactacaatatttgaatgacagttgggcttgctttaaagcgacaggttcagggtgcaggagacgtcagttcctaccaatgctctgctgctcactggctgtgttcccttaatacatgacaggttcatgttaatattttacaaatatttcctccctgtctgaatctataatttcactgtgaggcagaacactgccacagcaagtcgctattttgattgctttgtggagctcattatgctgggtctgtggagagacaaataaaaaaaaaatcttaattcatggtgttagaataagacaaccaaaatgtgagcaatgctataggaagggccttctgtttctcctgaggactctgcgacatctggagaaccagttcatttcataaactcagaaaccgagatgagaatagttgcatggaatatttgagggaacacagccagtgatcgggagagcactggtgggaactcacaccccctgcaggcaagccagtcccggtgggaggacacttcccagtaaagcccgaggctctgtgacactgccacctgctctgctagtccaggttgtggtatgtcgtccctgcagcaggtcagcaagtcccttccttcatcatggtgatctaggatggtttggagtgagggctgataatctatctaggagtgaggcttctctattggattattgtgttgtgtgaccagtgtttctcctcaagacctctcctcaagcagaccatccattagaggtgtaatttataacttgattaggtgaagttttactgggggtttagcatactctctgtcttacataggcacaaagataaagcctccatgaggtgcctacagcgtcatgtggcagttacacatgatgtaaacaacgggcataatgccctaggaacagagagaaggggactgatcatttctaggccaggaagttcagggggtgagtcacaaaattgttttgcctgccatggcgttattggtaggaccttgatgaaagaaatggggttgggtttctcttcagatggggaagacagggagagagtaccagcaggtgaggccaataagttaaaaaaaaagtccgggcgtggtggcacacgcctttaatcccagcactcgggaggcagaggcaggtggatttctgagttcaaggccagcctagtctacagagtgagttccaggacagccagggctacacagagaaaccctgtttcggaaccaaaaaaaaaaaaaaaagagcttgcaactggctcactgtgaaaggttttagtgtctcagctctgtggctaaagggtggtactggagtgtgaacctcaggcttacccattccagtcaagtgctaccttactgagcgatagtcctttagggcaaggcttttaacactggagaatgaaggatcagacccagaatgcattagatcactctgaggcaccatggaaggcaaaccagcaaggactctggactaccccgggggtataaccatatgatcttgacctgaaagtaactgggtcactggaatggagcctatgagtctgtttcagacacacagtggcagaatgtagccccatactgtatgtactgcggatggggaatccattactctttctttgagaggctttccattagccgtgttggggtcctaggattatgataagctggtactcctaaatccattaagtcacctttgggaaatcagcttcagttaagaagcctgagtgtctctgtttcttctttgagtgagtcggttccccctttctgtgtacataaccaaccgtctgaaacagggacccctatatttaaacaatattacatgccgccattttgccagggactggggccaggggaggagccgttacattttaaagtggaataaacagaaaagcaacaccgagaacgaggaggctggttagtgaggcttgaagagagggcaggtgtttcctcccatggtgagaatagtgacccctgggaatcgcatttcccgtcgagctgggaccaatggtaaggtcagtcctgtaaatggcctgatagtgtggaactgtatgtgagtgccagagaaagctcggtgctgtctgtattatcctttggacccctcatcgctcaaggagcgctgatccttgacctcatggtccacccttttgcgttcagactctcatgctcctcctatgtggcataacaccgtggctgtgtgcaaatggccgtggcctcctgtgctgtatggtggttagtcccaattggctggccctgtgtctcaagcactctccagccagtgggggccttgggggtgcacacagtgggttgacaggcggtgttgctgaagaaaaaaaagtacagctctgcctgaggtaggaggatgtgatgacgtggcccctctcagcgggaactcgggcctttaaaaagctgaagaaacagcctcagagtaaacggtggttccacgggaggaaagcacgcccagtcacattaaagaagccaaactgtctgcttcaaagagaaaaggcaacatcctgtcacaagccatgctctggcaaaaatgtaagtgctttgcttgtggctgtcagagccaagtaagcagaggcagggtccaggaatagagagctactgttggtgatgggagcacccagtctcgtcagggcctcgggggcatggagggctgaggtgggtgagatggagcctgttggagatgatgctcattttccaacctgggggaatgaaccagtgtcccaaggtggggacagctcattgcatctccgattctgtgcatgaatcactgaggtgacagaagggcagattatgattcatgagacggaaaccacatatgatatgggttaggagccgttcttcacgtgaggacctttcctttcatggaccccagttctgcaggttgttattgagttttgttggcccacttctagctgaattctgccagagttggttccctcctgtagatgtgtaggatggggtagaaactcagtcttatgaaacatctctctctctctctctctctctctctctctctcctcttttcaatttcttccttgttctgtggcaatggttggttttgtgttccactgcaaaaaaaaaactgtttatctttgaccttgatttttaatccctggacttgaatggaacaaaccatgaactgtattttccattctgtggattgaaaagaatcttgtgttatcgataacggaggctatatagacattctttacaacattcctttcacgaggcaaacaaagtcaactcaagagtcttgcaaaaggggaaccttattaaggctcaggactgtacttcctcaagcaaagagctataatttccctatctttctttgtaagatgtttaattccataaaacatcttttattggtttaggcatagcattcctcaatcaaatttatgtgataatccagattagaagaaaaagaaatcgtggttttacttataaaaagtaatctgacaatagtgttccattgattagagtgtgacatagtccccttatcacccacctattcccaaattctttgaaattgactcttttcatctgtgactcagagaagcaatcccaacgtgcctcagtttactaaccccattgttgatatgggcaagacttttttgtttaaataaaaataaatgaactttgatttggacttgagatttctgaccacagattctagtttgggtagcttaggactcatccaaaaaggtgaccagagcaaaaccttatctttctggaagcggagtggcagccaacaccattgtaaatactatgagattgtaggaacatggattttaatgtccttcaaagtgccaatatgccctcttgcttcaagtgaaatcaattgagttttgtgtgagctgcttttagtttttaaactcttagagtttgcatatttagaatggagtgaaaagtaatcccaccatgtataactgctcttaataagttgacggggcggccagaatgctgccgggtgctctgccctggtgttagccctgaggtatgggctgtttgcctgtatgaaaaagcccccatagcatctcattgttacgtaatccattttctctcctccagtgcctcttaagggatgaacagattttctttttgagagttgttagaggtcttgcttcttgctcataaactctcttaaactgtcttttgggggcttgaaggaaaacaagagcaggccttgtgcaacagacctatccctttaccctggtcatatggctgactaagacttgtgggaagtgagtgaagtctaggcagtgccagcgcaggcggggagggcagggtttgaaatcagacactgggagtgctgaaaaggcactttctttttttcagaaaacgcccttcaggcttgagctaaaatgactgtacccagggcgttggagagagttaagaaaacaatcatattgcccctgttgcctcctgcctgcttggcctctgactcctgttagtggactcatgggggaacacaggctttggttaagatgggagaacagtgtgacaaagctcagaactgttcacattgagatgtggaaacctggaggtcccagccctggctatgaggtcctctccactgtcagccagataaagatgttggtccatcttcagactttctccttaggttctgcatttgtagtgccaaggaagtgtttgatcccccttcatctcctatcccaagataggagcccatctgatgcaactcacagcagagtctttattcgagctagcttaatcaacccaactccctgtacaccatcatcatggggcaaggctttatagtaagcatcgaattggaaagctattgtgaccttcaacataattggctggtgctgggagtcatatcataaacttaacttctgctttccgctgcattggtggtcgttaggcagaaggcaggcttgttatctgggggtgcaggtttgttgcgggggaataacctggagatgctggtcttcttggggattagcctggagactggagctaggctctggttttgctggggggcaacttggaaacgaatgctaggtaccggcctgttagtttacctgagttcaaactttagatctctagaatggagtctgaatttaaaagatttggcctcttacatgagagacgtctctgtctcatgtagatgagaactagtgtgcacagggttgcatgtgacaattggctctgcagctgagtaatgtcatctcttcttcactcttaatgtggagatttgaacgtgtgcctatcaaagtgtctgtgacaatctaagtaaggaatgtaactgcctctggccagtattgtctgacgtactgggatgccagcttgggttttatgttaaccgttggttatagtccactatattctgtatgcaagcagtctccaaaaagtttgctctttctctgctaattagaaagataggctcatatacaaagtcacgtgttggggcgtggtggcacactcctttaatcccagcacttgggaggcagaggcaggcagatttctgagttcaaggccagcctggtctacaaagtgagttccaggacagccagggctacacagagaaaccctgtcttgaaaaacaaaaaaacaaaaaaccaaccaaccaaccaaacaaaaaaaccaaagtcatgtgtttcatcatggcatcttcctacatatgtgtcatcatgcttcttggtcttcctctgtccccacccacgtgccccttcctttgctaaactgatgtagacacaattcttaccatggtttccattaaaattttaagatagagagaacactgcaacaattaaatttcacatgagttaacatgccagctgtctgacaactttttagagctgtaggtttgcttaaagcgacaaaaaacaaacaaaaacaaaacaaaacaaagaagccccaaacaagaaaatgatgtaaaatcacactgtgccatcccagcacacacttagtctttgttctagagtctgagtccagcaaagcactaacttgcttacatgtgaaacactaacttctaaattcgaatcatacatcctcaaatggaattgaccaatattacttgtgtgaaaaacatgtatttttttcagttcaaggtcatattttaaactcttattaaggtttcaaaaatggagattattttatctagatgtaattttttttgaaaggttgaacttaggaaaaaaaaatgaatgtagctgaagtgaaactcaagtccccaataagcaagtcagagtgatcagtcagtgtcccattaggctatgccaacgtccttcctgcacattgtttcctatactttaaacacttccagtccaaaaattcttgggtgatagaatctaacaacattttcaaaggtctacaacataggcgtgcttatatggcctatgagccaaatcaggcttattgtctatttttgcaatttaagttttattggaacacagctatgtttattgacttgcatattttacagggccgtttttgctatagcagcagagctctgcatctgtaatgttacttgtatggtcctatcttgccctttatagaagtttgttcacttctagacttagatgcctggttgatacttgagacattcatttctctgggtttctttggacttgtatagtgttagcatcaatgttagataaagcacgcagatagttaattcaacgttttgttaatgacatgaatctaattaaaaatctttcttagaaacgatggaataatgtaaaataaattcaatatctcttgttgggaagtgttgtgaacatgaagatgagattttaatcattgcttcttgtattaggggaagatctgtgtgatagtgagaggtgaggttaactaatttttctttgcattgactgtctcatgtcccctggagttggccatgttatgttttaactgtattaagttaggggccctttaagaacaggaactagttattaccaaaccattatgcccatgtgcctttgtcagacaactggagcatatcaaagggttaacagataaattgggaactcacaattctcacaaatagtgaagtctgcctttaggatttaacctaaggtttcactagctaggaaatataattttaagggtagttaaaaagactcagggctatacatgtaacttttgaaaccttgaaatctcatgcataaactcagttatatttataacaggaagtaatttaaactattgtggaaacctctaacttttctattctatgatacagcctttgctcaattagcttagtaaagaccttccttacggagtttatgaggagtcattggtttgtaatgctaacagtaagtggagtccaaaggagagctgtagagagtcacaggttcctcgtgcaggtgaaatgggggtagcctggggaagatacgtgtctctcaggctctggcagtctctttacctgggaagacaagaacaaatgtctagcaagccaatgaaagaaccagatacacagttctacacaaggttgcaggtattatgagttcatttgattcattgaaaggagcatgggtcacccccaaatctctatcactaacaacttctaccctagcaagagtaatgacctccctaaatctgagcagtggaggcccctttagttaatcctttacttcttataagctccgccaagcacctcctgcgatgaattctcattgggaaagaattacatacagctggaggggaggggtcaggagttaggtgaggatgtaatggcctttcctgtcctctccttctatgatagaatgtgaacaggctcagtcttgtaggggtcacatggacaatcacagatgctctgattaaaatgggatcagctgtgtgattgcccagagtggtccccccccttttttttttttttttttgtctgtttgtttttgttttttgtttttcgagacagggtttctctgtgtagccctggctgtcctggaactcactctgtagatcaggctggccttgaactcagaaatctgcctgcctctgcctcccaagtgctgggattaaaggcgtgcaccaccactgctgggcggtgttattgcccagagaacactgttccacaacacaaaagtgaagtttaattggtaaaagagcaaatggtattcatggtggacattttccttgtcttcctatatttactagagatgtcaaatatgtattcctaattctcaatatttaccaattcaaaagtgttgaaaatggtccttcggttcagatctgcaactctgttcttttatgaagaataaagaattaaagttgtcgacacttgttcactaaatgtctggatgttgtatttattaagaagttcttaaatgtttgctttttagctttcccagtacaaagtaggtgtatcaggtcccctccccctggcttcccgacagtagcttagtttccaatgaaatgaaggtgctggataatttttcttgctctccaaaccaaggtgggtaattgattataaaagttattagtataactttcccgctagagcatccttagtaactcccctagttttctcagttttaggaagaacctcttggtcagagtgggactgccttgaatgaaagcaccttctccccagtaccttggttgtgtgaggctgtgtgaggctgtgaacagacacattatccctgcatttgtgattatacttcccagtctacagctaaacaggcttgggactttccagccactaccaaaccactatgggactagtcttttcctagctaagattagatagattgaactcaatcgctacttgctgagttttcatatatatatctatatctatctatctatctatatatatacacacatatatatgtatacacacacacacacacacacacacacacatatatatatatatatatatatatatatatatatatatatatataacatatatatatctttgtttatatatataaacaaggatttgtaagttaatagaaaggagtcttgtatctatccagagtgttcttttcaacattggctaaatactgagatgtctgggacgagatttaaggaatatcaataacttgatcccacctcagagcttctaattaagttgcccaggaacaggaattaagtatacatcgagatgtagtttttctttgtgggttatggtacttgttaactactgtgctcagcaggaggtaacagccaattttcaatgcaacttgaattagaaaaggatatgagaataaagattatttaagctttctaggcctgggaaatgttgagatagaaaagagaggcaagagaggtagaaataggagcaggtttcaatcatcttttcattatgccttgcttgcatatacttgtttactctgtatttcccatccaatagggtgacttctagaaattaaagaactatgagcgaacctcttcctcatcttcttcttcctgggtgatttactagtgctgatagctgaatcttgactcttttttttttttttttttttttttagtcttaactctttattagtaggataatgactccccaagcaacttacagagtggaggtagggtctagaacttaattatgaaaatattgactctttgtactagtattaacagaaagtgctccgttcttctgatagttttaaatggcagttgtggggtatgtacacttggtgccactcagaacatgaaatcattttggggggctactttgggcgatatttggttgctaatatagagatgtgacataacgtaagtttaagtaagattgtggactgtacgttttactacatagaagtccgtagtagccttcccagaatcctatggtctctgtactgccaacaatatttgggttcatttttgtctttcattcttatgtctttgtcatatgatatttgttctcaaaatttcctgattgtcactgtaacttgacccactgcatcaatgatcatcaaatcttgaaataagaacaaggaaaaagatctatctatctatctatctatctatctatctatctatctaataactgtaccttctcctaacagacaacctcttctgacatattaaggccactccagctacaaaggagaagatgtgacaacagccagtctttgctgtactttgtactatttaatctacttctcataatctctacattaaccatgatctgggtcctgttacaagaacctcctcattgatgagaaaactgtagcttaaatgttatattagtaacttacctataagataaaattcatctaaagcagacccaaaataccaacttgccaagctgcccggtctcctgccagatgtacatggtgaaaggcaaggctttccatgttagataaaggccaactgtgagatgaaatataacagaccctcagaatgcgtttgtgatgtgtttacttactggagagaaatttataatgagtagggtttttatttagagccacaaagggatattgctgctcttagtttgctttgaggagtttgaaggccagtgccagtgccagggtcaagcagatatgaatttgagacctagacctatctatattttactgtttgtgatgctggtaagtccctgctctttctgcatacaccaaggatgtggttcttccttcatgggttgtggtgggtgtttatgaccatgcttgacagtaagtaaacacccaataagttcttgttactattattgtattctctcattgaggacagaggctatgcaggttaattatagattacaatttgtgagtcattcatagtgaagtggtagggtgcatatacatggccatgtaattaagaatgagacctgggatcagggttaatgctgatggctaaggtgatctgtttgagactcacttgttcatgacttcctgactaccttcatcaggtagtatgaggcttgtgactggcaaacttgtgtttgtttttaattcacaaatttggaccaaggtatttataaattgggtgtgaggagaacaatacttaaaatagtcaagaaatagcactaatgatactgaaaaccgaaacaccaatgtgttgcctcaggttcttagtaatggtttcattagtactactttctgggaaaagctggcagctaaagaattataagccagaatcattttcagactaggtgctagtgcccaaaaggagtctcccacccttcaggaaagctcaattaccttttaatctattagaatcaagctttaactgggaggggaaataataatatagacatgataataaatataaataataaagtaatgacaaatgttgaggagctgaaaagaaaagaatgagaaaaagagtagaaaattgcaagttgatgaaagctttgtcagctcaggagagaagagtgtagaaagacagtcaacccatcttttcattatgctgtgcttgtgtgtactcatacaggcgtccagtctagtgttggaactcctatagtaatgaagcaatggaataaaatgtcttcagcaaaggggaagataggaccagtgatgatggcatggaacatttgtaggatatgaaggacacatgatgataatcaagttcattgcttagattctgggaaatatactggcatctgagcatttgaatagaaatccaaggatgtctaggctgatgcacataaatgttgtaattccttctataccttcctaatgctataacccttaaatacaattcctcatgttgtggtgattccaagccataaaattatttcattgctctacttcagaattgttattttgatactgttatgaattgtaatgtaaatatctgatatgtaggatagctgatatgtgactataaaggggttgaaacccactggttaagatccaccactctcttcaaatcaattctcttgcaggagtccaacatcaatcaagatgaaggatctctgggataaggatgcttagagcttggtttgtttgttaatgtcccgattttcttgcctctgtaggcacttgctggcatcataattgtgtctagggttctaaccagcccttcacttctttggctaagagccctggtagctagtcacaggttcttggcttacagagtgagtctctgtgaagcactgtctcgattttcatgaagtgttgcagctgtgaaagttatgtcttcagtcatgtgagtttcttgtgaattagggagtaggcaatttcctaaaatatgacttagcgacatatttatcagacttgatattctaataaccactcttctaatgtccctcatgaggtagtctcccatatcctgagagccactggttagtaaacccgagaattgtcccaaaagctcatcttgtctacaagttatgtttttcttcatgagtcagtcatcaggactaactttacatgtggaccaaaaccttatgctagtcataagccttgaggcttgggtagttggatccgacccttaaatacaacccctgctgcttctaaaaatccttgaagagagtagtcctaatccaagaatctcaggaaaaaatatttcttttgtaagactgtctttagccttgaaagtctaaacaatgagttgcttaagtctagaaactgagtatccttctgcatcttcaagctgcctaacaacagtttcttcctgacctatatcagatagagccaatagttctagattcgggtctttgtttagtaaagaaagatgtattccattcctatgctccatccctccttgtggagttgctttcctggagaagttaggtttgcaatggatggttaagtgtaatgtgggacagatgctcatagttctcaaggccgtttaacccccaccttgaggctgctgctctctgtgaagctgaggtttccagtgtgtgagccaggagtctaccttgctctaacaggtgacacaacacctacagcccccaaacactacattctagaattgtattccattgtgtatatagccacatatttacttcatcccgactcattgatatctacaacccagcctcagctgtggctatgtccatgtctttttagagacacctacagattccttaagggctggttaacagtagagatcaggacaaagataagccgttgtactctgtctcctacctaactgctagcattcaaaagttttcaaggtatttactcttaggtgcaacttttaaaaattccttaaatataccataaacccccatttatctggtgggttctgaagatagaactatgctctgctcatacaagttttacaaaagccaaggctttggtttcctgttcagggttgctgtctttaagtgaggtctttggtcaatccctggtcatggctgactaaaacctatttaggttttccttggggactttaggcccatggacttgaaggtgactttcaggatcataataaagacaaagggagacagactttgtaggtcgcagagtcctggatatgtccagatatttagtctcagtatgtaacaagatgtgctgagctatagtgacttttacttggtacctattgtatgccacatgtgttaggtaatacacaatctttataatagctccttgagacagacaatattattctcattttacaagtagagaaactgaggcttccactagtaagttacttgttgagggtaacacaggtgttaagcaatgtagcaagctttccaaactaggtctgcctgatcctaaccctgcaccacaccacaccacacctatatatcagtgcgaagggatcttgaagggtactggattttcattccactttcaattgaaataggtccaccctagatggaggtgggctatgagttcatcaaggctaactctacactgactcaaacatcactgcaaatttgagtatcagaaggagatactgaatggatagagctccgtcggtaaagcgcttgccgtgctaggatgagtactgagtttggcatggtatcgtgtgcatataatcctagtcctaggaaggttgaaacaagacagatccctggagatcctctggctcgtcagcctagctgaatcagtacgttctaggccagtgagacaccctacctcaagaagaaaacaaaacaactaaggtagacagcatgtaggttgacatgtacacacacacacacacacacacacacacacacacacacttactccctgtgtccttcacagacatgcacatacaagaaaagaattaaaagacattaatacttgagatgattagagattctgaatctagacgatgttcatcttataatgactccttggggctgttcttctgataagctgatcagccaagggcagagagcagttggtgaaacttcctgaggagtcacagagggtctgtcactttgtgtatcttggcagagactgatactttcatactcatggtatggcctgagccactgaccccaggtcattctctacattggagagagaccatctgccttgcttctaacctctctcctctttatatatctctagagacagcttgctgctttttcaagcattaatgagtcaggtagaggcggaagtcaaaactcttcaggtctgaagcagctacagcttcattacaattcatttgcttgtgtgatgatttcattaaagtctgcatatgacacctgagtggactgaaagtcgccaatggcagagatctagtctgatctgttcaacaagtatttgctagataaatggtctactagatgtttcttggtcttgaccctgaattggagatgtggtgtatttgagatgggaaccttttctgctctggtgaccttagtttctataaaaggcaagcagatgcagctggcttctcaggtggactcatctgctctcatttcaatagaaaaatacccaaaataaaaccttgccaggaatcgagtctctcggttcttgtcactcctcatgtgagtagacttttggcaaattttttgtggaagactctctgacctcaaaaccaccattttcttttttggagaattggccatcaagaggatcacatagtccaagccagtactccaactgaaggaaggatggttaggattggcccaaggaccttcaaggccacatagagaaaaaatgagacatatagaggcaagaagaaggtatgtggtgaagcaaaaatgggctgtgttggagtcagaggtcctaaatttggtcaatgacatcactactgttccttggaaagttcactaaatatcttttaagcatcaccttcttcatcactaaaagaagggatggagagtagactagattctttgtctgtttcagaggttatagtgcagcccccccccctcaatatcctttatgtcagaggctctgagaaccacaaccacagaacttaatgaaaatgtaggtgaggatttctgagtttctgggagttacaattatgttttggaaacacatgggctgttaccactcaataattcaacattaaattggtgtgcatacagaagaggtatctgcagcaacttcctgtacctgctagtcctcagtagattggaaagagagtggacaagtggcatgcctagtacagttgggaaaggaatcttgggcagtggggtttgtgtgttaaggaacattgccacacagaaagttcccacaccaccagcccgtggctaactttgcttgaggccctggtgaaggacagctataattcaaggcttccacaaagaaacaccataggcagaagttgggtaagtcaggatgagccatgtataaatgagctttcttgagaggcataggcatgaccctggctgttgattctctgatctccatggttttcatgagacagcatcatgctcaaataactttgatctgaggcttgggattctaaaactgcagtcacccccagtcagcatcaaaactggctcatgctactcaccactgcccgtcttgtttctaggggccctcttaccatgtccaagtttgaggactttctttgtgactctagccctccttgagattttcccagtggcctcacctgtggctgattttgaacactgaaggactgttgagggagcaacatgcttttttggaagtcttggggagaggaaagaaaattgccagtggtttccttttgtctgactaagccagcttcaaccaccattttgggacctcttaatagagacctctcaggtcagtcactaggaccctcgctgttttctctctgccactctagcagccttacatacggtatcatcctataatccaagtgcagtccattttctctcagatcttcggagcagcttttgggaaggctgtgctcccttcccttgcccctttcacatctctgcttcttctctgccttgagtgttatctagcttgctagaatgtatagatggcacgttnnnnnnnnnnnnnnnnnnnnnnnnnnnnnnnnnnnnnnnnnnnnnnnnnnnnnnnnnnnnnnnnnnnnnnnnnnnnnnnnnnnnnnnnnnnnnnnnnnnnnnnnnnnnnnnnnnnnnnnnnnnnnnnnnnnnnnnnnnnnnnnnnnnnnnnnnnnnnnnnnnnnnnnnnnnnnnnnnnnnnnnnnnnnnnaggaggaggaggaggaggagaagaagaagaagaagaagaagaagaagaagaagaagaagaagaagaagaagaagaagaagaagaagaagaagaagaagaagaagaagaagaaactgagtgggaaagtctttctgtagtatcaagtccttctggccaaagaataaagtcttcctgtttgaaaaaaaatcagccattgtccataaatgaataaatgtgaaaactctgactgagagcttcaccctaagaagaacacctgcagtagcgttttcataaagaatgtgaacaagcctgtggcctccctaaactcatgtttcccagaagatctcagccatctcaggtcagcaacacaaacacgattcttcacattaaagtgtcagcaacttttcagactttgttttcagtagagctaggacaagtttgttagccccaggcttgggacgtcctattgtttgactatttgttttggttttgctacaagtaaagagagtattagtggtcttcctccttaatgagttctattttctttttgataatattgaacaccagcagtgaaaggaaatatcccacagcggtaatctggagtgattcagagggtgtcttacatggtagcatgtcatgtgaccttcacatctaggtgattacttttcaaagtagcccatgtggctaagctgtgaggctctactagttgtgaatggaagcttgagccatctgttgagttgggatggaagggctcctatagatgtgagttctcttgttctttcattccctggtgatgcaaatccatgcttaactatatattacgaagggttttattttattttattttattttattttattttattttatttttggcagagctcttaattgttgtcctgtctgttgattggcccgatgacctatgggaaatctcaagagaacaatggctgaggcaagggtcttctctcagaaaacacctattggacataggctcatttaaagctaaactgaaagacaagttacagatgcttggggctggctactggctctgtagctgagtagcatgtgtgctgtggtttacatggggttgctaaataaacaggtattgtggttctgcataactccttcgtgagattttattgtactttattgaggaacccagagtaccatgcttatttcactcagtagatgcctgtatctctcaggttggtggacagtaagcatagatgccaatgtgcatacaggggctgtggaatgtgtgacctattggcttcaacctgttgcactgtgtgccttcaggtgggtggcagcctctggcctctttttcctgtgatgtacagcatatctgggtgtgtggtgggcgaactgaaatgccctctgctgactgttttaactctagaccattcattgctcatttggaaaaggggtagctctctctgtgaccaaatgtatgggttttgctatcaactaggcttcttaaaagctttttgtccttgaataccactggcaactgatgtccaaaagtaaagaaaagcagcaaggtgaacacctgtccaaagattcccagaggttcatgttcaggtagactgattttccattgtgatggattcttcaagcctacagaagctacaagggtcctcagactaacaaaaggaatgtcagaaagtttccagcctttgccaggatgccgtccagacctgcagtttgactagggagttattaaattctctagttagactttcttctttgccagtagagtattatttcaactttctattttatttccttcatataccatttaaaattgctatcttaaattattttgatatcttgttttaaaagttgcataatgctttagtgcagtcattggaaacttagatcagttcaaggattcagcagcccaaagccaaggtaatcgtggctttggactagttttcttcttccaaatttccatagtgttggtgcaggtcacagttgaggtcatggtgtttgctgactcttgctttccatagattagtgtgaaagatcccaacaacaagttgtcaacttgcaaatactcttttctattgagcttctgagggagatgtctcggggctttggattcagatattttgtcagcactttgaagagacatggtcaaaagcatcctcactcttgcctgctcaggtagagtcagttacaaggctccctgtcagatggcaatggatacagagctgtgggagtttcgcagctgtactagaatcaagtggagacagagatgatcttactgtctctcatgccagtctatacacattgggtctgtgggcagcgccagatatcattcttgcacacatagacaagtcatgcaaacagctcttgtgcagggttgacacgttcagaaggatgattaggggctagaaacatgccactgagaaatttaaacctgcctctgtttcaagataaggaaaacgaagtctagagtcagtatataaatctgggaattttctactaataggtgataggtcatttttgaaagtgggtatttctggctcttatgtctgttgttattgatgctttgagcaaagatgaagatggtctcagggcacagttactatgctggctttttcttatatacactcttatgccagtccaaacctctcatttgttgtattcatctcattggtggggattttattgcttatgttctctggaatacttacaatccatgtgagtagggatcacatccacgtgtccagaaacattctggaagaatgagtatgggagagagattcccttttatgacagtgactactaacatgaggaccatctcctgctggaatgctatagagtggttctagtgttaggttggggatgaagtatcagagctctaaccccagtcatcttcagaaacactgcaagtacttttatacagacagactccttggcttaagtggctcctccaaattatactccatgagaacaagaccccgggtatctgtattttgtatcggtttctagttggttctgttccacggtcagggaagagaccatagcatctatggaaccctaggctgaggtgcttggtcttgactctcactgtctgcctctggggttcattctccctccacttgctggccatgcaaggcttctttgccttccagctttcaagaccagaccatgctggtgctgagagcccagggatcctgcaagaggtcttgtgcagactggggcactgttgttatcagtatcagctgggtgtttactgaacaaagttcagtcaaggcaggcctgtggatccgggttgaacagataccctggcttcctggcctttgatacaaagcgtgcgtccttgggctcttatcagtggaggataatgggctccttgtgtgagtcccagagaccattgcttcttgatcttggatgaccttgatcttagcctacctgccatgggcctttccatctgagagggtaggttgtctctgatctcccaggcaatgacaagccctatgtcctgacttggatttaattgatgatttcttggatttttttgaaaaaagggaaaggaaacattgtcccagtctccacaaggtggatactccagttctaggacgcatgagtcagaggtggatgtttgtctcatgtactgaagataaccaaggacctggaagccaagtttttccccccttagttcattaaccctaaagatccaggagaagtgagaaaagacaaaaggaaggacatttgaaagcactattcacttgatcagttaatgaactgccatgactaagcttacagagagactagacacggtctgccactccagggggcagaaacaacaccatatcttgagaggtttataatctagaaatcattttaaattcacctcaccaaggataactaatcattacctagcaggctatagatttattgaatttgtggggcagagggtgtagctcagttgtagaaacttgtctagcatgtctgacgctctgggctttatccatagcaccaacaaaacaaggagacaagaaaacaaattgcatcaatacccatctgataagaaactagagattgtgaggctcagagtaatttgaggacttcacaggatgccatagctagattgtgactgagaggggattggaatacagttatacctggcttgagagttcttgggctgattagcatcccttactgccacttatgtgaaagctagtcagatctaggtgtgttggagaggtagatgtaggaattccattgcttacagtggtcagagaagttgcccccagatcagaattatgactataaggaatagcaagaaaggtagagaggtgattcacgcaagggtatgcataggagtgtaacgaggccttcttgctagatccagtttatatagcttcagaaaaatgagtttctggtacctttgggaagccctgtcacttttagacataggagagagggcttaattatttgaatttagtagggccacggaatggttggggacagaaggagtcttgggagaaatactctaggaggtctcacagagattcaagttcaagtacaacttagacagtagaggaagtgggcattttgtggttgggggtatctgagaagggccacaagttcaagtgacattccccttcatagccacagctccagagcaagctcctgccccaccaaggccataccagggtgttcgagtcaaggagccagtgaaggagctactgagaagaaagcgtggccataccagcgttggggcagctgggccaccgaccgcggtgaggagctactgtgggctgtgtgactgcagtgtgtgtgtgtgtgcaggtggacttggcagggtggtcagagggataaggcaagagtgtccttctctgactcatgcaccgtctgtggggcatgaaggcggaggattacatggagaaggtggaattggatccaataagctggtggtttgttgggtggtcaggggaatagaggagcttcttgcttttatccataaggaaaaaatctattggtgaggcttcagggagccaattgtacacatcctagtgtgagttgggagttcataaagtttctccaacgtacagccttcttgctaaactgaaatacaaatccctcaaaaatgcaggtggcgatgactggggtgtgggatggcaggttcttccctcatgattctcctatcctgggacccagagagtccctgagagggcttgctgcagatagataaacacccatcctggtcttcttgtccccattctaggtggtactgccccaccagcccctggccacctacagcactgtgggtaagagctctcctacatagtttggtgtctttggggaccccccttctgggggagcctgcacttctgttatttcctttttcccacaggtccttcctgccttgacatggaggtttctgcttccacagtgacagaggagggaacattatgtgctggctggctctcccaacctgccccggccactcttcagccattggctccatggacaccctacacggagtatgtgtcccatgaagctgtcagctgcccctactccactgacatgtacgtgcagcctgtgtgccccagctacacagtggtgggaccctcctcggtgttgacctatgcttctccaccactcatcactaatgtcacggtatgtcacacaaaagtagagatctatccaccaatgctgatacaccctctgagaagatttggttttcttgtctattgatttccatggttactgggtcaattaagttcactgcatcctccagggtgacttgttcctattcctattaactgaaactatttattctccacaaagacactgtatgcttgagttgtcacatcctttacttctgtgggttgggaagatctgttgcttctagcccaaaccttcccagctactctggaagcagtgggtctcagtgagtgaagtttttagtagatgaagtattaggtgaaatctgtgtagggtctgggtttttgtcagttcagataacctagggagtagttgtacacttagcaatgggaactactataatacttccaggctgagcaaaagttaatactagtcatcaagggaactactttggggtctttttttttcatttcttgctgtaacatcaagttacctgtatttatcactctttctctctttcttaatagccctgtgcttagtactttgacctctctgaacccagagtcctcatctataagatgagagagactaacaagatgtttgctattgggatcagatgagctaatacatataggactgtgtttagcacagagacagcactccttaaatgttagttattagcctcatggccatagtctgccaccagtgtcaacaaatgactaccttcacgtgtcaggtaggctgggaggccctctcatccttgatgagtagaggaaaggagttatagttttatatgctgggtggctatgtctccaaaagaatgggaatccctgaaatgcttgtgaggagaggcctaggaagcagtgatgaccagtgccactctggagctctgggcagtacagctggaacctccctagttgtctcagaacccttgcctgagatccccatgtcccctctgtttaccgtcaaggtccagtgtcactctagttctctgcttcaaagcactttcctggcaaagcctcccctgtcatacccacctggatacccaacaaggtgacttggggggtgggtcttgatgccagtgagtaggaaggagttaattgaacagcttccctaggcaactcatttccatagtgggggacctggggtggaggatgtggtggttcacagccttctcactattgaagattctgttcattatttatccccttctatcatctgcaccttccactcagacaggttctgggtatcaaacaaactgtatttattaagaaatgatttgttttgtccttttgtaaattaactcaccaaagctactggctcagcacttctgagcagcagagataagacctgcaattctatcccttggcaaggaaccagccattgccgttgacctgtataggtagaagagtcaaaagtcaaacgtggattttaaaaataatgatagtaaggttctaccaggtcctgtctgctttcaggaatccaggctggggagcaggggctcaccccgaaagagaagaaaccatttatgctgttacactagcctgcatgttgggagcccccagctccattgttcaaatagagaaacttcaggaagccttgcttctcaaactgtaatccccatatcagccaggttagcatcctcagagatctgactggacttgcagaatcccaggccctactccaaacctctaggatcgggattcatattgtgacaaactctcctggaggctgatgaaaattctaatgactaatcgctaaatgactctagcggcttattcttaagatgcagtggcagctgaggagatgacaggggaggatggggatggaaagtggggtttggaaatgtctttcttctgcccatgcagagaacttccttatccattagcttgctgtggaaagataagaacataggccctgcctcgctggcttgaggtttgttcgagtagctgatagttgaatgtgatgtatggtttgtagagtacttgagagaagagccccctgccacagggagcagcagctcagagaaaaggggagagcagggtcaggtaccagacaatagctggatgaggccacaattgcagataaaacagtgctcccatgctacaggaatgctaggcttcctggattggtcagtactagaaaggcaagagctgagtgagttatattaacccatggggacctaaggacgtcaaagctgcttgggaattgttttaattagtgtctcgttgccgtgaatagacaccatgagcatggcaactcttataaaagaaaacatttaattggggctggtttcagaggttttgttcattatcgtcatggtatgaagtatgtcagtatgcaggtaaatatgatactgaaggagccaagagtttctacattttgattcataggtagcagaaggagactgtgaaccatactggctataacttgagcataggagacctcaaagcccacccccacagtgacacagtttctccaacaaggtcatacttactccagcaaggccacgcctcctactagtgcataccctgtgtgccaagcattcaaacatatgagtctatgggtgtcatacctatttaaatctccatattccactctttagcccccataggtttttagctataatacaaaatgcacttagtataactaaaattccccataatctatcatagcctcaacaatttctaaaagttcagtttgaaatgtcttctgagattcatgcaatctcttaactataatcccttttataactaaaagatgactaaaaaaacccagatcacatacttccaacatataacgacacagaatatatactaatattgcaaaagggagcatagtaaagaaatactggaccaaacaaagtaagaccaaaaaataactgggaaaactccaaactctgcatctccgtgtctgacatcaaagcactcttcagatctccaattcctttcagctttgttgagtgcaacacatgtctttatcttgggatggttgcatttcctgttagcagttttcctcagcaggtttcccacagctcttgtgtctctaatatcttggggtctccaaggcagaacaggcttcaccttaatagcttcacacatggtctttctaggcttccatgcagggacacccctgccacacacctggccttagcaacttttcttagtctcagatggagattccataacctcttttatctattcttaactctaaagccagaactacagatgccaagttctgctacttgctggggttggaacctgagacccttgttcaattacatctttgtcagttttctgtttccagtaatgatttcctttactgcctaaacttggctgtcatggaacttgtgctgtagaactcagagatgtgcacatctctgtctcgtgagttccaggattaaaggcatgagccatcatcacacctggacctaaactgttctttaatttcttttcacaagatggacgcttagctatgtgggatcctgccctgaggtcagcactccctcagttccatttaacatcttgaatctgtttatttctatcaacagaggatttagctccattccacttcctggtgccccctttctccttgacccatacattttgtattttttctcgcttagcttgctcctttccatcaaagcactcttcataagagtgaaccacacagagtctatactatactgttttgagatttccttttccagtgcaattaatctaacaagcttcactttagcctcaggcagactcttcagacaaggacaatgagcagccacgttcctcgccaaaatatcacaagaagaattctaggcaaaatattaaaattcttctcctcagctccactgttcttcatgttcttactagtatggcccattaagtccccattaaagcatttaactgcttttctaatctaaagtccaagaatccacaatcttccaaacaaaaacatggccaggtctagcagagcaatacctcagtccgtggtaacaacttctgtcttagttaggatttcactgctgtgaagagataccacgagcatggcaaactcttataaaggaaaacatttaattgtggatggcatacaggttcagaggctcagtccattatcatcttggtgggaagcatggtggcatgtaggcagatgtctagagaaggagctgaaaagttctacagaaggggactgtgtatcccactgggtatagtttgagcataaggagacctcaaagtctacccccatagttgcacacttcctccaataaaaccatatatactacaacaaggacacatttcccaatactgccataccctatgggcctaacattcaaacacatgagtctgcgggaccatacctattcaaaccaccacaggggtctgtgtcacctttctgtctgggcttgatagtagtcatcttcaagaaacagctacaaggctatgagacaggctcattatatatcaagaatatattttgcataatttaagggttttttctttcattttttttgtttttttgcaattagaatatattttatattcagtgaaacctataaggcctttagtttttcaggggtatgacatcattattttctgtaccctctttcatgaaaaagtgaagcttccaagttgggaagtagcagaagcataccgttagaagaggggggaacacagctgaaacgtgtcaagctttctcttctaggagactgagcaggaggaggtggagccccattaagtgtaacaccagtaagggaaggtggggtataatagatcatgatgggggcaaggaggcaggtgggcaccccagttctgctaaccattgctcctatgtttttcatcacagccaagaagcactgctacacccgcggtggggccccagctggagggtcccgagcaccaggcgcccctcacttatttcccgtggcctcagcccctttccacactgcccacctccagcctgcagtatcaacctcctgccccaaccctgtctgggccccagtttgtccagctccccatctctatcccagagccagtccttcaggacatggatgaccccagaagggccatcagctccctgaccattgacaagctgcttctggaggaagaggaaagcaacacgtacgagctcaaccacaccctctccgtggagggcttttagggctggcttgcatctaacagatgtttcacccatagctgagattttaaaagtgttcaatagagcccagacttctgtttgaagtagctatttcacaggcttcctttcttcctaaagctaaattgtatcccttcttttctcccttcttccttccctcgcttccttccttcccccactgccatcttgcttatttcttatttctccttccagttttcttcctctggagcggcaaatgatagtgatattatgaacaacgctttatacggaatgtcaccaagtctgcagctcagggttttcctttggtggcacatcattggggaagcaaccttctttcaggtgccccctgtttcctggtagcagtagctttatagatctactctatgatacgttctgcgccccagttttgttttgtgtgctgttctcagccttggccagatatactatctaagtggatgtttctggtctggttacagggggatgggacaggaccatcagggtgggtagggacagtgagtgagtgatgggagacggggctgaggagcagcaggacacacatgtgtgtctgtggttagagagggagtgaggaggggcaggggaaggagtgatctaacagctctgaaaaaaaataccactttaatgtggtttagctgttcttgtcagcgattaggaggaaagctggatatggtatggaggataaatgacgagtctgcttatttctgcctctctgcaggcccgctaacatgatgccagcacttaaaatacttctgtcagcatattgccatagcaacaggaaaagaaacaggtgaagccgatcattgaggaggcttgcacttagtccttccacgtgggcttttaattcctgttgtgactcacccagggccatcctgacgcgttgctatggattcttgcgcccactcaccggctgtctctggggtcctgaagtcctggtcagcaggcccactggccttcattttcagttttatcagttttattgcagtttttgctggagaagcataacacttgctgttgagtgttttgctgtctcctagtgctttgctcctgaagtggatgtgtctttgggaactggcccattgtttactaatgataccatcattacacatacacaagttttagtctgtagaatccatgtagaaccaatagatcttctagaaatgacagtttctttgatatcccaccctctttctttctgcttccaatgaaaacttagagctacctgttttttttttttcttcttctttctttctctgctttgtgtttattttgattcagacatctcattatctacctgaagtcctggtatacttagcttgaatttgttattcctctttaatatttagattaaatgctagatctgaatggtaggtttacacttctgttggtggttaccatgaacaagaaagggagagggaagcctcagcctatttaattaagaccttgttgcacttaaaaacactatttaagatttcccagctacttgggagtttgaggcaatcacagaggagttaacactgggaaaacaaacaaaacagcaaagaaagtagtgtgagcggttgctgggattgaattggcatctttttcgcttcttatcttgagacctcacgtcttggctgcaggcatccaaacagatttcctccagagcctcatttgcaacattttcaataaagattggttagatgactttcctgtgccgaagtgttttatttctcgtctattaattcctctcacctctcagtagagcgtctttagaggaagaagctttcagtagggctgagcttgcaaactgatctgttgctctaggaggggaaagctgtccccactgtgtctgttgggcaattttcacagtggaatatgtattggttggcgggtttactctccagggcagtgggggcttagagggtgggaggaaatcttgctggcctactgctcttcctgttatctatgctacatgagcgacttctctcgatgcttggtgtctgggcttctaccacaggccttggtgaagctgtcagtcaggaccctggacatgtgacacaaagagagacctgagaaggcagtcatgtcccccacccagactccatccttgcagcaagtaattctttctgaggggtgaccacccagactccatccttgcagcaagtaattctttctgaggggtgattttggaaaaaaaaaagtgcaattatatttattcatttaattattttctgagtttactgccttcattgtccatctttatggagtcatttttgtaaatcatccacgttattctgctgtataattatttccacataccagaatcacttggacaatcagcatcattatttctacacatttacgcacaatttaagagggggaaaggcatagaacagaagggatttgatgggaagagagaagtactggtattttacaggattctcatctgaagctatgcaccttagtgtaaaaggaaccaggagcagacaagggtgttgtcagacaaagtggaccatggagaaagaatcaaagtcacagcagagccatcctaattcttctgaatatcaggctgcactggcctttaagtgggattttgaagttaagttctctctctctctctctctctctctctctctctctctctctctctctctccatccctccctccctccctcccttcctcccttcctcccttcatgtgtaggtatgctcaggtgcctgtgaaggccaaaggtcaatgccaactgtcttcctcagtgtcttccttaatttcttgccactttattattatgtgacagtttctcagggaagctggacttcacaggttcagccagagttgctggccagaaagtctcagccttcctcttttctctgcctcttcagtgctaggattatagctgcatgaggcttagcttggcttttctgagggggctggggttctcagccttgcacaggaagtgctggctgacagagtcatctcctcaacctctgttaccaaacatgagatttttgacaccagaaaacatggctaactttaaaaaataaaacaaaaacaaaacaaaaggaaacaaaacaaaacattgtttacttaatctgaggatctcagcgaatccctgttgagctggggttaatttgggaggttctccgtcagctgttcctaaacactgatgtggatgcttgtaaatagattgctctggcatctttctcagtgaaacacagacacatgatactgcccactgttccaaatgttttctctgcatgtttggagagaagcattcattagcccgtgtcctttaacctgtttgtcagttcttcaactctgggtactgtgggaagaagttttattctttcattcaaccccttaaaaatttatcataatttaaccatttatcattatatgtattgatggtatacacagtgttgttatgaaatagggttcagcttcatttgattttggtactttgaatggatgctataactgtaaatgctgccacaggatggtatttatatccaaataaaaacagtggatcattggctatgctaggtaattaaggaaaacaacattaaaaaatcctttccctcagttccatgaaaatgctttattttgaaattggcgggtaagtttctatttttgctagtgtccactagtcttgaagacttgaagactttacatccaaacatctttttttccagtctgtgtacacatgtgtgcagtgtatacatgtctgtaactgggggtggcataagtcttctgaaacctcaaagctcagccccagtgccaaaccccctccaccatggccacacctcctaattcccaaacaatcccagcaggtgaggaccaagtactccgatttatgagcctataggaggtggtagggaaattcccattcaaaacaccacaacttccctttttattccctggaaagttaaaaatagattttttctgcttgcctgtggtgacacatgcctttgatctgcactcaggaggcaaaggcaggcagatctctgagtttgagaccagcctggtctatagagtgagttgcaggacagccaagactacaaaaaggaaactctgtcttgtaaaaacagtacacacacacacacacacacacacacacacacacacacacacatgcacgcatgcacatgcacacaaacatttgacagtttcttttaagttatccaatgtgttggcatacccttttctagatgagctatcagcaattaatggctgcagaaatagggagaaccagtctaacacacagtcatcagccctcaagagcaacactaaatggtcttggtgtctcagaagggcgggtatgtatgtgtggtgtgtgtgtgtgtgtgtgtgtgtgtgtaataataataattaaagatgaggccatgaattcagagaaggagttggcagaaggacagaaaggggtaaatgataaaaatccagtattcatttaaaattctctaaaaaatcgagatgagaagaatgggggcattgtaactcaaatataatgccatttggcgggacaggactgaagctgggagggggattaaagagtgtcttttgtggagttattaggaactaatttttatgatctggctctttggggtgttttcattaagtggggttttatgggcagtgtcattctaacgccagggtgggctcccttggagtggccagggatgaggtgggagccctgcactatgccacagggagactcagcacagaaaccagctgtatacacacagcattggagtctctggtgaagcttccaagaagaaggacaatgaaccatagagaattagcatcagtaatttgggggctacacacctcacccctctttcttccacatcttcatttgatcctcttgtttctgcaccccaaccatacataattaaatattttatttccacccttcccaggcagattcatcccttcctactcttctctcactttatccctagcctctatcattagatacagtttagcttgcttattgaagatttagcatccacatataagcacattacacaccatatttgtctttctgggtctgggttacttcactcaggatgagttttccttgctctgtccatttacctgtgaattctgagatttcactttttaacagacgagtaatactctattgtgtacatgtaccacatattctttatctactcatccattgatgggcatttagtctgtttctaatttctggctacttaagaatagagcagcaatgaccatggttgaacaagtgtctctgtagtaggatgaagcatcttttgagtatgctcaagagtggtatagctggaccttgaggtagatctgttcccagtgtcctgaggaactgctacactgatttccatagaggctgtacaagttggcacccctaccagcagtggacgaatgctttctttcctctgcatcctctccagcatgaactgtcatttgttttattgatcttggctatttagaccagtgtcagataaaatctcaaagtagttctgatttgcatttccctgatgactaaggatgttgaacatttctttaagcattcctcagccatttgtgtttcctctttgagaattctctattaagatccatatactattctttaattatgttgtttgttctctttatgtcaaggttcttgaattctttatatacattagatattagccctctataattgctaagaatatttccccattttacagcttactattttgtctgaatgatggtttcctttgctttcagtttcacaaggtttgatttattaattgttgttcttagtgcctgtgttgttggtcttctgttcagaaagtgtgaataaattcaagactgtttcctactttctattctattagattcagtgcatcttgtcttatgttgaggcctttgatataagtggagctgagttttgtgcacagtgtaagtatggatctgtttggattcttctacaggtagccatctagtttgaacaataccatttgctgaagatgctgtctttttttcccccagtttatgtttctgactactttattaaaaatcaggtgtacataggtgtgtggacttatgactgggacttcaattcaattccattgaccaacatgttggtttgggaccaatatcatggtacttctattactatggtactactattattgctgctgctgctgctgctgctactactactactactactaaatagtagtagtgtaatatagtttgagattggggtggtggtgcctccagaattttcttttactatttagaaatatttgagctatcctggatttttgtatgcttccacattaattaagctgaaaattgttctttcagtttctgtgaagaattatgttgggattttgctgggggttgcattaaatctgtaggctgcttttggtaggtgtattagtcagggttccctggaatcacagaaccaatgaaatgtctccctctattaaggggatttattgtaatgacttacagtctggaatctgactaacccaataatgggcagctgtgaatgggaagtctgagaatcttgtagtggctcagtcccatgagactagttgtttcagctggccttctgtataaactggaatcttgaagaagtaggttccaacagatgtgctgacaagtaattacaagcaagggaagaagagtgagcctttcttcttccaatgtcctcatgtaggcctccagcagaaggtgtgacccagattaaaggtgtgtactacagcgcctggatctggagtttgcttcgtcccagtctgtccttgaactcagagatctgcttgccttagtttcctgggattaaaggcatgtactacttttcatagccactattcctcaatatctccatgtcaagatctgggtcaaaagtcttatttaatttcattcttcaaagacttaaagttttgttatacaagtccttgatttgattgactagagttaccccaagatattctattttatttgatttgaggctattgtgaaaggtgctgttcccctgatgtctttcccattctgacatttatcatataggaaggtggctgatttttatgaattagcaattgaatttttatttgtctaaatctcatgtcttgctcttaagtgttcagtgcccaccagaaaggggatttagctaggaactgaatagtagttcttgtttattttctgttttcttgtttagatgctgagttttatgatgcctagactcgaacttgcgattttattaaatattcctatttttgttacctcattttcttcctaacaaaactgtatggtgcctttggttgtcactgagctcaaccttctaatctttacttcaactacttggtgttctttaaaataacttcccacccctgtgtctttgacatggccttgctccatggtcattcatctccaatgtccagatcaaaggccaccttcccaaaaacttctcaagcatttggtcaatcagagtaaataaatgaattcctaaggcccttagaagaggtcactccctttctcaagagccctaagaatgaactatatgaaattcaccaaccccttcagaacatagggtagacattagcttctaaacccttcagggcagggacaaccagcgaatccctcaattccccctaagtggtcactttcttctcactggctttcaggctgtaggaaatctctatcaaccgaaatatcaacgtttgttttgtagatggataaaaaaagttaaatagttcagcaatttccaacttgcctggcttggtagtttctgaagaatctggaaacaaataatttgcatactgtagacctacctcctggaaggtacagttcctgaaatccaaatggaaatcaactctagctttattaacagctgaggtatgtcccaggtgtcttttaggagaatacctttttctttcttccccaaagacctttcagttcttctatctaccatgaatctcatcttggagatgactcttattttttcctagcagacagtattagggatacagtcaggagttgagtgacctataaaagtctaaggtactcttcagtctcacttcattttattgcttctttcgaggttcctgacagcataaatatacaaggtcatctcccatgatctcagaaagcatcttattatttaacaaacacttgtatagtggttactatgggtgaggctctgctgtaaacattcaacagatatgagctatttcaccctgatgcatgctcaaaaccctatctctggcctaaactggccatgaccatgagctacacggtcatagagatagcaagtcacaccttgttttataccatttggtggacttgatattttgtctcttttatctactgtaaaagccataccttggagtggtcatctcagtagatcctgtaacactccctgttcacttaatctggagacaaaaaccatgcataacatctgtatgctgaactctctccatctgtaaaatgcatcctgaagggattaccttaaaaatagattagattttacatgcaaatcatggagtctggggaccaatgtctttcacaattagtggctataatgacaatgatgaaaacagaacaacaccaacaacaataacaacaacccccaaacccaaaaccatgttgcccaagtgaattatctgtggacttgtgggatcagcgaatgagcagaagactgtctacaatggtcttggtatatgtgattccatgacctcagatctgctagctattgaagtgtggaggggaatgctgttgaaccagaggtcctacgagaagagtcttagagactgtccagacagaaggcttagccggggtgcatttgtgtctctggttgtttttcttctctacagagaccttttgttttctaacagtcctattagataatcaggcaatgagtctattagacaatagccatatggtggttttgaatgagtgagtttattaagtagacagataaataggtacgtagattaagtgatgctctaaatatccagcagaaattgacagaggaagtcgtagacagacagtcagctagatttcttgatagagagaaggatccttggcaaagcagttttcccctgagaattccaaccaaaagaatagctaacagcagaaagctaaccaaagacatggagggttacaaatgcacagcagaaactaactgggggaacactgtgaagatagccaggtagagttcccagctacgagagtctcgaacagagcaggtgtacccgtggatgaggcttccaaatacagcagaaatagcagcagaaagaacttacatcatcaaatggggtgctcacagtatgaaacagaaactgacatgggaagttgaaaaagtcatctggggtttctgattaagctttttctcctaatggatgacttctccatggctgaacttctgacctctctttccctccacaggcattgttatagcgggggataaatagtggtaccctctgttggaagtggtgtttaccttctagctgttctcaagggcacagtgtctttactcttgtggtaatttgttgttctcttccctggcagagttagcagtaggcagcccatcccaagacaagggttcttagggaacacagtgacacgagcatacttaggtctgaaatggggaaggaaccaacctcacttctaaatccagcttctcggtgaactcaatcaataacatgaaaacttatcactcttggtagtttggatgaaaatgggccctataggtccaggaagtggcactattaggagatgtggtcttgttggaggatcctctcccagactcctcaaccaatatttcatcagtaaattgttggaccctacaattctttcactggtccatgactgattattgacaggaactgtcttctgaaggcccagtatccgtggcactgtaagctcatgattacagtgcctatgctgttctcagaggctgacatgtctcagcccctctacttgtcttccagcttttatattcgtctccttctcttctttgcaatgttccctgaatctcagagggtgtggtagagatgccttgtttagggctgaaccctcatctgccgttcatcttggcatcttgggcaactatgtatctctccattcattgcaaatagagacttctctgaggctgggagtctcttctttttatgggtagaagaggacattaagatggcaattcaattctttttcagtttagctaaacagcagtaagaagttccatgttgggcctttgacctgtccagacaggggttattaactggtttacagtacaggcatggattctaccttgtggaacagttcttagtacaaacaaagagcatttggttgtccctataacagctatacaagtgttgctcaggggggcacatcttgcctagcccattggcttcatagtttataaggttcacagctagataagaccactgatgcttcttgaccccctagaaatgtgcatagctcctcccagcactttaaagaattggagtaaaactctacaggccagttccaaattgttttctcagagatgtgtgatgtcttcagccatagagtcatattcttttgtttgggtgtgtattcaggaagactgattagtctgtattgtttgagggaccttcctgaccacaattcctacagaaggcatctcatatctggcattctggcactgggagttttgtttagtgacccattacttctaagagtagcattatttagtcatgtaggctatgccacttcaatctctctcttatatacgttaactgggtcataagccagtggatttccatatgacttttcacacacccttcattttggttaatgcacatccctttgtctcttcagtccccttgcctcccatttaatctttttatgcccaatatcatccctctctggctacctaggacagtagccatcccttcctcatctgcagggggaagaaaacatttcaaacctgtttctttgttggaaatgaagatggactggaatcttgattaagggcctattgtgtttcctggaaaaagacatgaagaggctggagtccacgatgacacagacaagcctgaaaggcatgcagtctttggtgttggcatgtcactttagactcattctttctctgaggtctgggactcttggttgtccttgcacttgtgcaggcttcctgacctctggtccagaaggcatgaaattgttgggggattcagacaccaaggagccttcccaagccttctccctaacctacaagttaacaacctgagtaatgcattaagttccacaggtgatattatcttttcaccatatacctcagttgtaagctgattttgttgaggagtgtggatttagatcttataggtctcagagaagtatatgctaaggtttcctgtgacagcatcgatggttgtgatatggggataaattttactcgtgtagttcttgggggaactgggttttcattgactctagatgatgcttggagagctattgccaatatttaataaggatacataggattcaggtctcaaagccacacttaggacttgagtttgcaggctcttgttgggagccaaggaaagtccctggcataagctttaagggcaagattctgtatctgctttctcagagtcagtgatggggatttggatgcatgtactgggctgtacagtactctgggtccctgtgtctttaatagcatgttggaaatttgtatct

SEQ ID NO: 92 - DNA, 2578 bp, Mus musculus
taaacggtggttccacgggaggaaagcacgcccagtcacattaaagaagccaaactgtctgcttcaaagagaaaaggcaacatcctgtcacaagccatgctctggcaaaaatccacagctccagagcaagctcctgccccaccaaggccataccagggtgttcgagtcaaggagccagtgaaggagctactgagaagaaagcgtggccataccagcgttggggcagctgggccaccgaccgcggtggtactgccccaccagcccctggccacctacagcactgtgggtccttcctgccttgacatggaggtttctgcttccacagtgacagaggagggaacattatgtgctggctggctctcccaacctgccccggccactcttcagccattggctccatggacaccctacacggagtatgtgtcccatgaagctgtcagctgcccctactccactgacatgtacgtgcagcctgtgtgccccagctacacagtggtgggaccctcctcggtgttgacctatgcttctccaccactcatcactaatgtcacgccaagaagcactgctacacccgcggtggggccccagctggagggtcccgagcaccaggcgcccctcacttatttcccgtggcctcagcccctttccacactgcccacctccagcctgcagtatcaacctcctgccccaaccctgtctgggccccagtttgtccagctccccatctctatcccagagccagtccttcaggacatggatgaccccagaagggccatcagctccctgaccattgacaagctgcttctggaggaagaggaaagcaacacgtacgagctcaaccacaccctctccgtggagggcttttagggctggcttgcatctaacagatgtttcacccatagctgagattttaaaagtgttcaatagagcccagacttctgtttgaagtagctatttcacaggcttcctttcttcctaaagctaaattgtatcccttctttctcccttcttccttccctcgcttccttccttcccccactgccatcttgcttatttcttatttctccttccagttttcttcctctggagcggcaaatgatagtgatattatgaacaacgctttatacggaatgtcaccaagtctgcagctcagggttttcctttggtggcacatcattggggaagcaaccttctttcaggtgccccctgtttcctggtagcagtagctttatagatctactctatgatacgttctgcgccccagttttgttttgtgtgctgttctcagccttggccagatatactatctaagtggatgtttctggtctggttacagggggatgggacaggaccatcagggtgggtagggacagtgagtgagtgatgggagacggggctgaggagcagcaggacacacatgtgtgtctgtggttagagagggagtgaggaggggcaggggaaggagtgatctaacagctctgaaaaaaaataccactttaatgtggtttagctgttcttgtcagcgattaggaggaaagctggatatggtatggaggataaatgacgagtctgcttatttctgcctctctgcaggcccgctaacatgatgccagcacttaaaatacttctgtcagcatattgccatagcaacaggaaaagaaacaggtgaagccgatcattgaggaggcttgcacttagtccttccacgtgggcttttaattcctgttgtgactcacccagggccatcctgacgcgttgctatggattcttgcgcccactcaccggctgtctctggggtcctgaagtcctggtcagcaggcccactggcttcattttcagttttatcagttttattgcagtttttgctggagaagcataacacttgctgttgagtgttttgctgtctcctagtgctttgctcctgaagtggatgtgtctttgggaactggcccattgtttactaatgataccatcattacacatacacaagttttagtctgtagaatccatgtagaaccaatagatcttctagaaatgacagtttctttgatatcccaccctctttctttctgcttccaatgaaaacttagagctacctgttttttttttcttcttcttcttctttctttctctgctttctctttattttgattcagacatctcattatctacctgaagtcctggtatacttagcttgaatttgttattcctctttaatatttagattaaatgctagactgaatggtaggtttacgacttctgttggtggttaccatgaacaagaaagggagagggagcctcagcctatttaattaagaccttgttgcactaaaacactatttaagatttcccagctacttggagtttgaggcaatcacagaggagttaacactgggaaaacaaacaaaacagcaaagaaagtagtgtgagcggttgctgggattgaattggcatctttttcgcttcttatcttgagacctcacgtcttggctgcaggcatccaaacagatttcctccagagcctcatttgcaacattttcaataaagattggttagatgaaaaaaaaaaaaaaaaaaa

SEQ ID NO: 93 - DNA, 771 bp, Mus musculus
atgctctggcaaaaatccacagctccagagcaagctcctgccccaccaaggccataccagggtgttcgagtcaaggagccagtgaaggagctactgagaagaaagcgtggccataccagcgttggggcagctgggccaccgaccgcggtggtactgccccaccagcccctggccacctacagcactgtgggtccttcctgccttgacatggaggtttctgcttccacagtgacagaggagggaacattatgtgctggctggctctcccaacctgccccggccactcttcagccattggctccatggacaccctacacggagtatgtgtcccatgaagctgtcagctgcccctactccactgacatgtacgtgcagcctgtgtgccccagctacacagtggtgggaccctcctcggtgttgacctatgcttctccaccactcatcactaatgtcacgccaagaagcactgctacacccgcggtggggccccagctggagggtcccgagcaccaggcgcccctcacttatttcccgtggcctcagcccctttccacactgcccacctccagcctgcagtatcaacctcctgccccaaccctgtctgggccccagtttgtccagctccccatctctatcccagagccagtccttcaggacatggatgaccccagaagggccatcagctccctgaccattgacaagctgcttctggaggaagaggaaagcaacacgtacgagctcaaccacaccctctccgtggagggcttttag

SEQ ID NO: 94 - DNA, 47443 bp, Homo sapiens
cacagatagtgatagcaacactgggttcaagtcaaaatctgtcacattcattattaatgaaaaagtagtaataacagaactagctaccatttatagagtcttttctatattctgggcattgtgcactttggtggaccacggatcatggatacccaggtattgactgaatgtcagactttgtctctgggttcactgaggccaggcttagcttactttattcattagtctcactctagtgttactatggccaacaaatgcctcaggtagagttaatccttaattgaattgactgctctatctttggaagcagatttctttttttcttttggaccttcaaggtgtctaaaattttgagttgtcattatctctttctcactctttcctcttttttcttcctacactgacatttctatttatatctcgttttcattttctctgtctcttcattcattcatttattcaagttactttcccaccaaattacagaagtggtagttgaaaaacagcagtgcagctgccagccctatagctccacccatgaccgaaagttgcccaggagcatggcatgcatgcaaatagacttgccttcgcatgttggatccttttcctttttataggaaactacacctttgattcataaggaaatggactttggctttattgtaattcctattttcatggtgttttggcacaaatcatgaaatacacctggtgaaactcctgagtcactggagggcttaaagtttcaggaagaggaagaggaggaggttcctgtgtggcatcttcagaaagaaggatgattggcaagtattacctccatcactggacaaactcctttcactttactcctttgagcctttagctcaaggggaacagggcattggtcagtaattgatcaaaccaccagcatccccgatatatgaattctggggggctctggccccttgtgggcttttaaatgctgcacagagaagaagtgaggctgagagctttgagtcctggacaggcagagtgtgtgccaggtcatagggtcactggatcactattccttgggagaaccacaggaatgcgattgtttctgggtgtggggcgtgcgtgaagccaagatccctcctgtttgtgggaaatgatggttatgtgtttagctagacaaaggatgttccatgctacacttaagctggaggcttttgtttttcttggtaatcagggcattctaggggcattccaatgaagaaaacttgaaaggggatagatagaaaaggagatcatgagaaaaaaggaaggactagtgtttggttgtctagggttgtgcttccaaaatcccaaagcaatgtcacatgaaattaaaaaaaaaaaaacacacacctccaaaccaaccaaccaaccaaccaaccaaccaaccaaccaactgagtcatggccactccagatctactgagtcaggttctctacaagtggggcccaaagaatatctctttatagtaagtatcccatgtaatttagatggaaattctctaggaattcttgtgggactttcagttataagaaaaatatatcaggtttttcataccagcaataacttgcttgagcatagggactttcttaccttgttatccctaacattatttccagcacaaagtttgtgctcaataagtatttttagaagtatcatggaaaatatttcttaaaggtggccactgactgtgtgggaagtggggaaaaataatgttggtaatatggaggcaaaactgtcaaataaagcccattgttcagtgtgtggtgctcagtaatggcaaagaagaaaaaaaaaaggtctctgtgccttggacagaccacatggtgagtagaatagcccagaaacatattctttttgcaaagactatttttcccccaagctccatgacataatagcaccaaaagtaataactatcaggctttcttgattatcttccaagatcatttatggcagtctcaggccatagataataattaaagctacctggtccttggttttctcatctgcaaaatggggcatggacacttgccagctgcctgtattaatgcaagtttgtcagagtggctagaggccatctgtctagtaccagaaggagttcagaaatggtcataaagagagttgggcaccttccagcctgctgtggaggccaggctgtcacacacagtaaagccctggcttctgaacactggcactcgtccaggcgccacttgggttgatgcaatctctatttgatcacatgaatatgatttccttttcattgtgcctagtcacaatgtctaattattgaaggcacaataaaactaaaattccaatgattaggcctcttcctagataagaacctgccatccagctgtcaaccatatttgcagatgatgtctgggaacttgagaagatgagaggtggtttgaatcttactgcttcttcagataagggtagcagggcatgatcttttcttggaaaactagaaattggtaaagtttgaagggctcactagtgtgcatgaattttgagagcaaagatatgaaagagaattcagtgatatattctcttgatctgaatggtacaataaaattagcgtatgtagaaaactctatactagcctatcaatgcaacagttactattattatttcaacttggaagaggaggaaattaaagctaggagagtttaaacaatgtgaccaaggccacactgctagcactgcagccagattccaaaccaggctctctgactctaaattacataatctcttcactatatcctgctgcctaacccagagggaaattatgcataagaatgaaatgatatacatgtgccagagaaatgagaaatgggcttagctggctcactatgtaaagaatatgtgggaaattgcctgaaggcaacaatgggcttcggtattttacctgtggattaccctttttacctcggagcccattactgtcctaactggacctaaagcaacttatcttttatatatttaaaatttgatatcatagtatttctctataataaacagtggttcttaaccttgagactctcatgaacgctatgaactgtcttccaaggaaaatatgtatatacacacaggattcatggccctcctttaaaatcaccctggtcctctcttctgctcccatctgtagggtcaagaaatcctctataggtctgactttacaaactgccctgaatttctggaccatagaaaatcttcatagtttagaggttgttgagcctctaggccatcaatttttctatgcactagtccatgtctgagttgatgacaaatcatttattgaaaggtcgtatgaattttctttctatctaacaccgggtgtctagctatatgatactaaacatttctgtttttttcattgttatagccctaaagcctggaatagaacttggcacaattacatgatgtaagttatatgttttattttttgtgtcctatatacaaaaaattatgtgtaaaattgtgtgtaaaaaatgtttggaaattaattatgaaaatgcaataggacaacttgttctttgttgctcaggctggaatgcagtggcacgattacagctcaccttgacctcctgggctccagcaatcctccaacctccaccttcaagtagctgggactacaggcacatgccaccatgcctggctaatttttaaatttttttgtggaaatggggtctcactatgttgtctaggctggtcttgaacttttgggctcaagcgatcctcccaccttggcctcccaaagtgctgggattgcaggtgtaagccaatacactgggccagcaactcgttcttaaagggaatttgtttacaatttccctattatgtataacatcactctagatttttggcatataaactttatcaagttaaggaagtttccttctagtcctaagtttctaagagttatttttcttaaattacaaatagatgttggactttatcaaatgtttagatatttgattgagatactttaataatttttctcctaaagtttatcaatgtggtgaattatattgataggttttctaagaataaaccatccttgcattcctgggataaatcttacatattataatatattattattatatcatgatgtattagtccttaatatactattgaattcagcaagcaaatattttgttcaggatttttgaatcgatgttcacaaattagatggcctataattttcttttcttatattgaccttatttagttttagaatcaagtttacatgattggctctttaaagtaatttaaattaaatgcagaaatctgtcttttaattggtgagtttaatcttcttaaattcattatcattactgagctagttgaacctatcctgccaacttattcctgttttccattcattgtaatttttaaatacatccttcctgtttttcacagaaagattcagtttctctcagaatgctcaaaagttaaatgtttaaaatttaaaagctaaactttgaaacattaaaagttaaacagaatgtttaacacatcatttatgaaaaagttaaacagaatgtttaaaagtttaacttttgttttattttttgttataaaaaaatttttttttgtaataagaacaaaagtggcagttgcctcctacttcagatccacttttatgtttatttgtccttcagatccacttttatgtttatttgtccctattgatttcttaaatttattgatagctatattttctccttagaaaacgaaagcattagtgcattttgatttctctttgatctccttaagggccacattttggaaaattaaatataatataaatggtgttctctggacttgtgtaatcatgttattttaaagatattttgttttgtgttgttatggatgaattttctccttttcccagctttaagaaaattcctataataaactttacccagtatttgattaccttttgctctcatagttcttgcaacatcctcctgagtcactcttttcatttgaatgctttctctaagagcaattttaatgggagtcttgtaggtctgaagacatcttcattagctacaatatttgaatgacaatttggctagatttaaaattataggttcagtgttcattttcttaaatactttaaaaatatttcttcattatccgcttgcatctagttttgctgtggaaaagtatactgtcattttgattcttgttccttagctataaatatattctttttcttagtaagcttttagaatgtcctgtttgtattagttgttttaaagtttcattataacgtatccaagtgtttgttttaccttatctctattgttgtccatgaggcctttcaaagatttttcatcttttttttttaattttaggaatttgtcatttctgtaagacaaggacagggcaagaataaccactattagcattattacttgtcatagtactggccaacaccataggaaaggaaaaaaacaagagatggaagaatcggaagggaaaaaataaaactgccgttactttcagaagagattgtcttctacctagaaagactatgataaccaacaaactattagaataaataaaacagttcagcaaggtttctagaaataagataaactctcaaatattagaatttttctatagcatcactaaccaactagaaaattatataaaaaacaagatgccattcacaatatcaacagaaactataacataattgagaattagcttatttaagaatatactgtacttctgcggagaaaatttaaaaactgtaataataaaaaacatggaatatgatctgaagagatggagagctgtcccatgctcagctggaccaaattaattttataatgatattactcttgcttgaagtaatctacaaattcaatgaaaaccaataaaaatttcagtgtttttttttgggggggtgctggggagtctctctctgtcacccaggctggagtgcagtggtgcgatctcggctcactgcaacctccatctcctgagttcaagctattctcccacctcagccttctatgtagctgggattacaggtgcccaccatcatgcccagctgatttttgtatttttagtggagacagggtttcgccatgttggccaggctggtctcaaactcctgacctcaggtgatccatctgcctcggcctcccaaagtgctagaattacaggcatgagccaccatgctggctggaattttttgaggaacttgatagacttatctgaaaaatttaagctgtactataataaataacaataaaaactaaggtacaagaacaacgagaccagtaaaataaaataggtccatgtacctaaagtatgtatttctattcaaaaaaagcacactatgaataaagttagcagatgacaagagtgaagaaatttgtgttgagtaaaactgaaaatatctagaattgtacatctagaacacagatgtgcaaagaatttctgctgatcaacaagaaaaagggcaatcctggtacagaaattggcaaaggaatgaacagacattttaaactggcaagaacaaatactacacttgatcttagccaaaaggccaagaggtgattgaagaggtattttggagaagagaaactccatagggttaacatgcatatgaagacatgcttccatttattagtattataatgtaaaataaaccactacactatcactacactattacactaaaacacacacacacacacacacacacacactacactgttgctatcactacatgtaccacactggcaacatttagaccttggataatgtcaggtttggtggtaaagtggaaatatgagaagctggtggaaaaatgaactgctggtggaagtcttggacagattagtattcagtcagattaaatatacacctattctttggcccagtaattccacctctgggcatataacctcaatgaaattttcacatgcctctgaaaaaagatgcatataagaatgttcatcaatgctttgtttgtggaagaggaagttggagacaatctgcttaagtgaaatgcagcgctcacacaccatagaatactttgcaggtgttaaaagtggtgcacagaatgtctacatcaatgtggatagatcttacaacactgtgctgaattaaaaaataagaaacagcgtgaaatgtgtaatataacatcacctacataaattaaaaatctatacatgccaaacaatacagatcttataagaacaggcacaaatgtctacaaataaaagcttcagcatcaaccactgaaaagagttgccctgattggaatggtgggtgggtgatgggggtatgaggggacaggaaaaagaatagacatggaaaatgagggggaaagtagatgaatgaataaataaattactgagcaaaataagataggggcttttcataaatcaaaaatgatgagaatgaagatgattaaaggctaaatgaaaagaaaagattaagacttggcagaggtaatgacatgtaataagcactctgtaaatatttattaaatgatggaagaaatgaagtcgatggtgaatctttttgcaaagctaaaatttatttcacaatatgaatcagtgcgctttaataaattattttagaagttttgatgtttgtatatcagattctttaaaaatgtgagcacacctgtatttggagtcatctggaccatgttcacagattttttcttcttttcttccacttcttgagacattgcataaacatagtcgcctcttttgaactatgccatgcagtttgacttttgattctaagtcacagaaaatgttttcctggaaaatatttgctgtttcgatcaagtcttgattccaaagcatctgcctgtatgtggtcactgatatgcagggtatttgctggaagaaatgagctggaatctgcctcatgagctgtgaggccataagaggtgatgggtttatcgctggccatgatggtgggcttgcccactgacattttgtttttctgccactgtacaagatctgatttgtcagagtagctctgggtctcaccttttccttccctctttccagaggacagaaatttattccgggggatatagcttctgttgatctgcttcaggttttaataataatgatcctatattactactaacaaacatggctgacacttggcatttactgctttcaacttaataaatatcttttattttaatgatttagagctctggctctagtcagatgaacttgggtctggcaccagcctataacctgatagcttggtgacattggacagatgaaattccctaagcatttgtttgtttctctgaacaatacaggtagacgtttccttgcagcgttgttgtggtgactagattaggtaatgtatttaaggcttaacatggagcctcttgcacagtaagtggttatattattactttgtggaaatcatcatgctaggcctgtggggagaaactgagatgaataagaaaaagttctgaatttcacggacttggagagaataagacatgaccaaaagagacaaaagacagacccgtgggagagaggaccagcgaggccacatatcctcctacgaacctgtgagacactcacagaactggttcttcattttatagatgaggaaactgaggctagaagagttatgtgacttgttgaaggggacacagtgagtgagtgtcagagccttcatgggaacccacgtctcctgtgactgaggcaggcctgagggatgtgcctctgtttctcatggaaactccttggcgcagcccaaggccttgagatgctgccccctgccaggccagggtgtgggctgccagccaccacagcatgggggcctccactgtcctgaacttcagaggctttgcggggagggcttataggcagccaggagacagccttctctggcttttaagtgaatcattgataaaatgttgacagcatttctcctcaagacctgccctcaaatcagcaaccgattagagacagtaattcataactttatcagatgaatttttattgggggtcactatgctccaggtcttgtgtggggcactggagaggcaaagatgaaacctccttgagaaactgtcagagtcatgtgacaattcaccatcacataatgaacaaagtgctctaagatctgagaagacgaacaagtattctctgggctgggggtttgtccttccggcaagagaggacggcaaggtcaaaggcagggaattgcatgggtgtttggtggtgcttagagggcactgggaccagtggtaggagggcagttggtggtgaggctggaaaggaaggcaacggctcgattgtgggaggccttctaggcctccagctctgtggctgaagggagaaggtgaatgctttgtaggctaggggatagcatgatcaggtctaggtggtgcaagatggctctgaggcagtatggacggcagagcagcaaggccccacacctgctctagggggtgtgccaaggggtcttgaccccaaactgactgagtccctggagcctgagcatgtggacctcagatatgcagtggcagaaggcttccaaactgtgaaggaaccggtagccaacaccatctacacttccagatggtgagcccatgacttacttaaagaagcttcctgttatcagtgggtgggcactcgcaaagaggctctgttcatcttgtgcctacaagcccagatccagtcaaagagcacgggcatgttctccttccttccttgagggttggcctctttctccgtgggcatagccgacatcagagccagcgcccccatatttcagcatgattaagccttgccattttgggggtggctgggggcgaggggaggggctactgtgtttcaaaatggaataaacagaaaagcaatattaaaagaatgaggaggttgtttactgaggcttgaagagatgacaggtgtttcctcccagttgagaaccagtgacccctgggaatcgcatttcccgctgagcaggcgcccatggcgggctgagtcctgcccatgccctggtggcctggaagcctgcatgggcgccgtgcaaagatcaacgttttccagaggagcttttgggctcatcactggcctggggagggcttgacacggggttcccacagcttgccccacaccaccttcacacccacacacagcaggtccccgcggggccggtgcaggccgtggctgcccgcgctgcgctgttgctctgtcccagctggctagctccgagtgtggagcgctctgggccggggccgctggggcgcgcacagtggggtgacaggcggcctggctgcagaaacgttgcaccggtgcctgaggtgggaggatgtgatgacgcggcccacgcagcgggaacccaggcctttaaaaagcccaggaaacagcctcagctcaagcggtggctccactggaggaaaacacaccccggtctcacattaaagaagccaaactgtcggcttcaaagagaaaaggcaacatcctgtcacaggccatgctctggcaaaaacgtaagtggtttggctgtggctgtcagacccaagcgagtgccagcggggcagggcgatcacagcttggcctggaattggggagctggtggtggaggtgatggcgccacggggggagggggtctgggttccaagccccggagcagggagcggggaggtgggcgggatggagcctggtggagaaaccagcctgtcagaggtgatgctgattttccaggctggaggggaacgaactagtgttccaaggtgggacggctcagggtacctccgcttctgtgtatgaatcactgtggtgaagaaagggcagtttatgattcacacaacaaaagccagatgtgggatgggtttggggttgggagggaaaagccatgcagttctttacaggaggggctttatttccataagcagtggctcttcagccttctgttgaataccctgggcctgtttctagctgagtgacttagctttctgccagggtgtgacttgttcctgtggataccctgggaggagtggagatctggcttggtgaagcgtgtcctcacttgctccactgtcttgcctttcgtcattctttttccccttctgtgacaaggcttgtccatcccactgcaaaggatgcagtgggtttatctttggccttgatttttatccccggagttggatggaacaattgtgaactttattttcctttatgtggaccaaacagcgacttaccttactaataactgaaataatacagattatttacaacattcttttcacgaggtaaacagcgtcaactcatcagcttctgagagttgaaccttattggggctagttctatacttcctcaagcaagaagaatgaccaaaaattgctctgtctttctcttaaagattcttggttccttaaaattccttttaattaatttaagtatgctgtgcctcaagcaagcttaatataagagaatctagatttacagaagaagatatattagggaatgtttttattttatggaaagatacttgattggatccactaaagttcggaaaatataacttcattgattaaaatgtgacactgtcatcaccaatttattgtttgctttatgtcttatgtaaatttctctggaattaagctgattaaccagtaacacagaagagtgatttcaaaatttctcaggttgtgaagacccaccattgtttgatatcaaaaggtcaattttttaaaaaaataaagagaaatgagctttaatttgggtttgagagttacggactccttccaagataactaggaatattcaagaattgttggcacgccactcttcccaacaggcgatggagcagcggcagcctatcctttctgggacaatggcagctgaccctgttgtgagtgctctgtggatgagagcaggtgggcattcatctttttactgggggcccctaagcatctgtgtgccctttcactcagggctgaatcatttgatttttgtgtgagcccctggaaggagttttgcctcagctcctaccttctatgagcaagccactttcctttttctcaatccttaggttttttgtatgttaagtgggggtaaaaatcatatccacactgaggatctatccttagtaagtgaggtgccaccgaagtcatgttcattgctctgtctgcatcagcctctgagatatgagttgcttccctgcattcaccatctgccatattctcccctcttggttctgtagtacattttttcatttctaattccttctaagagatgaacagactttttttgtttgtttgtttgttttttgagacagagtgttgctctgttgcccaggctggagtgcagtggcgcgatctcggctcactgcaacctctgcctcctgggttcaagtgattctctcgcctcaccctccctagtagctgggactacaggtgcccgccaccacacccagctgttttttttttttgtatttttagtagagatggtgttttactatgttgttcagcctggtctcgaactcctggactcaagtgatccacccgctttgacctcccaaacaggtgtgagtcactgcacctgtcccccaaattttttaaaggggatgctggagggcatgcttcctgctcacaccctggagaccagtcagatagatcaaaactccattgtaagggagaccacattgtaagctcatcaatggaataactggggtgaatgtttccacatgttcagatgaacacaaatcaaaattatcttgaattgtcctttaagccttaaaggaaaagtaggagagaccctgggctctggacccacccccttagcctgaacccaagtatgtggtatagagggcacctgggtgactaaaccgtgtgggaaaatcagtaaaaacagggcagcatgtcagcccacttagagtcacccgatggaagggcagggtttgaaatcagacaccaagagtgctgaaagggcactttcttttttcagaaaacaccctcgaggcatgagctgaaatgactgtactatggggttctggaaagggttaagaaaacattcactttgtgaatgttacctcctccctacctagcccatgaccctagtttgtggactaaatgtgaaccctggcttttggttaagattagagcataaagtgacaaagcccagaactgctggcacagagaagtagaaatcttcaagccccaaccaatggatttgagatttgcttgatgggccaattggatgaagaagtcactccatctgtagattctctccctgggttctggacttggacctgctggtcaggtgcacatgtgaagaattaccatccctccccagctagtaacagtgtagtggaaatagcaggaaccttggagggagacaggtctgaaagttgcctgtgcaacttagttctttctttgtgagaaggaaatttccattcatttccttatctgggaagtggggattctaatgtctgcctcccaaggtttttgtgagaattaaagtagagaatgtaggtaaaatgatagcaagtttcctgataagtagtggtaggggtgagttagtaccttccgtcctggaaacctcctgtgggcccatcttgaatgatcagtgttatgttaaattcatatattcttttccacactttgattagaatagttaaaaagccacagtctaaatattcttgggtgataggatattgcaaaattttccaagggtctaaaatagtggtctgcaaactatggcctctgtgccaaatcaggcctgccactccatttgtaaataaagttttattggaacacagctatgtctatcatttgaatattgtctagggctgcttttgcagagttgagtagttgtgacagagactgtgcagcatacaaagcctaaaatattttctctctggcttataatagaaaaacattgccaacctctggtctgagatgatttgcttggttcttcaggcattcatttccttaagatactcagtatcaggccgggtgcggtggcgggcgcctgtaatcccagcactttgggaggccaaggcgggcagatcacgaggtcaggagatcgagaccatcctggctaacatggtgaaaccccgtctctactaaaaatacaaaaaaattagctggggttgtggtggcaggcccctgtagtcccagctactcgggaggctgaggcaggagaatggcatgaacctgggaggcggagcttacagtgagccgagatcgtgccactgcactccagcctggggtacagagcgagactccgcctcaaaaaaaaaaaaaaaaaaaaaaaaaaagatactcagtatcctggggttgtacattgccaacaccaatgggaaataaaacttgcagccaattcattaaataatttgtacaatgccccaaactgatttgattgaatttcttccttaaaagtgatagaactgtgtataataaactgaactccatttgttagaaagtgaacaaattggacagttgctttttattgttgttgtttgtattagggaacaatctacatgctaatgaaaggcaggcttgactgattttctttggactggctgattgtcttggtgtcctgtggacttggccttggaacaggaaataattcgtatcagattattatgtcatggatatgcctttgctttcagacaacttgaacagagcagagatttagcaaacagaaaaattaaggacttaaaattctcatcaacatagaactctgctcttcagatgtactctagggttccactaaagagccaatattgtttgggaggcagttaaagataagtaaaatgtgtactatgcatataatttttggaagcctatctcctacataaatttaagcacaacttacaatgagaggtaatttaggtttctggacaacctctaatatttctattctatgttacaacctttgcttatttaataagcctagtgagcacctttacttcttaccaagttgattccattgattcagcagttctttttttgagatagagtcttgctctgtcacccaggctgcaatgtagtggtgcaagatcagctcactgcaacctctgcctccaacttcaagtgattctcctgcctcagcctcctgtgtagctgagattataggcacatgccacaatgcccagctaattttgcattttcattggagatggagtttcactatgttggccaggctggtctcgaactcctgacctcgagtgatccacctgccttgacctcccaaagtgctgggattacaggtgtgaaccaccacgcctggccaattaagcagttcttgctgttaagggcaagtagaatccaaaagagagacacaaattcacgtgcaccgtctggaggtgaaataaaggacaaacatcaaccaaatacacagatttaattggtaaaagagcagatgatgttcttgatggatattttacttcctgccccttatatttatttactaaagaaaatgccagatttgtccccaaagttactgactcagaagttttgaaagctctctcccaattcacacttgggattctgttctttcatgaggaaccaaaaaaaaaaaaaaaaaaaaaaaatcaagttttcctacagctgttcattaaatatgtggacatttaattcataaagaagtcttataaatatttgcttttaactttcccactacaaagtgttttttccccctttgacatctttctaaagtagtttatcttcccacttaatgaagatgtccacctatttcttattctgagccaaccaaaccaaagttggctaattgattatgaatattaacataattctcacctttatgaaatgcttaataacactctagttttctcatttttgtagaactgcttgacaactaagtgagcctacctgggatggggaggccttctctgaaaccctcttgtcccgcttgtgtgatactggggacaaagcacttgtaggcaggagccaggggttttactttccattctacagataattagatgagagaccttaagcaagccacctaaccactttgggtctcaaatgttctagtgctggaatggaacttgccttttcctggctaattttcctggagattgaacttgattgaggttctttgccagctctaattgctgagttttcctgagtgtttatacaaaaaataaattaaagtttaaaatcagaagtccttaatttaatagatgggattcttctatctgcttagggcagtgtttttataccttggctacacactggaatgctctgaggagatttaagaaacacagatgcctggatctcaacctagagcttctgattaaattgtcttgggcattgaaggagagctgcaaatggctcccaggtgagaaggctgagaactgctgacctggaggttgaaatggatggcttctaataaacctttgggcattgctaagagcagaagaatgctcaatccttttaacagtgataaacaaacatctctggggaatggagaacttatttggtgctatgcagtatacaaaatgttctgttggatcagtttggattacatttgattgctggtgaagagacctgaaataacgtagatttaagtaagacagtggtgtcctttctctcacataaaagaagtccacagtagggtgttcaggatcttatggagtctcacagtgccaacatcatcccaggctcctttttcctttctaatctgccatccttggcatgtggctcttgtcctcaagatttttttcatagttgccattgtaactccagccattacatctgtgagcatcacatcttcggacaagcaagaagaagaaaaaggaatagcaaaagatcatgcctcctgatcgctgccccttctccctcccaacacacaacttctgctgacatctgatgccatttctatctacaagggagaatagcataattgtttagctgggcacattgccaccctccataatgcaggggctgttagaaaggaagggaaggtggatgttgagtgtaacaactgccagtcttcactatgctttgagtgcattatctcatttaatcctcataaaaactccatgaagcagattctgttgtaaggttcattttatagatgaggaaactgaatcatgaagattaagttagtaactctcctacaaagcaaaattcatgtgaacagacctcaagtgttggcctgctaagctgtcctgtctccctgccacagtgcctgtctctctcacattgcttaggaagtattcttggtaaaagcacaggccttccatgtcagataagggaccaatggcaaaaaaagccctgcagatggtagttcataccatgagaaccccttttgtttaacatttacttcagcttacctgttgaagaaaacaaggtctctgcttgctgctgggcctcttctgcgggacagtttgaagatattttagctataataaaaggctcagagaaggatctagagtttgcccccaaataacccagccctactcttttctgggcagttttagtagagagcccgatgtagcaggcagcctttgctgggagccaaggcttctgcctccgtggcacttccttgattctgaactttctagactttggaaaagtcaggctgctccttcctctctctctctctctctctctctctctctctctctctctctgtgtgtgtgtgtgtgtgtgtatttgtgtgtgtttaggtggggtgtggagagtaagatgtagagagtagggtttaactttgagttagagagtgacacttctgttctttctttgcctttagtagttaaagcttagcttctggggcaggcagatctgagtttgagtcctaggtttatgccttactggttgtgtgacactggtaagtcctttttcctccttctgccaccatttctttataggcatgcaccagaggtgtgactcttaccttatgggattgtggtaggggttttctgctgtgcttggcattaagtaaacactcaataaatattagttgctattattattttcccattctgtcacaatctacctctgaagacaaaggttatgccggctaattttagattacaatttgtatgtcctctgagttctgaatttcttgtgaaatggcagggcacacatctccagtcttgtaacttgtggtgggttagtgatcatggttacttctgatgattaatctgaccattctgtgatcaaacttggaactcgcgtcacaattttcctaccgaccttgtaaggtagggtggcggcaagacttgtactgactggcaaactcgtgtttgtttttttaattcacaagattggactgagtgtttgtaatctagttgtgagcagaatgacacttgaaatatgcaagaaatagataccgaaaactgaaacaacaatgtgtggcctccttttcttagtaacagtttcattagtaccactttctgggaagagctggtcaccaaaagattataaaccagaatcattctcagaccaggtgctgggacaaaaaaggatttgaccagtcttaaactgaattactttttaatgcactagaaagagccatacatttcattggaagacagcaagcatacaggacattgttaaaactttccaggactaggaaatgctgaggtgacagaaaggaaagaaaagaagagaggcaagagagttgacaatagaagcaagtcttaatgttggatgaaaggtacaccaattcaggaaggaaaggtatagaaggaaaatcaaccatctattcatcatcccatgcaggtatgcatccctctaagcatccatccaataatggaattatttccagctagagaaaccaaccaatgaaataaattatcttcagcagaaggtggggatgatggaatcagggaaggtgtcatggaacatatagcattgggtttggatcctgaagaatagatggtaatcagacttcttgcttagatcctggggtgtgcagatgcatcttaggacataaaatattagcactgggaagaaaatccaaggattttaggctgatgtctataacatttttgctacaaactcccttattcaaaccaaatctactgtagaacttcagtataagaataaaaatcgtgcggttttggggggctatctggagctctgattgctcatgttcccccacatttccctgccattctcactctgttggcacctgcaggcaccataactatattccagggttcttcaggtcacagctggatccccctgacctggccaatctacccctctttttagcaagatccctgctagctggtcacagagagtggcagtgagtggctgtgaaacatattgcattggtcttcatcaagctctgaagctgtgaagactatgtgttcggtctttgtgggtctcttgtgaataaagagggggtaaattcctaaaaaactgaccaagtgacttctttctcaggcttgatactaacaaccactccccttctccaatgtctttcataaaggaatcccttgcatcatgagggccattggttagcaaagctgaacattatccagaaagctcctcttgaccagctgtgatgtttctcatgaatccattgttagggctactctcacttgcgaaggctacaccccaggccaccatgagccttggaacttgggcagttgggtctgaccccaaatacaaaactaatgctgggatctgaagagtccattctccaagaaagtggtccttacatgatggtctcaggaaaagttaagttttttcaataaagctctttagtcttgaaaagccaaaattagatattgcttgaatcaaggaacaaaaaatcggatatccatctgcctcctccagctgcctaactacaggttattcccatcctagctcagatgggcaattctagattcaagccttgatctaataaggaaagagacagccctttcctctgctccatccctcactatggtactgccttgctatagaattggggtggccactggggtaggtggactctcctcattcaccttctggtctgggacggtaggtctggagctctgtttaggccctttctctttcctgatgccccactctcagcaaatttgaggcaatgccaaatatgtaatccaggaatctgctttgctctacaaggtgataaaactcccatctatgggcactgaagagccctcccttgcccattgccacatttctattccatatgcgatatgtgctcctaggtttctagcccccttgagggagtatctacaacatagcctcagccatggctgtgtccctggcctttaggagatacatataggttccttaaggggctgcatctgaggtcaggacaagggaatgccatcatactctgtctgcaacctaatcgctgccattcaaaaatatccaaggtttttcatttctgaagtcatactttaaaaactcacatctgctgcaaacctaatcctctggtgacttctaaagaaagaagtcttctgctcagctcatcgtatctttataaaaggccatttccagggtttggcgtctcctgtctaggattgctgtacgaaagcgaagtcttttaccagcccctctgcagcatcattggcttccctgtctcctaagtaggggtatcttgctgcctggggattccaggtacctgagggattaattccaggagcataatgaaggcaggtagagacaggcctggcaggcaacagaaggccctgggtatgctgaagacagagacattcagtatcaggatgtagctgaatggaggcaagttagggtcactgtaccaaggctacttctccgatgacagatgggccatggattgttggctgagatcaaggagaaagggctatttgttgggagctcattatgcaccaggtgtttcattgtgttaatctcatacagttctcatgattaccctttgagatggatattattactttcattttgcagatggggaaactgaggcacacaatggttaagtgatttgccaagagtcacacaggtgataagcaacataacaggctttctaaactaggtctagtcccaaactgtaccacactgcttctcaatgacaaggattttagtgttgcactgggtgcttcttcctctcccaattgaagagggccctcgcttagatggaggcaggttatgacttcatcaagggtagctctagcctggcacaaaagcctctgcagatttggatcttagcaagtcacgctcgagactcagtatggaagctctgaaacctactgatttccatcttagaatctgagttccctggactcctcttctcttggtgggccgatcagccaagataggataggaccagctagtgacacacccttaggattcactcaggacctgccacttagagtgtctgggacaagggtctgctcatggtgaggcctgagtctctggccccagaccagcccctctgcactggagatccaacagtcatatctcttgcactcacctctatacagtctctacagacttggggccccagtttgctgcttgttcaagccttactaaaccaggtgtaggtggaaaccaaccaaacaaaccagaaccacttcagttctgaggcagatgcagctctgtcacagtttgtaattctaaatttgtttgtgcaattatttgattaaagtctgtgtaccccactagactagactgtaagctccaagagggcaagaacctcatctgttctgctcagcaagtacttgttcagtgaatgctctgccaggggtctcttggtcttgtcccctaccctgggacacagtgtatctgcgaaccctttctgctccggtgaccccagtttctgtaaaaggcaggcagatgcagctgctttctcaggtggacctgtccgctgtcatttcagtcgaaaaataccaaaaataaaaccttgcggggaattgtttgggtctctcagttctcgtcactcctcatgtgagaaggctgctgacaaggttctcgtggacagatctctcctctcttggctgggcaacaccatttcttggggaaactggcaattgagggagactggatcagggtagtccaagcccagactttaactggagcaaggagggttaggatggggccaggaatcatttgatgattaactgcagtgtcgctcagagaaaaaaatgggacttgcccgggcagagacaaggcaggcagtgaggcagaagtggagtgtccttggaatcacaggtcctgggcttggttgaggacactgttacttacaagtatagtcgtttggcaagtcactgaatatctctgagcatcaatttccttctcggtaaaggaagggagcggaagaggaatacgttgtactgagcctctatctgcaatcattagtgtcaaaatctctatggaacatcatgcaaataggagtgtggtgatttcagagctcccaagagttaagaatgtgaccaggaaacacatggacctttaccacccattcattcaacagacctgagtccctgggagcagagaatgggtacaaacagccttctgtgcttgacctgatctgcaggaggctcagaggaagggaggtgtggtgtggaaggtgcggagagcgccggggaaaggatccctgggagtcttgcctgtgagggaagggttagagggccactgccacgtggaaacctctcgcactcaaggcctttggctgcccctacctgcggttgtggggcgggacacccagaagtttagggacaatccaagtaatcctgaggccttagggtgtaaatgctcaggtctgagcttggtggagaagggtggtcttctgtgggtcagtgggatcttgacttcagcctaatacaacctagagggatccctgtgactgccctgggggtccatttcctgttggctatgacctctgttaagtaggaatcacttggcccctagaccacttttgtctggggctctgtggctctaagactgaaaaaccctctgctgtcacctccaacatactttaagagtgtcccctgggtctcgttgtcagggctcttctttctaggtcctggtggcttgcctaggtctggggaaattctcagtgaccgtggaccctggttcagcctttcccaggggacctgcctatggttgatgagtgagatcttcagggctgatgggaaggaatagtcttttagaatgaggacacagggagggcacatgtcactgtccctttatcttctccacccagaccagagaacgtgaggtcagccaccatctttgtgatctgatacagacatcccagcctaccaagcaagatattacaacttattcttcagctgtccagcagccttgcaggcaacatcaaattgtacatcaatcatggttcccctttctctcatgtcttccaaccacctttaacgtcagttttctccccctgctgtctttttctcctctgtcctgggtatcatccagattgcaggatatatgagtgatgtgtttataattcctggctgcagggtcctctcagttcaaatgttagtgaatggaaagtctgcgtttacatgcatatgggatttctttgttggcctacattaaacaccaacaacaaaggtcaactaaaatatagtgtaaatgagcgggaaagcctttctgtagtgtgtcaagtccaacctttggccaaaacccaacttctttcttcctgtttggaaaaaaaatcagccattgtccatgaatggaaagaacaaatttgaaaactttgactcagaccgtaactgtaagaaaagcacccacattagtgttccagttaaagatgtgaataatcctttagccaactggagttaatgttctctagaagtccttgggccacaagtacaaacaaaattctttgcatgaaaatgtaaacaaattttttttttttttttttgagatggagtttcgctcctgtcgcccaggctggagtgcaatggtgcgatcttggctcactgcaacctctgcctcctgggttcaggtgattctcctgcctcagcctcctgagtagctgagattacaggctcctgccaccgcacccagctaattcttctatgaaaatgtaaagaattctttatacgaaagtgaaaggtgacaacgactattgtgacttcattttcagttagaagccagggcaagtttgttggccatagtcttgaattcctattgtttgattagttttgctacaaataaagagaaaatcgtatttcttctcagtggggttttttttccttgaagattcaacagcagaagatatttccattgattacttagagtgatcaacagtgtgtcactattaacggtgtgtcacatgtccttctgggctaggggcttttatcttgcaaaatggccttgtacggctacaaggtttacctgttgtttaggtaagttcctaaaaaattgaccaagtgacttctttctcaggcttgatactaacaaccactccctttctccaatgtccttcataaaggaatcccttgcatcatgagggccatttgttagcaaagctgagcattatccagaaagctcctcttgaccggccgtgatgtctctcatgaatccattgttagggctaccctcactcacataggctgcaccccaggccaccatgagccttggaacttgggcagttgggtctgaccccaaatacaaaactaatgctggggtctgaagagtccatcctccaagaaagtggtccttacatgatggtctcaggaaaagttatgtttttcataaggctgtctttggtcttgaaaagccaaaattagatattgcttaaatcaaggaacaaacaactggatatccatttgcctcctccagctgcctaactacagatcattcccatgttattcctatgctagatcagatgggcaattccagattcaagccttgatcaaataaggaaaggtacattcctctcctctgctccatccctcactgtggtgctgccttgctgatttgaggttcaaccagtcagttgtgaatggagagtactctcagtaggtgagatggtgggacggaaatgcatgcttatcctgcagcccacctcgccattagagcaactctcttaactgttatccaccctggtgcctggccctggcagctcatgggacgtcacaagaggacaatggctgggagaaggaccttctctcaagggtgccttggaggctgttttagggaatgaatggcttctgacatgggctttcttaaagttgccccagaagagaagttaccattgaccaggccctaggtgtttgcttagctcagagccatcaggagggtcttagctccttagatgagcagctcctgcactgtggtgtgaacgtggtttgcaaggtgccattaaataaacaagtgctgacaattttgcatgtttcctgggtgatattttattatactttcatcaaggaactggagcaccatatttatttaaatcagtacactccatatgttcctagcttggtgcaaagcaggcacaaatgtccacatgcagccagggtgctgactgaggtgaccagtttgcttgagttttcatactctgcactctccagtggaacagcagctgcaggactcttatttttgtgatgtggagcatgtctgggtgtgtggcagggggaactgaaatagtctctgctgactttttgtacctacagattttgtttcattgctcattttggaaaagggaagcccttatggggccaaattaatggtttttctgtaaatgattttttttccccctcaaactccattggcttgacttccagtggtatagaaaggcaatatggtgaacttctcagcccgaaaaaggagatctccaatcagggccgagaggctcatgctaaggtggaaagattttcctccgtgatggactcttggatacctacgggagacttaaaaggccctcagaccacaggattaatggtgagaaagcttcaggctttgagggtgaactacttggagttacaagttaatcgggagcttattaaaatctctggagaactctactgtgggaaattgggcttctatcttctctgctgatatcttattatttcaatctcctggtttattttctttggattttttattatgattttaagaaattatttaaaaagttaaaaatatttcttttacgtattccagtttagttgttttgaagttaattcagggatccgggatccccaaggtgaggcaaccgtgattttagacaaacttttttcctctcccaaatttgtatttgtgggctcagttctcatgctggtggcagtagggagctcagtgtttactgtggaattaaaaatgtttattgttgctgcacataggttggtgtgaaaggtaccaactgcaagtttcaacttgcaaaaacacttggccgttgggctcctttggaatcgtcttgaagcttcagattctgatatttcatgagcactttgcaaagtcactatgagaagcaccctccttcttacctgctcagctggagtcagttacagaattccttggcagctggctgtggacacgtgccgggcagtcaggagacccgtgggagctgtgggagtcctgcaacgtcaataggaagaggtggggacttagagattgccccacatatggtctgttgtgccagggcacacctgttgacactgagttccaaggaagtccagacattagagggtgatactctctgtccacagcacctccaccaagcgctctttgttcatcgacttagaaacagtaggaggcgggaagccctctcttgacaagatcctggaagtggccagctggtccctttccagccaagtgtgtggtgtgtccacttcctgggagggactgggaccaggaggcctctgagcccttcctcagaagtgtacatgcaaacaagagggggctgagccatacacctgtctctgagatggtctgagatatgtgcatatgggattgagcccttcttgttcctcagctgaattaagagggtgaccacagtgctcagacccccccaagtaaccccatttcccaaatttctcttgagtacacaatgcctcagactgtactttatgcctaaggaatagctgagaacccaactgaagacaagtgtgaactgcaggatatggttgtgaacagaactgacgtgtgcaacagcatggatggaactggaggacgttatgtgaagggaataagccaggcacagaaagacacaattctcatgttctcacttgtatgtgggaactacaaattcacacaattgaattcatggagatagagagtagaatgatggctaccagaagctgggaagggcagcagggggagtgggagtggggatgacttatgggtacaaaaatatagttagatagaatgaatatgatccagtatttgacagcacaacagggtgactatagtcaacaataatttatggtacacttaaaaataactaaaagtataattggattgtttataacacaaagaggtgacaaatgcttgaggggatgggtgctttatttaccctgatgtgatgagtgtgcattgcatgcccgtatccaaatatcttgtgtaccccataaatatatacactgactatgtactcataaagattaaaaccaaaaatgctgacgtggccatggggtgaccctgagaaagagtgagttgagtgtggcagggcaggtgccctgttcgctgacacgtcagattgtacctggggcctgtggtcatcgctgggcaccacccagcagtagggaaagtggcaaatggaacttgtgcaagagtgactcacccagaaggaaggtggggagactaaaaccatgtcatttagaaatagctgaaggaatgagaagtcccttcagacctagggggacacctggtatctgtcctcagatttcggaagggaatattactactaatactcatgataatcggagctcacatgtattaaatgctctgtgccaaactctattccaagcacttcacatgcaaatcttaaattaccctacaacatacataccattatgatcttcactttatagatgagacagctgtaaatggactaagaaatgtgagtttcattagaaggtaatggagggaaatatggcatgtgttaccataagttagcctcagtaggaggaagagctgtctgacatgataatatccccccgaaaggaaggtggaaatggccagaaggaagataattaaaaccacatgtattgagcatctaccctatgccagacatggcctttgaagctccccatgtattattttggttaatcctcacaaccactgtgtgagagaagaattattattcccgttttacaaatgaggaaattgaagcccagagacattaaataaatctaagaactttccaccagtaagtgacagcccagatttgaatacaggtatgtgtggttctcaagtctactgtcattggtgttcagagcaaaggtggaggcgcacaggtggccccggggcacagaaccaggctggttcccctgctagacactcctatagcagcctgaatttcacaagttgtgacacattcatctgctggtaacttttgttgcttgtcttccccgttagactgcaagatccacgtgggcgggggctccatgggtcctgtgcagtgctgtactcctaggcactagaaatatttgaaaaaatgaatgaataccagtagagatctcttgttcagacaggggaagttaaaataaggataatgaatctcctattgggatgttatcgggagattcttatgttaaattaggaatggattatcagcagttgtaatcccagtatattttcagaaatactggacagattttttttttttttttttgagacagagtctctctctgttgccaggctggagtgcaatggtgtgatctcagctcactgcaacctccacctcccaggttcaagccattcccctgagtcagcctcccaagtaactgggattacaggtgcctgccaccacatctggctaattttttgtatttcagtaaatatgggctttcaccatgttggtcaggatggtcttaatctcctgaccttgtgatccactcacctcagcctcccaagagagatttttatacatacagattcctaggcctatatcagccccctagaatcagactctcctggagcaggacctgtacctgtatattgcatcatttcctggttgatttgctacctggccagctgagagaccttggaggatgggtctaaagtccacctgagatactgggattcctgacccccaacatctgcccctgggactcatttcccacttcctgttgcctctgcccaagcttctctctgccttctgggcttcaaggccaggccttgctcgtggctggagcctggagggaggtctggtgccgagtcaggcatgggaccttatcagctgggtatttactgagcaaagttcaaccagggcagtgctgcagatccgggtttaacagatacctaggcttccgggactttgattcagagcccaggtccctggggcccttatcggtggataataatgggctccctgtggaagtcctaaggtctagtgtttcttggctgacccaggcctgctctctgagagcccaggatccctaggccacaggctgtctaggtgggcagcttgttgcttcccagccacggctgcttttcagttgctctcccaggccaggaagggccctatgcactggctcttatttgggtcaatgctttggtttcctggctttgatggcaagaggggaaggaaaccttccctcagcagcaggtggacactgtctggccccagggtacaaggatcacccttgggtaattgtcccatgccctgaaagtcactgagaacctgggagccacttgcctcaatcctaaaggtgtaggagaggtgaagggaagacaaatggcagcatgtcttaaagaatcacccaatcgattaatcaataagtatcaactgagcttaaaacgcatgggcatgccactgggaagacatagagaaataaggtacaataactcaccttgagacgtttataatctagttgtgggtataagacacttccatcaaaaagaataactattacataatagactgaatttttttgaatgcctaccctgtacctgaatttatttgaggcatatactgttctaccaatttcccacatcaagtgacttctctcaatattcctttgataaagaaactgaagattaagaggcacagagaggtttagtaacttgcccaggatcacacaggaaggtggtggcaggggcaggatttgaggcctgtgctatctggctcagagtccctgctcttatggctgtcctctactgccacctatgatgaatactaatcagatctggaaatgtttgagaagctgtagaatgtggaaattactcaggctgcaggggtcaggcaggagggttgcatttgtcttgtgtcagcaagaatcaagaggttggaagaagtgagagggaattctgaccacggaaaacctcaaccacagatgaggaggtgagacacgcaggaacacgtagagaacacagacagaccttctggttggagacagggtttgtgtagtagggagtgtgcaaagtggtgagaaaaatgggttcggatctcattctgaagactgtccaattctaggacaaggagctgggccttcgttgtctgggtgcaggggacccacagaaggtttgggagtaggaggagtgacaatactggagaggcattctaggaagtgtcacgtggttctccgtgttcaagcacgacttaggggagcaggcagatccatgaggaaatgagcactttggggtgggggctcgtctgagaaggaccatgggctccagggacattgcttttcacagccacagctccggagcaagccccagccccggcccggccataccagggcgtccgtgtgaaggagccagtgaaggaactgctgaggaggaagcgaggccacgccagcagtggggcagcacctgcacctacggcggtgagagtttgtgtgtgtgagagtgtgagtgtgtgtgtgtgaaagagaatgtgtgtgtcagggatagtgtgagagtgtatgtgtgtgtgagtatgtgtatgcgtgtgtgtatgtgtttgtgtgtgatagagtgtgtgagagtgtgatagtgtgagagagaatgtgtatctgcgtcagtgtgtgagagtgtatgtgtgtgtgagggagtgtgagtgtgtgagtgtatgcatgtgagtgtgtatgtgtttgtgtgtgatggcgtgtgtgagtgtgtgatagtgtgagagagaatgtgtatgtgtcagtgtgtgagaatgtatgtgtgtgagagagtgtgtgtgtgtgagagtgagtgtgagagtgtgagcgtgtgtgtgagagagtatgtgtgtgagggagtgtgtgtgagagagtgtgtgagtgtgtgagagtgtgagtgtgagagtgtgagagtgtgtgagagagtacgtgtgtgagagagtgtgtgtgtttgtgtgagaatgtgtgtgcgcgcaggcagatggcttgggaggtgaccaaaaggatcaggcaggaaggagcgcaggtcccttggtggaggctgccagggatagagctagggtggagcaactgggatgagggatcagggccggctcagctggcccaccgaacacagctactgtcaaggcctgagtgagcgaatgacttgcataccctggtgtgagttgggggctccccctgagaagaagaagacaccagctccctgagcgcacagacttcctgctaaatagaaacgcaaatctctcaagtgtaggtggtgatggttgggatacggggtgggatgttttgttctaaccagagagattcctatcttctattctcctgccctgaggccctctgggcaagttctctgcacagggccggttgacgagggctaaacattgaccctggtcttctcctctcccctctaggtggtgctgccccatcagcccctggcgacctacaccacagtgggtaagagtgccccgtagccctggtggcccccaggcctctcatctgggtggcatctgaagttctgtaatttccttcttcccacaggtccttcctgcctggacatggaaggttctgtgtctgcagtgacagaggaggctgccctgtgtgccggctggctctcccagcccaccccggccaccctgcagcccctggccccatggacaccttacaccgagtatgtgccccatgaagctgtcagctgcccctactcagctgacatgtatgtgcagcccgtgtgccccagctacacggtggtggggccctcctcagtgttgacctatgcctctccgccactcatcaccaatgtcacggtatgtcacacaaaggcaggactgcacccgcccatgctgagtgcacccttttataaccagagctgacttctcgatcctgatcttccttgctattgattctcaagataatcaggtcatcaaagctcgccttggtctccatggaggcctgctctgattctcatttcctgagataacttccacaaagatgtctcgcagcctctctcgtcatactttctgctcctcaggactggggaggtcttctctgattccctgttctaaatctccccagcttccctgcaagcagtgagtcttggttctgagttgaagtttttagtgaatgtggcaccaggcgagatctacatggggtcttgtgttggaactagcctttcatttctattcagataacttagggagtgattgttcacttaataatggggtttaacagaagatttctaggctgaacaacaggtgatatttttgatggtgtcagacccacgtgtggggtaattttttaaagttctgtctctactgtcagattgccttgttcaaatccctgtcccttcacttactagctatgtgactctgggtttagtgacttaaaactctctgagcctcagtgtcctcatctgtaaaatgggaataccaagaaaagggtcgttgtcaggatcaaatgaaataatgagtgtggagggcttagcacagtgtctggcatacagaaaccactaatatatgttagttatcatcatatcaaaatctgctaacattaaccaagggcttgatgggaaaggaagagcctcttcccccgggaatgaaggaaggaagggaaatagatttatgttaatgattcctgttcgactaaaggactgggaattttgcaagtattcaagggcaaaaagacctgtggttacagctgtatccagctccagtccagggaaaccgtgggaagtagagctgggccttgagcagtcccagagcccaccttcgatggtggtgcttgctttggtccaccttgtctcttccgtttccctccagggtccagtgtcatcctgatgcacctgcccctgcctccaagcaccttctatgaaaggcctgcagaagcccttccctcccaggtccacctgcctacccagcaaaccaattttggagcctggatgatgatagataagaaggagttaatccaacacctctcccaggcaactcatttccatgtcagaggcctggggtgagggtggtgggtggaggactcatggctcccacccatttcattaccaaggattcctttcattatttatcccctttcatcattcccaccttctgctttgaaaggttctgtttatcaaacaaacagtattcattaagaattgatttatttgttttgccattttgtaaattaagtcatcaaagctggctagagctgtaagtccacactcctgatcagcagagataagacctgctgtgtgctgagtggaagtaattgtattcccgagcaaagaaacctatagttacaggtttatgactgggaaatgtagaatttccatctggatttttgaaaagctgggaatcatgaggctttcccggattctgtctggtttcaggacactgggatggggaccactggcttaagtcaaaggagaggaagtgattatgctgtggtggggtgtacacctcagcccggatttcgggaggctggaaggcctctgagaccatttccagctctatcattctatgcaaaaacaccctaaagccttgctactcaaactcttgtccctggactggccacattggagtccccctgagatctgattagacatgcaaaatcccaggccccactctagacttcctgtgccagaagctgcgttctaacaagatacccaggaggttgagaaaagccctgccctaaatgattctaacagtttgctgtcaagacacagtgacagtaggagggatatatgacaggggagacagggatggtagggggagattttggcctccctctcatgaatccatgcagagagcatcctcttctatctgctttcctcaagtgtgaaagaaaagtaagaatccaggtcccgcccctgttgcaggcctgatctgaggtttgtgagggcagtcgccgtgcaggtgagaggtatgactcgcagagcattcaggagaaggactctaacacttggagggtcatggggggtgcccataagtgggatggccatggagatcagctcagagacagaggacgatgaggatgtggaaggcaccaggcagcagcaggaaggaaggccaagtttgctgacaaagcagtgcttcccccatctggggatggccaggcctccccatgctggccaccactagaggggtgggaggtgatggagctgtgttggcccaaggggacctccaaagctgttgtgtggagcccggactgtctttgtgtctgggcaggacagtggccaccttccagatacagcttccaggctgtggtttaacatatattttcacagattttaagatgcatatatttttaatgttttaagatctctgaaatagaaatgaattttgtattcaacgaaacctggaaaatcctctctaattggcctaacccaatgagttcattactgtttgtattctatttcgtagatgagaaaaatgagccttctgagcaggaagtggcctgagcaaagacatatagctaggaagggtcaggattggggctgcggttgaagtcagcctggctcctcccttggggaagactttgagcaggaggaggtggagccccatgaagtgagaaaccaggaaagggcagaattgaagggggagatggagacccctctaagggcaaggatgggtggatgggtctcctggggctgctaaccctctgtcacgtgttttcctgtcacagacaagaagctccgccacgcccgcagtggggcccccgctggagggcccagagcaccaggcacccctcacctatttcccgtggcctcagcccctttccacactacccacctccaccctgcagtaccagcctccggccccagccctacctgggccccagtttgtccagctccccatctctatcccagagccagtccttcaggacatggaagaccccagaagagccgccagctcgttgaccatcgacaagctgcttttggaggaagaggatagcgacgcctatgcgcttaaccacactctctctgtggaaggcttttaggcgtggctcccacctgagtcctgttccctgaaactgggattttaaaatgagcctggaattgagccccaggttcatgcttgtttggagtagtcatttcatgactacactttctacgcacagctagaattgtagacctgtaaaccttccttcccttcttccttcccctccctccctcacttcctccctctcccccatccttccattcttcccctccctcccttcttcctttccaaccccttccttccttttcctccctcccttccttccctccttcccttctccctttccaaccccttccttccttttcctccctcccttccttccctccttcccttctccctttccttctttacctccctccctccctcgcttcttctctctttcttacttcttttttcaattctgttccattttgggaggtaattatagggattttagcaataacattttatgtcaaatgttgccaagtctgtggtccatgggctttcatttctgtcacatttcatttcttggaaaaggcctccttcctccagtgcctgctgaaccatcttagggtcactcacaccctctgtaattttaagatgtatgtggtggccggcgggaagaccagccccgacagcacctcctgagaaagtcagccaagggcctaccctgatgccagagtccttgagctgtcagttcccacagttgctcctttgtttgctcttctcagcctcggccagatttacagtccaggcagcaaaatctcaaggcctggggctcagagtagtaaggggtgggaagtgggtggcagggagaaaagaacatcagggtgggtggggacaggccagtgacgaagagagggacagaggagggatgggaacaggctgtgcatcttagttggagagaggggtgtgggaggaagcttgagtttgatgcagggaggaggaaggctgaggaatgacttggctccagattacttggttattaagaagaacaataaactaaaggaaagcattgcttgaagagatggttttgctgctctccttgaggatacgtgcaagggaagttgggctgttgtaaacagggtgaagggtgtgtttggtcggccatttctgtctcacctctaggccctctgctggtgctgtggaggccaagaccccattaagcctaaaggtgatgggtcctcgcctagtgcttagtgctaccatgtgggttttgtttctttccttccttccttccgtccttccgtccttccttccttccgtccttccttccttccttccttctttccttccttccttccttccttccttcctctctctttctttcttttttttggttttttttgggacggagtctcactccattgcccaggctggagtacaatggtgcgatcttggctcactgcacctctgtctcccaagttcaagtgattctcctgcctgagcctcccgagtagctgggattacaggtgcatgccaccatgcctggctaatttttgtatttttagtagagacggggtttcaccatgttggccaggctggtctcgaactcctgactttgtgatccgcccgcctcagcctctcagagtgctgggatcacaggcgtgagccaccgcacccagccttttaccatgtgggtttctttagtgtcttaaaagcgtccataagccaccattctgtggaaccaaggccccctccacgcaaacaccctccctcctggggacctctggagcctcagccagaagtaccattaggtttaattttaatttgttttgctggagaaacatcaggtttgtaggagactgagttgttagcaggtgtgcttagctcttgatagtgaacgtgtaccttgggaactggctcacccacctgctaatagcaccatcgtcactattaagcagacatttcagttggtagaatccatgtagaagtcatggacttttctgggaaatgacttttctgggaaatgacagtttctttgacatattttctttgcccactttaaataaaaactctggagaaagttgtctgttttggattttctttttctgcttaagattaattttgacccagatttctctgtgcctgccttaaatcccagtacacaaatcttgaattgtttttattcagatattttttagatttaaaagttcaagacagcatttgagaagatgcatttacatctttgtcggtactgatggtaagtaggtgggcagggctctcagtcctatttgattaaaagccctggttttccataaaaaaagacactatgcaagatttttcagcgtaccatttgagagggtgcagaagcaacctccgtaaaggagttaaagttggcaaaaactagcaaagaaatatagtactttacgtgtttgctaagataaatggtctattttttctcttatcttgaggtcaaatgtcttggtagtagtccatctgggtttcttcccgagttactctgctaagatggaaacattttcataaagatttgtagagacttttctgtgccaaagtgtttcatttcttatcaagttgatccccctaagctttcagtcccatgttagacagtgtgattagaggaaggaacttaacactagtcttgttgactttgcaaattgatctgttgcagaagaagataaaaccagtccccaccgtgcctgcagtccagttctcccaagcaggacatgcgcgtggctagggggcttgttgtccaggagagtggggagctgaggagagagggaaatcttttaacttgattgctcttcctgttattcacgccatcatgagtaacttctcatgacgctgagtgttcagggataagttctaccacgggcatttccatagcaggctctgaaaatccatcaatcaggatccaggagcatgtgacatcaggcaggaaccatgacctaaggaagccatctcatagggccagacatcaccacggaatggaaattccagaagccaattagtcccctccaagatcagtcaatggagtgagttacagtttggaaggggtctccctttcctggtgattttctgagtttctaaaggcctctgagctcactgcctacattgttaatcttcgttggagtaattgttttaaaattatctacactattctgctatgagccttatttccagattttggaggagagagtacatccagttatttagccttctttagattaccagcaccattgtctttttggcttactctccctgaaaaccagaacctagaaaaatgacatggaaggaaagggtttgaggttttatcttcagctttagtgaggctcaagtgaaagggaagatctattaaaaatgcatttgccttactctcttttgaggtagaggcatgaaaaacttgatctgcaacttgaagaagagcatggccagtgtgatgtagattagtgctttacaagattctgatccatgaggctgtccaattccagcataaaacaggctagcaaggagacaagtatgtggctgagatgaagaagatagacatctggaaaagaacaaaatcacatgaccaagtggctcaaattctctgaacatcaggttgcactcatctctaagtggaaatctgaagacatgttctaaagctaaacacaaatttcttgaaatcagaaaccatagataacttattttgcattaatttacttcatttgagtgtcaaatatgagactctctcaataatttcttgttgaattgaattaaccggggggattctctgtccactgcttctaaatattgatatagatgattgcaagttgattataatgaagtctcctttattggatggacagagacatgatgcctggcagatgttttttctgaaagcttgagtagaaatattcataagctggtgatgttaatctgtttgtcagttcttctacagctgtggctgctgtggaaggtgtttcattcattcattcaacacagatttaaaaaaaaattattttattgaaagttgacaatttaaatatgtttgtggggtatgaatataatacaatatattatgggatacaatttacagattgatgttataatttatgaatacaatatgaaatacttaaatcaagctaacatatacattatctccaatacttattttttgtggagagaacatttgcagtttactctcttagaaattttgaaatgtacaatacattattattaattatattcaacatgctgtgcaatagatctcaaaaaaaaaacttattcctcctttctaactaagactttgtaccttttgaacatctctccattcccccataccccagcctctataactaccattctactctctgcttctacgtgtttgattgttttagattccacatataagggaaaacatgcagtatctgtctttctgtgtctggcttgtttcactcagcataatgttcaccattcatccatgttgttgccagtgatagaagtcccttagttttaaaggctgaatagtattccattatgtatatatgccacattttctctatccattcattgcttgaggggcacttaggttgatttcataatttgattattgtgaatagtgctgtgatgaacattggagtgcagatgtgtttttgacacactgatttaaaatcttttgggtaagtacccagaagtgagattgctggatcatatggtaattctagtttaagcttttcaaggaacatccgtacaattttccataatggctatactaatttacattcccaccaacagtgtacaagggtttccttttctctacatccttgccaacacttgctatcttttgtctttttgataatagccattctgacaggtgtgaaatgatatctcattgcggttttaatttgcatttctctaatgattagtgatgttgaacatgtttttcataaatgtgttagccatcaacacatatttattgagtgccaactctgggctaggcaggcatcttggattattatagatgtctgctttgaaatagttttctagctcagtgatttattttcagtatgagtgtccattcttatatatgtatatttagttatttataaattgtatatcccacaaacatatagctaattgtatgtattataaaacattcacaataataggaatttaaaaagatgaggtaaatataaaaataaatattttaactattttatttattgactacaaaaattcatttgacctcattaactgtaaataacatctagaaggagcatctttgtgacatactgatttgaagatctgggtttaacttcaattgatttcggtgttttgtcatagctgaaaaagataccatacaaagatgtttagatccaaataaaaatagtatatcattgattatgctaaataaattacaaaagttattttaaaatgtcttccatcagtcatgcaaaggtgttattttaaaatttggtcagcaaatttccaccttagctgatgtcaactggtcttacacacttattgaaggagttgcctttttaacccattgagttaaaaccactcaaactctttatttggaaaaattttcagcaacctaaaaaattctgcttctacatattttttaaaaaggctgaagatatggaagtttttatgggtaacacacacctatattgttgttagcaacaatatcacatgatggaaacattcctaaccatctactaaattttcacttgctaaatgttcccctcattgcatgaatttcaaaaagcattaatgttatcttgatcttgatgggctggattaagtacaaattgtgtttactacttaaaaaaatctgcaggtaacgtattttggacaaccaacttatcaaccaaaaaagatcagcaaatttagtgtgcttgtatttgtattaagtaaatagatatttaatatctaaattataattaatttaatttaatgatataactcattaatttaattatatgattaatttaattatatataattcattgctttaattatatacgattaatttaattatatatgtcattgctttaattatatatgcttaatttaattatctataattcattgatttaattatctatatgtgattcatttttaggtttcacagttcgttgggtgtctttagtcaagagataatcagtgattctttttatggcacaaaagggtctcatatcattataaagactgtacatttagagatgttgggtccataaaattaaccacactgatatcatccttaaatctcaatatgttgcaatatgatggaagtgaattcactgagggcatcactgttaccccccatttccatgcataacttcctcttgtccctcaggacactctcagaaccatgagtcacacataactaaagcgtggggagcaccagcactacggtgaccaactcatcttggtttgcctgggaatttcttggctttaacattgaaagtcctgttctaatatatccttcagtctggggcaagcctggacttttggtcacaccagtccacattaatattgtctggtccacgttaatgtggactggtgtgaccaaatgtccaggtttattatttatatgtattttcaaatacaaataaatcttaatttcctttttctttgcttattttttcttttacttctttttcttttttaaaataaattagaagtttcttttcgcattccaatggattgcctcatgtggtccctaagacacatgtgtcctactttggtctctttggagcttataaaagcaattcttgcttaatagattcctcactcaaatcccgtctggagaccacaggagagaagttggctctggcctgaggaaccctgacattatttgttctaagatgggactgggtccaggggcatcaatggttctgccagggggccatcctggtgtttgtcaggcagtagcatgagatacaccatctttatatgctctcctacaactaaaatccgcttctcattaaaagttttctttatccaaactatcctaaggtgacactcatattaatatgatagtgttaactcatctgggaaaaccttaagaggaagaaaacacacttttcataagatccagatgttgtctttccccgcccacgcccattaggtggaaatctgtaacagcagttctcaaacttggctgcacattagaatcacttgggaatttgaaaaatccctgtgtccagactgtgcctttggctgattaaaatggacttgctgggagtggatgcaggcatcaggaatttttaaagctcttccaggtgactccaatgtgcggtgaaagctgagaaccaccacacatctacctttcccctccagtggtgggtgggactgtggttgagtctgaatgctaagaaagagttctcagaggcaacttgtgtgtggcatgtagcatggatgctgtcctattcaattagaagttttttttcccccttactaaaccaggcagggttatggtaattcttactctcttcattagagagtgaaagcccagtggtcttagcagtcactataggaggtctttagagtagactgactcagcaaggaggtatcagctaaagtgattgtaaatgtcttttatctgacagcttgacgacttgcttttcatgtgtgtagacccataagcaaatacaagaatgaaacataaagaaaatagcaagatgtcggaggcatctgccccttgtctcacctgtgtacttttaaacctcagtagtggattgacatattcaaatatggggcaagctgggtcaggtgaaaagataatggagacagcaactatggtagaaccccaaatttaagactttatttgaagtctactcatcgcctccctgggcaaagggctttatgacattcaagccaaaccaaaatttaaagaacgagccatataggactgataaatctgcttttcctaattataagaactagtgttccacaactagtgtccttatttcctattttcgattctgcctatttcagtggagaaaggttttggtgtctgcagtagctggaagagctggaggacttgaggctcaggagcctaaagaagattgtcaccaacttctggtagatgagaatggagactcttgcttcctttacaatgtgctatagcattcatgtgctgcatactgtgctacctgctaaggaattcaaagaaaagtcaggtgcatccttgatcacaagaaactcagagttattggggcaaatggaaggttataacatagtaaaacaagtagagtggtagatataaacacagatgctttacatctcacatttgctaaggagatgttaccacgatctcacttaagcctctcagaaagcaaataagggatgcactactttaattcccaagtataggaagaagaaacagacttaaagaggttaagtcacttgtccaagtttacatagtcagtaaatggcagtgctggtgttcaaatccagcatgttcaatgttcgttcttttaatcctgtagccacatagctactgacattattggtggccatttggatgactactatttttattttatcaagccttagctcacatcaatacatcaagtgtttgttgagtgtctttctgtcatggcagacactatggatgaagaagactggatggttggaatgtttccagctggagtgcctcagatcatagtaactcagcggtctatataatgggagaattcactccaagaggaggagacagagagaagtggatgtgaaagtttcatgtgtgtgctttgggacatctagccagttctgaattcagagtggatatgcagagagaagggcaatattttctgccagcgtgttggttgctctgtgcccctgtgatctagaatctggatggttagtggtgcctctcttcaaaatcatatataggctctagtaacctaatggcatgctaaactttcatcttactgtgctgattgcctatgtatcaatttccaaacctcatggtttttgctaccaaatgaagtaattttgttttgaacccacagtatacacactcagtagatagaggaataaatatgaatctacataaatagacatatttaatggatacagacagattatagccagaattcttaccttctggtacttttgtggtctcttttgaactttgtccctcagttgacttataaccaatgtataggtcagcagaggcagcagcatggctgtgtgcaggggcttttttttgggtgttctgatcttgcaagttgcaattagaattctgagtttgctatgccatcttgggctcagattctttttctccatcaatcaaagagagtatcatttgcccatttcttagaatgagacattttgagattgtgtctgcaaaagtacttgatgcaagatgatgcctgggtgctttacgaaatcaaggggcccaattgtggcagctttattttcattatgctccttttttaggccttgtttggggatatattattcaccgattcaacaaatgcttagtgaggaactactacgtccagcccagagcttggacacttcacaagtcaagagagtgttgccttacttctttgtttcctgacatatttaacacaagtcagaatatttaaaagactaaaagtaaatgtattaagcattttggtcagtttcaacacaaaatatagttctgataagttatctatcaaaattttctaatctgtagatttggtttaaaatgcctttcagaagatggaaagatgtgatcaatgtgatgtttttacagagaaaattctaaataggtatttctctttattctaaaagtgattgtcttttgtttttccaaatgactcagacttacatatccatgttctcaccttgtaaactgaaatcagcaagccatcttactaaacaaaaatagtgtaatcctttgtgtatataccaacacagagtcccagggccttggggaaaagatgcaataaaaatgcctaaataacatggctgacctgatttctagagaaattctctctgccttgggaaagtaagttagaggaaagctttttcagggttgcatcatttggccctattcacctctcaggaacagtgactttctggtctgtgtacttgaagaccaagaggcaggccggagatcctagtgaggctcagggattttgaggagccctgccagatcccagcagtgactcagcgctaatacacagggaagagttcagactgctatgcatccgttcactgctgtgttccattattacatggttatatacatgaaatgtccactgatgacatatcataagcagaagattaggccttgaatcttaaacttttaaaatttaaaaacagttggccaggcgcagtggctcatgcctgtaatctcagcactttgggaggccgaggtgggtggatcacctgaggacacaagttcaagaccagcctggccaacatgatgaaaccccatctctactaaatatacaaaaaaaaaaaaaaatttgccaggcaatccaggtgtggtggcaggcacctatagtcccagctattcaggaggctgaggcaggagaatctcttgaacccgtgaggaggcggttgcagtgagccgagattgcaccactgcactccagcctggacaacagagcgagactccgtctgaaaataaataaataaataaataaataaataaataaataaataaataaaaacagctcacaggtatgatagaaacactttataaacaaaatttaaatacaaattatttttcttatagctgatattgaaatagaatctcctggctggaaaataattattttcttccatattgcagtcctttgtcaccagtttttagtctgaagtaaaagtaccttttatatacttaaattatatgattgtcagaagctttatcatactagtaactgcagttattaaaattagaatgtacacacagtcttactgaaaatcctgcatattcttctgctgggaaaatgcaatgcaatagtccaggttgatcagaagcttgggtgttggataacccattcaagacacaggtgggctggtaagcagctgggagaggtatacctactggggctcgattccttaggtttatgccctgaggttaccatagagagttttgatacttcacatcagcgttacttttttttattaatcattttattatgaaaaatttcaaacatgcagaaaagtttaaagaattgtacagtgaatgcctgtaatcacctagattctacaatgaacatttagctctagatgatcagaaatctatcaatccatctattgactctgtatttttctgttagatgcatttcaaagtaagctaagccatcagtgcactcaccctaaagactttaggatgtatatattaaactgatattaacttgaggttctttctttttttattgtgaggtcaaatttacatagagcaaaaaaaacaaatcttaaggacatcattcagtgagttttggaaaatatgtaatgctgtgtaacccaaatctctattaatatacaaaacaatactattaatccccaagtttcctcgtgctccttatcaatcagtctccacctctatctccttagaggcaaccaccaatttcttttcaccatagatgagcgttgcttgtagaataagggtgaatggaattacacagcatgcgctctttgtgtagctcttctttcacttagcataatgtttttctatattcatccatatattgttgcacgtataggcagttccttttctgctgaatagtattccattgcatgaatctaccacactctgattatttattctcctattgatcgacacctgggctgtttccagtttttggctattatgaatacagctgctaagaacattcttgaacaagtatttttttttcatatttggccagatgttttttatttcttctggataaatacttaagaatgaaatcactggcttgtatagtagatatatgtttagttttacaagataactgccagacttttttccaaagtggttgtgccattttatactctcaccaccaacaaatgagaattctggttattccacaccttcaacaacatttggggtatttcacctggtttat

SEQ ID NO: 95 - DNA, 3314 bp, Homo sapiens
gaattccggcaggcgcccatggcgggctgagtcctgcccatgccctggtggcctggaagcctgcatgggcgccgtgcaaagatcaacgttttccagaggagcttttgggctcatcactggcctggggagggcttgacacggggttcccacagcttgccccacaccaccttcacacccacacacagcaggtccccgcggggccggtgcaggctgtggctgcccgcgctgcgctgttgctctgtcccggctggctggctccgagtgtggggcgctctgggccggggccgctggggcgcgcacagtggggtgacaggcggcctggctgcagaaacgttgcaccggtgcctgaggtgggaggatgtgatgacgcggcccacgcagcgggaacccaggcctttaaaaagcccaggaaacagcctcagctcaagcggtggctccactggaggaaaacacaccccggtctcacattaaagaagccaaactgtcggcttcaaagagaaaaggcaacatcctgtcacaggccatgctctggcaaaaacccacagctccggagcaagccccagccccggcccggccataccagggcgtccgtgtgaaggagccagtgaaggaactgctgaggaggaagcgaggccacgccagcagtggggcagcacctgcacctacggcggtggtgctgccccatcagcccctggcgacctacaccacagtgggtccttcctgcctggacatggaaggttctgtgtctgcagtgacagaggaggctgccctgtgtgccggctggctctcccagcccaccccggccaccctgcagcccctggccccatggacaccttacaccgagtatgtgccccatgaagctgtcagctgcccctactcagctgacatgtatgtgcagcccgtgtgccccagctacacggtggtggggccctcctcagtgttggcctatgcctctccgccactcatcaccaatgtcacgacaagaagctccgccacgcccgcagtggggcccccgctggagggcccagagcaccaggcacccctcacctatttcccgtggcctcagcccctttccacactacccacctccaccctgcagtaccggcctccggccccagccctacctgggccccagtttgtccagctccccatctctatcccagagccagtccttcaggacatggaagaccccagaagagccgccagctcgttgaccatcgacaagctgcttttggaggaagaggatagcgacgcctatgcgcttaaccacactctctctgtggaaggcttttaggcgtggctcccacctgagtcctgttccctgaaactgggattttaaaatgagcctggaattgagccccaggttcatgcttgtttggagtagtcatttcatgactactctttctacgcacagctagaattgtagacctgtaaaccttccttcccttcttccttcccctccctccctcacttcctccctctcccccatccttccattcttcccctccctcccttcttcctttccaaccccttccttccttttcctccctcccttccttccctccttcccttctccctttccaaccccttccttccttttcctccctcccttccttccctccttcccttctccctttccttctttacctccctccctccctcgcttcttctctctttcttacttcttttttcaattctgttccattttgggaggtaattatagggattttagcaataacattttatgtcaaatgttgccaagtctgtggtccatgggctttcatttctgtcacatttcatttcttggaaaaggcctccttcctccagtgcctgctgaaccatcttagggtcactcacaccctctgtaattttaagatgtatgtggtggccggcgggaagaccagccccgacagcacctcctgagaaagtcagccaagggcctaccctgatgccagagtccttgagctgtcagttcccacagttgctcctttgtttgctcttctcagcctcggccagatttacagtccaggcagcaaaatctcaaggcctggggctcagagtagtaaggggtgggaagtgggtggcagggagaaaagaacatcagggtgggtggggacaggccagtgacgaagagagggacagaggagggatgggaacaggctgtgcatcttagttggagagaggggtgtgggaggaagcttgagtttgatgcagggaggaggaaggctgaggaatgacttggctccagattacttggttattaagaagaacaataaactaaaggaaagcattgcttgaagagatggttttgctgctctccttgaggatacgtgcaagggaagttgggctgttgtaaacagggtgaagggtgtgtttggtcggccatttctctctcacctctaggccctctgctggtgctgtggaggccaagaccccattaagcctaaaggtgatgggtcctcgcctaggcttagtgctaccatgtgggttttgtttctttccttccttccttccttccttccttccttccttccttccttccttccttccttccttccttccttctttccttccttccttccttccttccttcctctctctttctttcttttttttggttttttttgggacggagtctcactccattgcccaggctggagtacaatggtgcgatcttggctcactgcacctctgtctcccaagttcaagtgattctcctgcctgagcctcccgagtagctgggattacaggtgcatgccaccatgcctggctaatttttgtatttttagtagagacggggtttcaccatgttggccaggctggtctcgaactcctgaccttgtgatccgcgcgcctcagcctctcagagtgctgggatcacaggcgtgagccaccgcacccagccttttaccatgtgggtttctttagtgtcttaaaagcgtccataagccaccattctgtggaaccaaggccccctccacgcaaacaccctccctcctggggacctctggagcctcagccagaagtaccattaggtttaattttaatttgttttgctggagaaacatcaggtttgtaggagactgagttgttagcaggtgtgcttagctcttgatagtgaacgtgtaccttgggaactggctcacccacctgctaatagcaccatcgtcactattaagcagacatttcagttggtagaatccatgtagaagtcatggacttttctgggaaatgacttttctgggaaatgacagtttctttgacatattttctttgcccactttaaataaaaactctggagaaaaaaaaaaaaa

SEQ ID NO: 96 - DNA, 771 bp, Homo sapiens
atgctctggcaaaaacccacagctccggagcaagccccagccccggcccggccataccagggcgtccgtgtgaaggagccagtgaaggaactgctgaggaggaagcgaggccacgccagcagtggggcagcacctgcacctacggcggtggtgctgccccatcagcccctggcgacctacaccacagtgggtccttcctgcctggacatggaaggttctgtgtctgcagtgacagaggaggctgccctgtgtgccggctggctctcccagcccaccccggccaccctgcagcccctggccccatggacaccttacaccgagtatgtgccccatgaagctgtcagctgcccctactcagctgacatgtatgtgcagcccgtgtgccccagctacacggtggtggggccctcctcagtgttggcctatgcctctccgccactcatcaccaatgtcacgacaagaagctccgccacgcccgcagtggggcccccgctggagggcccagagcaccaggcacccctcacctatttcccgtggcctcagcccctttccacactacccacctccaccctgcagtaccggcctccggccccagccctacctgggccccagtttgtccagctccccatctctatcccagagccagtccttcaggacatggaagaccccagaagagccgccagctcgttgaccatcgacaagctgcttttggaggaagaggatagcgacgcctatgcgcttaaccacactctctctgtggaaggcttttag

SEQ ID NO: 97 - DNA, 96599 bp, Mus musculus
  misc_feature (3729)..(3748): "n" at positions 3729 through 3748 can be any base.
  misc_feature (4902)..(4921): "n" at positions 4902 through 4921 can be any base.
  misc_feature (7901)..(8020): "n" at positions 7901 through 8020 can be any base.
  misc_feature (12187)..(12206): "n" at positions 12187 through 12206 can be any base.
  misc_feature (36676)..(36765): "n" at positions 36676 through 36765 can be any base.
  misc_feature (51928)..(51947): "n" at positions 51928 through 51947 can be any base.
  misc_feature (56214)..(56713): "n" at positions 56214 through 56713 can be any base.
  misc_feature (58367)..(58386): "n" at positions 58367 through 58386 can be any base.
  misc_feature (63327)..(63350): "n" at positions 63327 through 63350 can be any base.
  misc_feature (66416)..(66549): "n" at positions 66416 through 66549 can be any base.
  misc_feature (67304)..(67872): "n" at positions 67304 through 67872 can be any base.
  misc_feature (84883)..(84902): "n" at positions 84883 through 84902 can be any base.
  misc_feature (91740)..(91802): "n" at positions 91740 through 91802 can be any base.
  misc_feature (95348)..(95367): "n" at positions 95348 through 95367 can be any base.
tttttgaaaggtagataaagtctaataaattctggaagacaactgagttatcacggtttgatgagagcataatttatattgagtatattttctatttattgctactaataccaacaaaaccaaaacaaacatctacatcattcagatataatattttctattaagattctggaaagaaaagaaacactcgtaactaaagaaaacttaaaatatctgacattctgtcaagcaatgaaaatcagctaatataccaatggtaacataagtacaaatccatgtcatgtgtatgtttatctccacacacaaaggccattgctaagcagcagagagtcaaggtatgtctgagcatgatggtggcagagcaggatcaaaaaagagcgtgcttctctgaacttgcatttgatcatattgtcagaacgcaagcctcctgtaaacttactatttattttcttatgatttcatggatactgagacattgataaccagagttcagcattttctgttgtgagacaacagtaaacttagccattgtgctagtctattgctgagactacagctttcttatagagaaacgcatgacctgaagggaaatttaagggttgtggatttgaataagagcaagaagtggtacatgggatggtttggagtgggggaagtgaaggaagaaaaggtgcaattatattataatctcaaaaataaaacagataaatattttttaattaaaaaagcagagataaagtgttttgacttggaaatagaaagatttattctattatatgcattcttttctggagattccagtatctgacgcttgtctcctgtgtggtaatactgaagttgtagaaacttttaaaacatcagacctgtcatctaaaccctaagagaacacaaacgccagcccagaatactatacccagcaaaaatctcaattaccatagatggagaagccaagatattccttgacaaaacaaatttaaacaatatctttctactaatccaaccgtacagaggatacgaggaggaaaacaccaacacaaggagagtatctacaccaaaggggggggggaacaagaaaataatcatccacaacaaaaccaaaagaaaagaatcacacacacacatataataccaactccagcaacaaaaaataacaggaaatgtcaatcatctgtctttaatatctctcaacatcaatagagttagtccctcaataaaaaggcacaggctaacagattggatatgtaaacagaatccaacatttttcttcatataagaaacatacctcaatgaaaaagagagacactacctcagagtacaaggctggaaaaaacgttttgcaagaaaatggtcccaagagacaagctggagttgccattctaatatctgataaaatagactttgaaaagttatcaaacaagaagggaaaggacacttcatatttattaaaggaaaaaatccaccaaaagaaagtctcaattctgaaaatctatgcctcaaataaaagggcacccatattcataaaagaatgtttactaaaactcaaaacacacatttagcttcacatattaatagtgggatatttcaacaccccacgttcaccaatggaccagtcattgaaacagaaactaaacagacagtgaaacaaacagaccttacaaactaaatagatttaacagatatttacagaacatatcaccccaaaacaagagaatatgccttcttcttagcaccttgtggaaccttctccaaaactggccatataataagacacaaagcaagactcaacaaatacaagacgaagaagctaaaaatatacagtgaaaaaaagaaagaatcttcaataaatgtactggtctaactggtggtctgtctatagaagaatgaaaatagacccatatttatcaccttgtataaagctcaagtccaagtagatcaagaaacacagtaaactagatacaccaactctaatagaggagaaagtaaaaaaaagcctcgaacacatgggcacaggagaaaactccgaaacagaactccaatgggccagactctctgatcaacaatttataaatggaacttcatgaaactaaaaagattctgtaaggcaaaagacaccatcaataggacaaattggtaacctgcagattagaaaaaaaaatcttcactaaccctacatctgacagaggccgaatgtccaaaatgcataaagaactcaagaagttaacctccaagaagcaaattgcccaatttagaaatggagtgcaaagctaaacagagaattgacaacagaagaatctcaaatagctgagaaacacttaaaaaaaatgttcaacctccttagtcatcatggaaatgcaaaacaaaattaccccgatattccacctcataccagtcagaatggctaagatcaaaaaattcaggtgacagcagatggtggcgaagttgtggagaaagaggaacactcctcgattgttggtgggattgcaaactggtaccctagacatcaatctggtgcttccttagtacatttgaaatagttttatctgaagacccaattgtaccactcttgggcaaaagatgccccaccataccacaaggactcatgctccactatgttcatggcagctttatttgtaatagccagaaggtggaaaccacccagatgcccctcaaccaaagaacagatacagaaaaatgtgctcaatgtacacaatagaatactattcagctattttttttcaaaaatgaggacaccatgagttttgaaggcaaatgaatggaactagaaaatgtcatctcaagtgaggtactcaagaccccaaagaacatgcatggtacatattcattgatgaatggatatagccaaaacgtacagaatactgattatacaactcacagactggaagaagtgcaacaaacagaaaggcccaagtgaggatatttcaatcccacttagaatggggtagaaaataatctcaggaggcagatgaagggagggatttgtgtgggagaagggaggatgaggggaaaagaagaacatgatcaggtatagggggagaggaaatattcagcctaaggggcagagaagagtggggaccctctagatagtaccagagatccaggaagtaagagactctcgggactcaatgggtgtgacccttgcaaaaattcccaacgatggggtgaagaaattcgaagactccacccccagtagatagatggggacaggcctccagtggagagacaggtttaccaacccatagtcaaaatttctgatccagaattgttcctgtctaaaagagctgcagaggcaaaatggagaagagactgaaggaaaggtgatccaatgtctagcccaaatttcaatccatctcatgggggagtggggcaccaaggcctgatactattactgatgcttacagacaggagcctggcagggctgtcctctgagagatcctaccagcagctgactgagattaaaatacacacatattatagtgcatggtagcaagtccaacatttttaaaaaatttttattatatttatttacatttcagccattgacccttctttcctggtctgtcctcccacagttcttcatcacattcttcctccccacttgcctctgagagggtgctccccactacacgaggcgtctcccttccgtggggccttaagtctctctaggattaggcacatctctcactgaggccagaccaggcaatcctctgnnnnnnnnnnnnnnnnnnnncattataaggtacatagtcataggtattttgtcatagcaacacagaacatagacggtagtcatcatatgtattctatgtactactccttaactgctattaggatacattgtaactgtcaatgtagttctgtttgttacaaaattacaatttaaagttcactttgacatcattttaaaatacaaagcaaatgtatactctaccctctgcccccaaagttagtatcttgcaaatattcaaatcagaacttaaaactggtaccatccactaaacaaactcagccttctgcagttatacatgctcctatttgtactggtgcatgtatgtaggggtctgtgtaatttgatcacatgtataactctaagcaatagttggcctaatcaagccatgtaactgcatcattgcttcaaatttcctacctgcatctacttctaattccatcccattctcttcctttttccttgcccagaatgatcagcagtatgttctccacaaatatgcactgtattaaagaaaaacatgttagtttaatacttaataaccttaaaaaataccgtgaatttctaatgtgtttattgtaaagattaataagaagctttagattcttattaattaattattaagtaagtacccctgagggtcaaggctttcccagcccgtaagtgaaactatgtatacacgggtagactaaagaagagacataccaaccaggaataaggggtgggccttatttgagctttgttttaagtattggaaaagacaaaaactcatgagacaaaggcagatgtgaaaattagtataacatatttgagaatatgttggttctcaggtggagccaacttttttttagatatggttaatttttatagttgaaaatgtgttaatcattaaaaggctagcttgctaaattattaccaaataaaaatatgttatacttgaaatcagcttcaaaagaatttatggtggatatagaatgttaaactgagaataatgaaacaaaatatgagctgataattgattaagacaaatgacacggtttactcaagctcattacacaatatctctaattggttagtattcttgggattgtcataataaaaagaaaaaatgatattcctgtgtaaatcagtacatgacaaattggggagaccattannnnnnnnnnnnnnnnnnnnctagtacacatgtttctcaatgaaaacaattctttcaggacatttgcgacttagataagaaattttactagaatatttaagactgattcccttcaaagagaccatactttgtccacaccgagcaatgactacaaataagaataggtctttggtgaggaaactgagggcaatgacacaattataaaaacattataaatatagtcattagctgtctttttaaaaaaaaataaggcctggtttataagaagccagtagagattatgcatgctattcgaaggtatccttgtaaatattatttgttgaaattaattttccattctcgactttcttgacagttttctggtctccccttcacttccaactcatacattttagctttgggttttgacattaggatgaaagatctttggaaatagtcacaaatgttttgaggactggggaggtgatttaatggataaagcacttacccaggcagaaaggtccaaaggtcctttgtattcctttatgtgggttcaaagttcagatctccagagcctacagaaatgtcaggaggtgtggcagcctcttgtcatagaactactctggaggtggagatgggctcctgggccactgtttgtgcacatttgcctgaactgacgatttctttgggaatgatagagcttccaagagtaaaatgaaaactcaaggaagacgacggctttgagcctccatatgcatgtgcacgtgctccacacaagaaaaagtcaaatgaagggaagaaatgttttcaaagtcaaatagtttattagaaggatgatttctacctaatctatttgttttgcggtgggaaggcctctggactattgcttgaaaagtttctcttctgatcgcatcaaccccaaagaacacgacccaagtcaaaccacgtgatctctgagaggatgcctgttaagtctaagattttaaaacatgttttatgatcctacaaatatcaagcaatcgcgcggtaagttgacagattgttttaaatctatacgaatttcagatatgaaatacaagcttgcaattactttgtctataatattagcatattagaattattaataaacatttgtatatctcattttcacagaatgcctagaaggccatggagatttaaaccttgttgtgtgctttgagagcagaatcagccatggaagtaggcagggatcacctttgtatgctggtcacatatatgagattcttcgcaaggatataatgcagaaattctaaaggaaaatttctaaatgtttatcaccactgtttgaacttacattagagtatctttctgatataatagtgttcattacggtcattttaaaatctgctaccccaggcttataaagcaatattatcatgtctttccatcaacaatattaaaaacattcatctctagaaaatgctataaagaagttgcactagaatgctgatctaaagatttaagtaagtggcaaattattatgtgacagactatgaatagattttaaaaaatctttacaaatgagtattataccttctcatgaaaaaaatactaatccttgaaatttaaccagtcacctgataatattttttttaattcaactattttgtcagggtatattttccccttagtccttaattatttttgtcatggttcctggtggttggcatgcattttatatgatctgaaccaaaactgtactgtccaattttgtggctactagtcagggggacttcctaattgcaataaactcagttcaaacctcactttccctgttccataaccatatgtggctggaggttaccatattacaaggtgaagatactaactatttgcactatcacagagctttctattgattaacagtgttggctcacattagtgagaccactgctgaggaacaggaaacagcagatgtgtgttctttatctccgagtctccttgactattgagatatgagtataggaatacatatattctgacacagagttaaagttacctgcacagcctctcagtgctggtgtgctttctcttctttgcctgggactgaatcttgaacattccttcccttccagaaaaggaattatgatatcagcaagtgttcagcaggtttgttttgttcaggaccatgatctaggctaatcgttgtctgcctcactctttactcaacagtagcccaagcttattttacaactagggtttctgttttagacagcaacctcagacctcagggtttgtacttgaaaatttgtcactagcacaagtaactaacatctgtttttacaggttcagggtcttcaggtctctgcaaatttctaacttccttttgctacagcagatgtttcttaattcagaaagtaaattttgttacatataaaaagataaaaatgcataaatagtataattatatagttatatgaactaaacacccctctcaaaactaaatgaaaatagtttgaaaactcaaccataaggctaaaccaggtacatttaaaggacctcccaaaagccttgatttaaaagtagtatatctgtatttagatgagttatatagctgatctaagagacaacaaataattctataactacaaatcattttaggttttaagtattttcatgaagattatatgaacataatatatagtatgtcatactgaaagtgatttgacttttaaaacaaacagcttattttattttttgtgattattttcaatataaatataaatttcacaaagtgaaacccatacaagggaatgtttagtagaactttcattttcttttcaggtattttagaaatggctcttgctccagagtaacaacatacttattgtttgggaattaaatttccccaatagatttcacagctcctaagaaatgaattagtatagtatattatgcaccaaagtgtatgtgaagaaaaagaaaaacgtgtggaagcttgggagaaagctagaagacagaggaaggacaaagggaaagagnnnnnnnnnnnnnnnnnnnnnnnnnnnnnnnnnnnnnnnnnnnnnnnnnnnnnnnnnnnnnnnnnnnnnnnnnnnnnnnnnnnnnnnnnnnnnnnnnnnnnnnnnnnnnnnnnnnnnnnngaggaagggagaaatggaggaagggagggagggagggaagaagttaatggagagaaaaaggaaaagagggatggaggagggcagaagggcagaagagaaagaggggaaacgatagaggagaagggagggagagaaggagggaaggagggatgaaggggaagaagggggaagtagaaagggatggagaaagggaaatagagagtgaaggagggagagagaggaagaaggagggagggagggaaggattgaaggagagaagtaaaggtatactaacttcctgctatttccccaaatacaaagttgagttgtggtaatggcacttattttcaagattctttgctgcacttaaaacataagttcatttcattcaatcactcactcctcgaccaagactgaagccaactaaatagctagtaatattcaccaatgaaatagtaccataaacttttctcagttttaaaatttgagaatgtttctctacacttaggtaactgctcctgacacaaggcctttgaaaagtggcctaacaaatattggtgtgtgatgtagaagtttgaaactcagttcattaagattgtgagtagctgttttgtacataagaatgagacctgatgggagaggttgggactaaacacatagttttatgaaatatgaggaaacctaagggttttgttatgacgcacataacaatgaaagacctgtttctttttagcaagctcctaaaaagtcccacccgtataattattaaataaaaacactcacttattcagtactcagctagcttttaaactctgaataagagaagtacacagtgagagaggtgcttgcatggtttccctggatactgggtgatgccattcaggtctatgttttatctgaaagtggagccctgcagggaaatgaggcttgttgagtggctgtttagacatagtaagttaataggaaccttgtttattctacaaagcgtttttattttgacccagtttctttctctcatcacacccaagcactgtaaacagcaatagtatggtagaacaggtactttttgcaactcccgttaacttcacttaagaaatcatgactgccaaagtggagtcttacaagattttgtcctagcatactccttcttagcacgctttctagagttggactgttaaatttgtgccagatacatcaatgaataccgcctgcctatctttttcttccaactgaatttacttatctaaaaaagaaatcgtctaaaaattcacctgctaataaatgtaaatgtccttaccttaaccagtcattaaggaataccagctaaatcagggtcacacatcaagggtctccacagacgtgagtgtccattttaaatggtacagtagcattgtgggttcccaatcgtttaagtgccatgaccatccagttttgacaccgagtctcttagagttacaagctttctaatttgggagcatgattaatccctcctatgtgataagttttaaccttctaatatttctttggattgaaaaaagcaaatgagctgcggcaaagaatggcaaataactacagtgcttaacacagtttaataacctgaaatgaagcaagtgtgtgctatgtttccattaaaaagtttccagccacaattaattgaacaaaaacttgtcttgttccaagattattcttggaaatgtaattttaaagcctgtgtgaaatgaggaaacttaactttttataccatatgaaagcaatttcattttttaggaatgattttggatagacttccgattggatattttccattggaactaacagtgtagaggcttggggtggggagagagcagttctgtgttcttttgccagcactgacaaaggtctggttgtcaatgatacctttacagctaaatttactccagagtgacatgaacaggtgcaccctggcctgccagacacttgtgcagagggatcacgcatctcaccgcttgacgatcaagggggcaaagcttcggtgttcatagaaaaggagaggaggcgagcgcagcccaaactggggggtttctcttcaaagccagctggtctggctttattctacaggaatttttttacctgtcagagtttggacaacaaagccctcagcaggtgctgacgggaacaacttcctggagaagcagaaaggcactggtgagtttcaattgccaaaaaatatgtacatttttttaatctctaaaagttgatttcgttttcttagaggagacagtgctggggtacctctgttcacaaggctgatgatgagtgagctggaaatggagccaacctccccaacagtggggttgctaggtgcacaaaacaacgccaacaacatttgatgggttttgagataataaaatgagcattttgtaatatatatatatatagagagagagttaatattactttctgattactattttaaatgtgtgagaataacgagttcatcacacttattacatgagactacacaatagcattttagtttcatttttatctagttctgatcttctttgaataaaatgtgattttccaatgaatttacaaaattaaattgtgaaatggcacatgctttcctcaaaaatcccatgtgctattaggagtgtacacattataagaagatgattaaaatacaaagttaattttatctaatgtgcatttaaaacatctaagtgaacagaataattaataattaaaaggaacaacattttctcatttttaacagggatttttttaaagaataaaatctttagaatagatgatcaaggaaataataaagcatgtttttacatcatttatttccaaaattagtacgtatacataacttagtatttttttattttgtgaattcaaaagtttggtaaaaatattttttcagaacaggattttaattaatgcaaaagaaggaaaaatgagagcacatgttaggacatatttttaaaaagtgattctatttcaaggactcattcttttaactgtgcttcacagcatttctctacacattgttgtattatagcaaattgaaaacatttatttaagcaaggaagcagctcaaagctagggactatacatagcaaacatatgaaaccattttaataagtaaattccatattcacaagcaacatgggctaatgaatgtaaaagacacaacggcatacattgatcaagaatgctataaattattatgcattaaaatcaattttctgggctgtggggggtaggattggtacttaagaagagaaaagcttctacaaaaataaatgactaagactatgaagcaaatgttttactctgatggtgccataaataatttccaatctacatatttaatacatatttgtaaagtgggaaaaatataaaatctgacttttgttaatgaccatcttatctaaaatatttttgaattaagtgtggtttggacataatataaacttatggatattttcttaaagagacttaacttccctttgaaaatacgaaaaaaaaatatttttaatgaccaaaaatggtctctagcccaaaatctaacactcaaaatagtagtctcatctacatgcatttctgaaatatgtatttttaaaacactgaaactccaatttactgtttattataaaggatggcgtgtataatgatctccagattatcaaacatctttacttaaggcttcgcatagggcttcactgctcttttcacagatgcattgtcagacttattgctgattctgagatggaaatcaccagacataccaaattttaaaaaacgttcatcagtctcttaaagaataagacatgtgaagcaagatattttctggtttgttaaattctctgtttttaaagaaccagcacacttgcctttggagaagaaaattgttttttacaaatcataagctcttgggtctactttggaattacacttattaagttttcatgtgtattagtgttggctaaatttatcatactctcattactaaacactgcaacagcaataaaacaacataaaaactcctgccaaactattggttatgactttcaactttttcatgggtagtggaacctacattaagatgttaggtagagtctaattatacaaaatatctaaaaatgtatcattttcattgtgccaggaattcagactttgtctaaaaagtccacatttttnnnnnnnnnnnnnnnnnnnncttatcccctgtttcccacagtgatatgtttttctttcatactaaatcttcaataccaggtcacaaaatactcactccaactcttccgatgtatacaaactggtttctttagtaagccttagtgagaaatctcagcttaaaatgacaccgagtcagatctgccctccactttaaaagattacttgaaatatatcttcacaacataaagataattatttcaggggtgggaatttaatcattctcctgattcagagagccactcaaaagattgttttgttcatattctgtattcataagaaagctgttgatttttctattaattaacaattattaatgaactgtggttactagacatctagtcaatctaaagcaacagagtttccatgtaaaatagtttatttgtaagtatttaaagaagcaaaagctattttggcagctttatatgtacctcctcattgaccagacacctgactgacaactgtcatctgtccacaggccagatgtaatttaataaagataaaaattgcatgttgctcaccctgctgataatgcgtggtgccagtaagtttacaaatcagaataaccaaactatggacaagacaaataaaaggaaagcggtggcttctgtctagcatccatcttccctcgtggattcattttccaccccttcttacttgtttaatttcttttcaagtctatacatgtttcatatgtagacagagttaatttccttaaaggaattgtcagactcatgtacacactgatcaaaatactaagcacccaggcagtggtgtcttagataggtagctgtccttgagtctgattactcttgagttcgtgaaatccttaaaagccacatgaggcaggctttgaagctccaacttctcattttaaagtaattccatagaagaataaaactgaacctaactcaaagtctctggtgtgaggaggtagacccagatttgggttgtctctcaggcccatattcagttttctttgatttcagtaatatggacaatcaaactgacagatgaaacgtatcacgtgaaaacttacacgtgtagagctgctttcaaaaccttttcagttactaaacaatacctatacaaggatatatttgcttaccaggacatattaaatggtggataaagcattaagaataattgaagtgtgcccttttgaacttctttatcattcaaattgatttatacaatgagaaatacaaatgtattttaaataataatttttaaaaatcacaatcatatgctttggaaaatgaatatagaaagcaaaaatttagccttatctttctgaaagtttagagaacaattaaaagcactaaatataccagaacataaccatatatatacatatatatatatatatatatatatatatatatatatagtatataatgcaaaatatactaaaaagctgattcagcaattaactcacttgatgtgtgtaggctaataaacaaaacaaagtgcagcccaaaggcttcatttgtgtgtcttagcaagctcagaacccataatattcagtagcattttattaacatatgtatttgacatcaattcaaatgttattgattatatcaactactattgatatgtttgttgatgatcctgtacaataaatgggttcagtcaagattaagaatatcgatattcaaataaactctcattttctgccctctagaaaggaaattgttcagattacaatacaactttctgattttcaaggaatatatcttatccttggcctttagagccgatcttgcaggtaagaagtgaaactttattacacagacaaattaccaaaacaaaacaggagagaaacttaaaatattgatatgatatattgataaaaatggtggctactgttttctccaaaagattgttttaaagtaatcaatagttctatgactaatatcgccacttaacaactaaatttcatacctaaatttataaatgttatttgctcattatattacatttggtccaaagtaacatcagacattgttcagcagatcatttgacaatatgcaatatcagcatgtaaatcatttgcaaagcaaattaatcaacagagaagtaaatataaccatctccagctatgttcttatttgtggaaaataggggcatcaaaacaaaatacacaaaattacaggatggacaaagaaacttagtcattctcttgcatctcaaagagttttaaggaaagtgagctgtcccttatctacttctaaaggatcacaagtatttctcctgagctgatgagtacggttcaaagaccaccctggcaggagtgcaaggatgagagccctagcccctgtttctgctatatactattgtgaccaaaaagaaatcactaatctctgtgacacacctaagtgaattggggctttggggatagtaatatacaaaccacaagacaaggcgcttcacctaaccaaggcagtattctctctgcttcatgggaggtgtcccaaaaggactctggaccattgttgcatttctagctagaatggcctgtcctgtgttctccaaattgctatgagtcccccaaatgagggaaatctcaaactggtgtggagctgggaagttaaatggtgaaacaaaaccattctgcagagcatttctgagtaagcacataggagaggactttggtttcattacaggaaaggacacatctcaacattacatcactacatggaactctgaggttcagtatgtattcccatagctaaactgggtgaaaatccaatgaacatttcatattttcagttttgtgaaatggaaggaacaatttaagtaaaaaatagttgtgacacgtaattgccataagccaacatgataatgcttgttttgtcagataaaaacaaacaaacaaaaagacattgcgtcaaagatgttctattctgaaacactaaagatacctgcactaagagcagcagttagatatgaagagggcctggatagacagcagttatgtatggagagagtttgaaggcttgagcaaccaattccaggagatggtaatgttgagaaggacttttctggtttctgggcaggcaaatccaattactaaattcttaagaacatctgaaagtctccttcctgtcaggtccctctattcaagtcaatgagacaattgctagccttatctgcagtgagtttaggctcacgagaaactggcagtcacagttacaatcacatctgtgctccatctctaatgttaaatatccctccatttgatgcccactttacaggtttttctaagggttcaggactccatccaagaataaggtttttactcagatatatttttaaatgaaccacaaattaagtaatttaggtccccagatgataccaagaggtcatccctgagacatacacacaagtcacatacagactgaggagggttacatttaggaagacagtgggtgtgtgtgtgtgttcatttacatatattcatgcaactataattaaagaaaaagaggccatgaaattgagagggagggtttcatgggagagttgaagggggaaaaaaaaggaggaaaaaagaattatatttcagaaaataaaaattattcatataaattccccatcttgcttaatcaccttttattgagcagtcttcaatgaggatgttatgtgtagtgtgtctttttgtttgtgtacaatctgagcaaaactgggtcttgaaacaattcatttagcttaaactcttgtccttattatgttaaaaggagttcatacacttgttgggattgcttgaaagaaaaaaagtaacagagagaaggaggagctatagcattagaaagacttcacaggccgggagtggtggcgcatgccttcaatcccagcactctggaagaagaggcaagcggatttctgagttcgaggccagcctggtctacaaagtgagttccaggacagccagggctgcacagagaaaccctgtctcgaaaaacaaaaaacaaacaaacaaacaaacaaacgactccacagttcttataatactcttgccagaaggcaagagcatataacaaaatgtaagtgactagcttccctttctccctctctttctcccccctttcctttcttccatttttcttttctttttgagaatcttgcagtccaggctagcctcaaattcaggcaatactcatgcctcagccttccaactgcttggattataggccaatgacatcatacttgatctctaaggagccatttgaaatgaagattcctaaagcatgcatgacagttcccagctgcacactgaaggctgaggcagatctctacaagtatgacaacaatctggtctacataacaagctataggacagtcagggatatgcaatgagacagtctcaaatttgtttttgttttttgttttattgttgttgttttggttattaaatcaattttcaaatgcagctttcaaagatggtgggttcatggacaaggagtgattcagatagccagggtttaactcttattgattctgaggtctttcacctttgcttgcaattatcctctcaaatcttctgagtgcaacattagttcttataacccaaagagctagaaaacgccaagtagtgtgagcccatatcctgagagactaagagtaacatatggctacggctagaaatgttccttttgtttttaatcattgtctaatatattgaatgctacactgcttaatgtaattcattcacctttatatttgaattggcaaatgataaatatccctcaaaatgagcaaagtcttgatcttattcaagtcttatactaatttaagacactaaataatatagttttaagtagacaaaatggcttcaactaactcttcaggaaagttattttagcaaaataagacagacagtaaacactctaagaatgcttactgctgatctggagaagcagtgggcttaattttcttctgggtgaattgttttatatccataggctacatagactagactctcaaagctatgtaaggctgagttaggaacatatggatggtaaatataaatctttcacagacaatatatgaaacaaaccatttttgttcattatgaatcatcattatagtgatgaataagaaaaatatcacataagttatataacaatattttcagtataagatctttgttggggaatttaatctgtggtggtttaaaaagacttgaaaaaattattagaactatcccatagttctaaaatgaaaataattctacacagaaaaggtaattggtcattaatatgaaaggacccttgtactgacaactgagaagaaatttataactgaaaatgaaggatgaaataaaaagaatagaagggatgaagtggaggagaaaaggaaaaagaagagaaagtagaagagggaagccatacgttgactgactattgattgctaaaagggtcaagagaaaaaaaaatgttgcaaaaatttctcatgaaatttttgacacaagacaagccctcttctttccagtcccctcagaatgatgatgattactacaaaactcactggcctggtaaaaatctctccagtcactcatattatgtgaccacacaaagttggagagtattttgttttcattttcattttattccatttttatcttattttgacaaaaagttatctatttgtgatttttatagagaagacagagatagggcataacaaatgttgccctttgacctttcaacgctcctaaatagtatgccctctgttcaagaaaaagtgcttattatagagggttctttaattcccttcaagaaattactgagtaactaataattttacatctaatgacttttaataaaaaggaatatacatgcagtaagctaaatgagaacatcgaagctataacacaaaggacacacattttttatttagttggtgtgtcactcatgtatatatatatatatatatatatatatatatatatatatatatatatatatatatatcatggagagagagaagcaaacaggatgggaatttaaagaatctgaagggcaagtgcatgggttttcaaggagctggcagagagctcatcttccaacctaacattttcagaagcaataatttttttcctcaggtccttcctgtgcatttgcccttacttccttgtgtactattaagtggttgtcaatggaatggacttgaggccataaaagcccctttagaaacacagcaggaaatgtatggacgggtttttctcttaaaagtttaaaaatattcacttaaagaggtaatttgttgatagtgtattgtggataagtcagtggaagcagcagattctgataaaatataatccatgggaattctggggcttacccggctgctgaggatgaaaggaccttgtaagtcacatcagtagaaggcaaaaagaagtagagacactcacaatggagctgttattgattttaaaagtgctactggatgagatgagcgttccaaggtgaaagaagggcaagttgaacatgaatgaagggaagggcataagtgggcaagccttggtgatgttacacgactgccggacaagtctcagtgacatcacatggctattgggacacaggggagatctctgacttcataggagccaaaaatctcagagttgtagaaaatgactcatcctgtgcacttatgtgcagactcctaagtccaaatgcaatgttattcactcattaagcaacttaacaaggtttctgagataaccaaaatacacaatcatcgatccttactctaggtaagcattatcctcacttatgtgaatctgataaaacctagtatgaatataaaagaaaattatattctccagagcactgacaaggctaatattaccacccataaaatatgaattatcttagtgtaatatgtgctgatttaatcaacatactagcataaatatattttattttaaatatcaaatgaaatcatgaaatgacatagttaaagtacaaaacctgagagaaaagagtatatgttttaaatatcattaagtatctggtagtaatatgtttctaaggagcatgagagatagttgaagatgaaataaaaatgtggaatactttattggacattttctgtaggccaggcaaaaataaaatttcatatccttctttcagcaaactgttagggctaggtccatcttctctggtaaatctgggttctaatctcctgtcaggtttacctttctctgcctttggctctctcctatcctatctcctatatacctctcctatcctatctcctatatacctatcgattagtagcactgacttccagacttggccaatgctgcacatcaaacctctgtcttcaaaggctatacattccttccagaaagaagcttgaaattgttcttttctatctgtagttcaatgtctgcttattgtccaaatgtcaaacatttgatgctttatgatcaaatcctcgttttcaccttatttaaaacatgtgctttagatttacttttaacaacaacaacaacaacaacaaaagtcaacaataacaacactgattctttagcacagagatgcttctaaagaatacaaagcaaatttctaaggagacctctaagggactcaagcaaaaatacctgtgagtgactagtcagataacctgtgaatagatgtatttttcagaagtttattccagttgcgtgattatatcaatccctgctgaatttgattttccaaaagtatcatagttaagaacagagttttggaagtgaataagcctggtttcatgtcctttgacatttatggactatctgaacagacaaagtaaggcattagtttacatttttgttcttaaaatctatcagatagagataataataaaagcattttaaaaggctgtagtctggataaaagtaataacatttatagagtaattggtgcaatctaaaatgtagcaagtggtcataaaaatgagaaatattttatataaatactaaaaatattgaatttttcagtatatatctcaagtattacacctagattataaatacaattgctttgaaagactcaaatataaatagagcaaaggcgagtaaggtctattggtttgggtctttggctcaaagaagaaaccagcaagaagactgttgttagccactgatttacatttattttctttctgttgttgacattttagccttcattatcaccgtattccaaaaatatttaggaaactttcatccaaaacaatgaaaaatttcattctttctaggaagtgagaatattaagataattatgtatatacctatgtacaatctacatagaactaacacctattggaagcagatattttgcatatttctttctatcttaacaaaaaatttaagttttttaaattactctgcttaacttaaatttttaggttataaataagatattttaaaaggatatatactctcatttataaatataacaatcattcaaaattacataaaaagttagagggaacacagtttgtcatgctagccccttctttctagactccttttctcttaataaaaatgttaccatgaacacttcataaaaaattctttaatgtactgattcgggtttttctgtaatatatacttataccaatagacaaatgagtgtcccactccagacattactaacagtccaaagaggccatgtttttcatattgtatagtgtaatgcagaagtgatatctagcacacatgcagcagaacagagtactgcccttagatccttcttgaacagaatgctacattaggcattccatgagttcccccttcccaggaggcctgtgcccagtctagttgccatagatggccatcagacatttgcaatgacatcaggagactatctgagcagccactgccctaaagaatctgctagcaggagactggggatatcagtgtcttcttggccgacaactgcattccaaaggtcaactggggtgaaaaggatgggcttggagcatctggtgcgttttcagccacaaggcagctaacaagcagagagcagccgccatgagggctaaaagtagcctggagaccacacacctgtgaaaaagtcaacctgacccaggaaaacagaattttaagtctagagagatttccaattcttcaaaggtaaaatttcagacctgttcccgtcctgaatcaatcctcaagtctctgatgacccacttacttttctatgacagccactgcaggagtgagtaggggcttggaagtgtggaagtgagaattgttctcacagaattactgcagtttgttttctcagccctgttccttgtcaagcagctcattcattcctcatagcaaagcatggatgatatcacactagagtccacatgtggagtatacctgaggaaaccaagtcaccgagcaagaagcttggggtgtgagtgatcagttagcctgtgttccctcagttgatgtttggctatattcacttcagagtcccatcagccttttcacttgtaggctatggagaagctgagcagctatggagaagatgagactttcattgtctgcagagcactgaggcattttcatatagcatcttagatttcaggtagtatgccaagaatcctttcaaacatgagcaaacggtaaattgacatgagacatagatattagctcaaatatggatcagtccaatgttcaaaagaatgatcattttagcattattttccatcagtgaatatgttgatgtgaacagagatcatcttcattaagggttaattaccataaatgtaccataaatgggcagaattaatatgaacattcacatgagctaacaatgaaaattgtaaagaacagatacagcaaaatgaatcccctagcaacctattgaagtcccaaagtttatgctcagtctaaaatctgatagcactggttgtttattacccatcttatgtagtattagttgtaatttcattatttacattgttaacatttcagaccaaatccctcctttgtgaagtcagtgaatgagataattttaccaaatgtgaggaggattatagttggctagcaagtctcacctcagataacacctttttcttttacttttatattgtttaccatttattttaaaagcataatgctagttctgcataagttttaagtacaagtaaacacagtattatatctcaattgttctctttgcaaaagcattatgtggctgtctgacactatcaatcgtgcaggttaggtttgggagacagtgttagtcctcatgcagcttatcctttatgaaatgcatttttctctagggtgaatgcttagaggcattctctcttaaaaaaaaaaaaaaacaaaaacaaaaaaaaaaaaactacctaaaagctatcaaggcaccttctagtacagtcagtttccctggccaagccagccaagatgtcctggtcaacagaaaagatactgaacccatcagaagacttaagcttcgttccaattttagagatgtggatcacttaggccttctgagtttgacccaccttccttatttaaaagcaacaaaaaggtacatggactgggtatttcccagtatctttctcagcaggcaagacactaaaattcagactttaaaacttttcacgttgctgccaatgtgatgtaatatacttccttagaaatgcagactatcctagaaatctgcctgttaccaacataacataatgcagttttaagcgaatattttcccttaaaagtatggcagaatgactccatgtaataaaaggcatatttttatgcctacctcagaggtcccactacccacacaggcctatttagcagttaaaatatggacaatgtgattgaaggaataatttttttttagttttgattaacttggaaggccaagtgttagtctagcatctatcctatttgtagggaacacacatctttctttgggttagaggtgtagagccctgtggtctaaaccattgatgtatcctctctactacacttgctctctttggttcagcaccctagacaagcaaagaacctcacaagattctgcatctcctgatggttatttttgcacaatatcccaacactgtttccaagtggtaacaaaagaaagttgtgcaagaggaaagaaagtcttctcattcgggtttgctgtgaattttccttagcatcctagttctctttctactttgtgatctttaatataccatgacctgcatatactcacagaggtagcttaccttctggagttagtggttggctttaaggttttaaaaatatttctgagaacctaggggcttaattagagtttaaagctaatttggggccatgattcttttcctattagtctataagatttgttacaaatccaggatgctataggacagggagtttggacctgcccaaagaccctctttttcttcctgattgcaaagtgcttatgatgcaccaggtagccagaaacgcagacctcacagacctcatgccagcactttgtgagctgtgtgggtgatgggttccttttccagaccccgcccccccccccgatgtttatggagatttctcaaagctcatctccagttcctgggaagaaatgttcttgggatcctaaaaaacagaccctcctagaaactccaccagcgccaccaccgcgcgtttccaaagcacacccactgcctttgagccctcctccattctctggagcccatcacgctccatctttatcagcacaccaccagtctctttctcccaaaccaagactctccagccgaaagcatgccggcacaccctttcctgtcccgctgttgaagacatcatgcccaacccttgtgaacccaggcccgctctggcagttctggcctcctccgcccgtcccggggctcactcacgtggcacacgcagcgcccccccttctaccctcaacacacacacacacacacacacacacacacacacacacacacacacacacacacactagcagcctgggagctctagaaactagccggggaaagagtccccaccccctcagctccgtctgccggagaaaagtgggtgggaggaagttgcgacccacggagaagagcagataggaggggagagccatgtcggaggggaggaccagcagtaattgggtgacgttgcagccgttgtgcctctccagtccgcccagccagcgggtcagctttcaacacaaatcagacagagggattgcttctgcctgcaatcaataactcagtcgagtgagctgctgaaaccagaggcgtcccttgtctgctctttatggggccctgcggactgaatcccagcccctctgcttcacaaacaaagaagtgggtaccaaatgccagaggaaaattttaaccccaaacttccatcgcatcccctggttacgatctgttaaaatgaaaagagcacggacctagtaaggtctctagaagaaagggttaaagggagaaatctacgccttaaatttcaggtctcctgtgatatgaaatggagtagaaccagtgtttcaataagcatttaacaatgggaagagaagatgtaaagtcccattaaatttagctgtccccatagatgctttcgagtcagccgcacacttataagcaaattaccaatcaagtcttatttgcacttactgatagaagggaagaagaagaaaaaatgtatcatactttgtagaggagaatttggaaggggggtgttagataatttattacagactttatttcgtgaagagtaaggttaagaggtcctaggagatatatcgtgatcccaacttaataatatacattaaagccaagcaagaactgagagaaaaggatgtgtcagaaaacttgggtctgagtaccagaccaagttgagattaaggcatggtgggcctgagcttgaaggatataagtccttcagttcccataaccctaaaacaaatactgcccagattcttcaattctctgacactgacacaatataatcaaaaataaattataaggatggcaacccagatgaggaggttttctaaatgactcctcattatgaaaagtcctgctcagacaattgggaaaactgatattggtccctgttctgctgagccatggttggtccttgaggggtagggtgggggtactagtcctacgttaaagccaaggaaatattcatgtgtgtacaaaagccatggaaacctagtctgagacagagattagaacacaggagcgcttttctatgctctacacaactaaagactgctgcttggaaagaaaaggttctgttactaagagattccatatacattgatgaagccacagcattaatcccaaagtttgcaagacagggcttctttgtatagccctggctgtcctggaactcactctgtagaacagactggctttgaactcagaaatcgacctgcctctgcctcccaagtgctgggattaaaggcatgtgccaggactgcctgacaatcccaaagcattctaagtgggtctttaagcaatgcgtaaaatgagcctgttgctgaaaaagtttagacattattacaaatcattacttagatattattccaaatatctccctgtttgacaaattttactagtgtgattaatgatgaattttactttacttttttcttgtaatttttattcggatataaaaaaattaaaggtagaaatgtaaagataaggctaggctccctatgtaggaaatgaaccctacaatgaaatcttcccttgatataacaaatcctttgtatagtacagattctttagcaattcagtctgcgtgctgtgtggtcagcttggaataacactgtacctcatgaatctgtgaaatataaaaaagtgtgcactattacttttaaagttataggcactattacaattgatcattatttgggttttaaaataataagtgttgccactttagaagttttaaatcacatctaccggaatctaatgtcagctttaaagaagataactacttttttttaatatacttgcacacttttaaggtgccaacaaaagcattgaaaactgtgaagtaacctctggagagatgaagtgaagcgtggaaggccaatggctgtggcagtgaagaagtgcagaaggtgagtgttcacatttatcgtctgccacaaacttaccacgaaaggaaagccaccagtttctttgtcttgaagtatttatttaaaatgttggcatgtgtgacagtgatacagttaaatggccatgctcttctttatgatatgtgcagtgctgtggcatggtggttgctcagagctcctaaaaccttccaagggccacctttacaagtgcctactacaattaagctgattcctaggtggccatgtacatcatcataggacaaactacaaagaggttaaaatatcttttacattgtggaatttgaatcttaccatgtttctcggatttttatttttctaaattttcatgttcaattatatttatgatgaaagtattctggctgaagaacaaatactatacacttgaataatcttgaggggtagattaatctatatcctttcttcatctcagggtaggttgctgtggcaaccgccccagctcactttaaaataattttttaaagctcacttcaagagctacacccagcgtgggccaggcttaaaagcaggcagacccagtgcatagggctttcgtagactgctgctttaatgtagggaggcagaagaaagggagctgaagtaagatggctcaaaacagaaattggaatgttagctttgagctgaaacaatcaatcaccatgctctctgtaacttcaggtgtctaaatgcattgtgaaataaatccttggatgagataactaatgtttatttatatttaaaattaagcacttataataattaatgaaaggaatatttgtaattacacacattcagagagagaaggggagagggggagaaggagagagaggaagtgagtgagtgattgagagagagagagagagagagagagagggagggagggagagggaggtaaggagaaaggtggtttaatggcaggtcaattctagccatcacttcatcttctttattaaaggaaagtttccttttattaaatccttagcttcactccccactgatataaaagatataataattatgattattttcaagcatagaacaaaattggagagctcatgcaaaccaggaaaccgaggcctagaaaggatttatctattaggaagacacttttagtgttttcaatgtaaactatcaaaccataagtaaaaaagttagtagtgctctgccacagagtcacatctacaaccacaaatcccaaactggatagagcattctaagtctctcaacatctagaacaaaatacttcctacacaagaaaaatgaataccattaggtagcaaggatcaccagtttaggtaaataaaagtaaagagataatgtgtgtctggcattacttaaagacaaatataaaacacactctggattaacaatctcatggattactactaaattatttacttatttatttacttatatatatatttatttattttccacttcagctacaaggtttgtgaggaaaactaacactaatcttaactttgctcacacatcattaagaagctaaatatacaaagggggaaaatcttatcttttcaaaggccagctgtaatacattccagacccaaagtttcaaatcatcctcacctggactggacatacttttaaatgtttacaatattgttgataaatacgggtttgttacaatacttattactaaacaattctttgacacctggtggggaaaaataaaagtttccttttgaaggaaaataaatcaaaactgaagtgtgctgtggtaagtagaaactttgtctataattaaggagaagagcatgattgaattcatgtattggctatatcaactctgtcatgtaacataggccattatagttcattatactaatttaaagcactatgagaataagttctcttggtccttcttatagtttgctctgtgaggatctttgtaaaccttaaaaataatctaaatttttatttatatcaccatatctaggtatgccttagcatgcagcatgtctaagctcagagcttgtacctctaaacatgccgttctgtttatataaactcatggtagtcacacttgctatgtgaaagaggagcaaatacaatatagcatagataccattttcaaaagcagaacaaacaaaaaacccaccatgtcacaaagcttgtgctctgtgacagcttgtcatgctttcctgtaataaaatcgcagtactaattaatagtctcagtggtaaggagccagaggtttgaagattgttcccatgtagtttaacttgcctgtaaaaacaactttctgctttcaaatgaagccttccttcggagggtgcttaaatgttgagtccactgctctgatagaagctactaacttcaaacagcacaatgaggcaggaggcttttttgatgcacaatgcccctctgcattaaaatagtactctgcaggcctactggagagcttcccgggaaattcagccagttactgggttaaacatatactttcgaaaatatttttaattagctagatatttctatgggctactattgtctactcttgtatcttctacattatagtactctgtgaactttctcttcctctaatcatagtattaaaaattaaatgttcatattttacacaagctacagtactcctggcatgcaatctttcactattttgagaatgcatagggttgacttgtatatagttgatatatttaatctttagctttttaggtgtggtcgtgatatctagtaccttttttttttttctaagtatcaattctttgttaacctatatttttactatggaaaattattcgacagcttaaaccttaacctaagagttcttatcagtgtctgctcctgcttcctgtgcagctgaaactcttcaggataagtgaagtcacccgctatctatcggtcaggggagcctaatgcatttgggaagttgtttttggtttacttgctaatgacctggataaagtccagtaaggtgtggagggaaggagggggcattctccgaggaagctgtcctctcagtaaatttgtccagattgattcgaaagttaatggcccggggataaagtcgagatttcaaaaacttgtaattaatttattactaacattggaggatcctttcggctcactttctagcctagccctcctgactctcaaggccaaaagctttatacattctgggcgggcaggaagcgcacgctgggatcgaggcttgcagacatcctggatcgtggcttttacgcgtgagtaacggaggcgcgcgcggaccggagcaaggatgaagtggctactgagaatctaaagggggcgggggggggggagtcactagagcagctcttagggtcgcgctcctattggtcagaaggaagatctcgacttcagaaggactttcctgctagctggcttgcagcctccccgggggagcgagcgcgcaggagcctagcgtcctctgtagcggcggggagagaggcagggagccgccgctccccgtgttgtcttccctttcatgcaataaagaattgtcattaggtttgcgtatggcatgtgccattaccccaccgtaaaactaaaattagcaaaatgtcaggaatggaaagattgattcaccaagatgcaattatcatttaaaagtgcttgattgaggtactgatgttcagtgatttattctgcataccatatacataattaaagtagtgtagtggagtaatttatcaatctagttgagactggaggggtgaggagggagctgcagtatgtttgttttattaaaatgttgcgaggttctagtcccgccccccttttgcaagagtgaaactgatgatttccccagctcgggaggagaggcaacggtttgggctggttgggatagagaaacggaaaggaaaaggcagcgccaggcaaaggcaagaataaaatgaattgggggacaggggtagcaccggagcgtacgtgctgcttagaaccccagccccgtgtgctccgtcttgcttgccgcccccgcgtcccctcccagtatccttacattcccccccaccccccgctcttttacacgacctatctaaggctatgagctgctctccttttcccattcgtctccagtcacttccttcctggacacagttttctggacgagtctggttacttttaatcccaccggccacagacaaccactttctcctcctcttccacctcctccttcgcttcctccaccttcctcctcctcctctttctcctcctcctctttctcctcctcctctttctcctcctcctcttccagcggcttcggtgcgcgcgcgaatgcgcaagcccgcgcgcgcctccccccttgcccccctctcgcgcgcgcacacacgcacacttcgtctccagctctctgctcgctcgcctcgcagtcacagacacttgagcacacgcgtacacccagacatcttcgggctgctattggattgactttgaaggttctgtgtgggtcgccgtgcctacagctttgaatcaagtggagaagcacttcaaggctggacaaagtaaagattattgttattttttttctttctcttcctctcttttaagaaaggaaaatattccaaggactaatttggtcgtgtcttccttcatgtaagtacctctgacatttctccaaaagaatagaaatagcttgtgtattgtctctgaaatctgcaccaatctcttccaggcactgggtctatctatccaactcctttctggaaggcttaagttaaggcttgttgtgcattcttttctttagattctacgatttccttgtgtgtgtctgaaagtaactttttagatagtagtatccgtttgccatctgctattgaattcacatctgactcttcctgtcacatcagtttgtttaaagtttcaagaagttagttcctgtcattagcatgtttgatagggtggagaacgtggatactagtgtattttaggatttcacagactgttctgtgaccttgaagtcgctgtcttaaaatttagctcttagttcactgtggaaagatgttcctatgagttaccccaaagactggttttccctgggtttggattctgagccactagtccttgggatgactttaagctaaagcagggctgtctgccagaggccaccttttgtgcatcctcttccctcatcaaagtgcaggcttgaaagagtttaattggtggggaccagaagcagttgccctggccatggtagtctgtgcattgcacagttcatgtttgcatttcagcatgtgcactgttgtttagatcaagggaaatattaagctatttaaaaacaaacaaaactaagtcacttagcctgccttctgtttggactttggatgaaagttactaaactaagtgacaaagttggccgtaaaggaagtctatagagacggagcacattgcttattgtattattgtgtattatgcaagtgtttgagtgcaatgctaatgtgacttcctttccagagcaaggctaccaattcttaaggaaattgttatgtctgagccattttgtactgttctagatgctatggttatgaaccttttccctcacatttttgaaatggatgtgatgtgttctgtataaaacattcaggatgtaaatgctgacagtgtatgtagaatcaggctgtttgccagttctttaactggtccttggtggagaattgctttaagacaaagtgcattttactattgttaatgtgatagtaactctaagggtaactgccttatgaaatgcttcgtgactatatgtgttctctaagtgctgtaaagaaaactccagtcgcatttccatgcctttccagaagagtggcccggctccctccacaggcaccttgcaatggaattgtgttgcagagtaaaaatgtttgtgtggggcatagtaatccccctcccctagagatttgctgggacttgaaatgtgaccacctgtgagccacacttaaccttgaagccataccgattttcaatttatagataaaatttctcatttaatttaaaaaataatgtcagtttggctagtcttaaaagtagttcaatatgtataagtatggcaccaatggtatgcttgtgcagctattgagtcaattacaaaaatgcaggcaataaaccacgttattatcatctagtataagcatattaattattgaatataaaagtagccctaaagcaagtgcatggcaggtaaaatgagttgtcctcaagtcccatcacaagtgggaaaaaaattcctgaaatcaatgaggttttgtactatttaaaggataatacatttaatcctgtatcggattctgatctttactctaaaagtattcattgacgcatacttaacatataattaaaaaaaaaattggtacccaagttaaagggccagtagttggcagttatctttacttcaaattgtgctgaactttattttttaaaaaatgcttttcttattactatgattcacagtttgagaatgtgttatacagttctcacactccttattagaagcagtgttttaacttcattcattcactacgctatttacatcttagttggtgtgcatgtgaatacattgaagggtaatattaaggtgtgctattaatttaatataaatgtttttggtattggtggaaataacaaatgaccatgtcataataagcaactttccaccctttcaaagttagtcatatttttaaagtatgtaatcgtgaacattaactttcccaagcagagatactaattaaccacagcaaacttcagtaaccaagagttgttataatgttctttattttttgctttataaacaagttaattttgtagaactctactcattctaataaaaaataactatctgatgattcctgaaaattgaatcctaaaaaaaaaaaacaatatactctatagttttcaaatattttttagtttttctctggccttcaccttgctcagtgactaagttgaacggcatataattatgtctttctaataaattattcattgtatttagatttctttaatagagaactatgctgaataacactttggcaaatgtaagcattatcttttaaaactttcttctaattagtgtagtatattttgtgggttttattttccaactcttggtgcaatatattttttgagtctatgaaatctcagaaagggacaaaaaatggggaaatgtctatacagtaataattgtattatataacaaaaaatagttattaaacagagagccaaggttttcagaacatgattccaagcaacatggagaaatttagtgtgtagttaaagatcagaacctcacagcatggactgaagaaggattgctgattaatttttaactttttaaaatgacagcttttagaataatgcctcccaaatgaatatctaaactgaaaaagcatgcatattccttttacacatatatagtgatggtttggaccaaatgaaaggctttatcgacgatgcttagtgagtgtaacatatgaagaagagctgactgggatttcatgctcagcactgtgccttaattcacagactcatggttgttcctgcattcagtagagcttgactgggatttgtcacctttaagaaatcaaaccagattacagaggcaagtcacaaaaccaacgcaacagcgctctacaccttacaaaaggcagattacacagttcacatgttattctgatagagcaaagataaaggctgattgctaaggaacggcaagacactctgattcgaaatgattgctagataactatgccacgaccctgttgcttcgtcattataaagagccacttaaacagcggaaaactcagttttcaaataataggcgctcagtagtgttttttcattgcttaaatttgaagttccatcaactctctttgagcagatatcaatttgtcaatttgtgtgaagtggttaccataaagcttaaaggaattaggcattttcagaagtgttgtgtagaatgcagagtagatttgccaaaattaatatatctttatggtattgaaaaattaagcagaaaatacataattgacaatatcctgtatgttgttctgttaccaggtgtattcttcaagatgagtagttacatagttatgattcaatgcattcaaaacatatcatgataggtgttattggtaaatgagacatatatatatatatatatacatatacattaatgtttattttatgaatgttacttaaacatcatttttatgaaaatataatacgtggagactttgttagagaatagttttgttttacctgtagcatttttaaaactcaaactttctaaacacccaacaccacagtaatttcttgcttcttttaaaattgaagtccttttttaccctactgatgcctcctagtgtctcccacaataaagctctaatgagtcatccataactgtaaacattgcactttcactgcctgcatcttctgtgatacataaaattcatatttatgtgtttaattttctgtgcgttactataataagatagaatactttagtgaatgagatgtttcatctgtggatttatggtatgaaggtttacttcgaccttaacaatattctgctaagtgtaataagtttataccttcggttgaaattcatatcatccttccttatagtcactattattgcaaatgaaaaatagcagatcttccattttgtagacctggaaattagatagagttcatcattgaatggccgatgagaaatggttaaaagagcttattgtttcatttaagaagaccccctcaagagttaacaacttttgttaactgcatgtcttcacacatgcaaatctctatgtgaatattgcatttcaaaggttaaaaaaataaaaggaagggaaagataagtgttacttataaaatagcaaaagaaaaacttggttagggggaaaatgtctctatgtagtggaaagaggtttactagaacataacttctcaggacccacagggcactctcatgtggtagacactagtggacatcaattttactgcaaggtttatgtccttagtctcatagcagtgagtgacatgcttgcatatctgtgacttcttgcaactctgattctacctaagacaattgccatttgattttataatttttttctttagtatagttatgaaaggggacattctcctaatagttccaaattcaagtgcaaaagattttaacatctctgggcctcctgggttgtctcagtgcatatcgcattcttgactttcactaatacagtgttctgaggatccaagtgcatatgttagacctgagcttaattagttgttacacttacatgtgggggggaggcaaaagagggtagaaggagggagggagagacagagacagagagagagacagagagaagcagagagacagagacagaggaagagacacaaagagagagacagagggagacagacagagagagacacaacgggagagacacgtggtagggtgtgaaatagccacccctgattaaaaagtacacagaatattagcaaaatttgcctattgattattttgtcctaagttattccgtgatacagtgccattacaattctcgtcttgttggacaaatttcaaagaatgtaaggggtgtgtttctttcgtttaaggaagcaaacatctaggaaggggtgggcctttcccacaggagccgcatttcttcccctggagagctgaagcaaatctgtagtatgtgagagactggcccataagaaacagaatgatttgtagtgatctgttctagttagtgagcaaagcaaaccagaaagagtttttcctctgaaaaacagctcctgtctgccgcttaatactcagtgctgaaaacggaccataaaacaaaacagagcaaagaaacaaagaaatcacatttatagtgtttgtgctcacaactatatagtacattgagataattttgacaacttcacattgtgtatagcattaagatgtagaaatcaaacgtgttatacacatacattttccaaccccattgtgaggctatggaggtagcatatgacaaagaatgctacagtaaaatataagaataccgaaaggacaatctgacatgatgttatttcgtactttcttgctctcactgcacaaagaaaaggcatattcatgctaagaaaggagtttctattacctgttatataaacccatggtctagcctcattggcaaaacaagtgacatttgctttcactacaatgtatctgctatacatttctatccaatctctgttacttgttttatttgaaagtatagctggtataaacaaaattcagagtgcacataaaaataattttctgagggcattatataggaaatcagtgtcatgacaagaaataaaggcagtaaacttattnnnnnnnnnnnnnnnnnnnnnnnnnnnnnnnnnnnnnnnnnnnnnnnnnnnnnnnnnnnnnnnnnnnnnnnnnnnnnnnnnnnnnnnnnngtgttcagcctgcttattgaatggccgtgcaagacttcaagcaatggtttaaataaagtcccttcaacttgtgtgagtgactggaggaagcgggctttgaagcagtccctagtgggaacctgattttttttcaacttatcctgagagtctcttggttttcttcctgcaacttgtaatagataagataaatatgaagatgcgtacatacgttgtttatagatgctgtgaatttctagcctgttgaattttaaaagtgttagatatggttctttgttagaggatgtaaactgcttaaaagaaaaacaaccaaaaccagcatattttttaatatatctgtaatcttttcagcaagctataatgatagcaaaagaacacaaccattccccaaaccccaaatattggcatatttggcttaaatttgctcagtttttatgaaattagacagcagatttgtcaatataaatataaggaaatttgcctagtagggtaataaagttgactttcagttcttagatcataattaattgttgaccctgcataaggtgtataacaagccattctggaaagctgatgtttttaatggaacttgaaggcttgggatctctttatagtcattttgaagatgtggttatttagctgaaatattcactggacattttatttttataaatcatggtcacacaaggaaggctttataggacagactacctaattgcagtcaaggatctctttagtgaatgaacacacacagaagaacacatattttaagaatataatggtcttgtatttttttcaaattaccacactttttatatcagaacaaaacatatgtgtcaaggcagatgttttaagttatacctttcatgtaggtgagtctgtaaatatacaattcgacttaaatggctttgtgggaaggtagtttggggaatttaaaaaggaagctctcagttactgtggtttcaactctttcttacaaaaaaaagaagaagaagaagaagaagaagaagaagaagatggtagttacactcaggataaagaaagagaaataaactcttttaattctttttaacatgcccatagttcctgcggtagagcttatttttattcttgtgtgtatgcagggcaggtactggcagcgggctacaaaatgaaaacttgctggctgccaaccagacacagtgcagagcatcacatcataaacttccctccccttctctgagtgatttcagccctaagcaatgtccttcgccttcggcgtaggctgagcagcagagggcctccttcctgagcaggctttgggaaaggaaaggctcagtgtttcccttcttcaacttgaaagtctgcctcttaaatctctaaggcacgaactgcaaactggattcactatgttccctttttcttcctatatagtggtttaaaatgaatcaaacaataggtgtgagttattaaacgggactcactacctccccaccccctacctacagagtacatgaaggcctgatcagatatctgtggcgctttttgttgtcgcacaaagaaaaaatataatggtttcttttcactgaaacttttgcattatattgcagataggccagatcattttgtgatgcaaattaacatcaaaggtgtttttttttttctgcctatcacaggaagtagatgctccatcacaatatatggttctaccgtgattttttttattgataatcattcacatttttaataattattaggtcaaattacagagtaatttgagagaaaacatgagagtgacttgattattacttcgttaagtaagctgatttctaaacatctgcatttttgtccttgcacgtggaactgtggtctgaaaggtctacttctctttggcatgtaaagtaacaaatgtttaaaagtagcttgtaattgctagttacactttgaacctttaccaatgggctttttaattttaaatcgtattaaaaataatttctggctgccagggcagtgggcacttatttgtgagaggtggggtctgattattgccagcacacctttctaaaactagccttcacctttggaaatatattaaatgggaccttcaggaaacagtgtttctacataataaatatttgttccacctttatttttaaactaaattattgctttcacaatgtccttatagaatgtaagtcttagtaacaaactaaaccaattattaatcacctaaataccatttactaaacacccccaaaagtaaatataactttatgttcctttaaaatcgataaaatggattatttttaattttatttaaatgtcaagggcaactatctatctgtcaataccagtacatacatttttataacaaaaatattaaagcagtaatataacatatctctttagaaaatgtaaaaggaatgtcatgagaatgtctgtgggccagagccatctagcaagagagaaaaaatattgaactttgatgtatatgttgtaaatatagacaggagaataatttagacattccattaaatattatgtgaacctttgatttttgctttaattttaaaacttagaatgagatttgttttcttggaatagtgcaaaatgataagagtctaaatcacacctccaataaacattgttccacccactgtcaagtttcaagtgtgggaattttaaatagaaaatacactatcttgatatttaaatattatacaaactattcttcagtttaaagcctgaatctcttggagttgcacctaataggtagtttgccccatcaagcattttagacattttaaactttattaactaacaacttcgtcaaggtgtctgacttccatctgagagacgacttaggaaaggtttctgtgctcaaggatgtagcccttttctccctgctttgttaactgttaataagtcaaaatatgtaaaaaccagtactaattccatctgaattacttttcctaagtgaaagcagcaaaattagcagtttaaaaaagcgagtgtgcatgacttcaattataggatttattgaaagctacttaaagttggtatagtttagtggttaaagaaatattgttgcctacattttccttgcacatttgcacttttctctctttacacaaactaaaagcaatctccacagtgacttgaatagagttccaatggctcgcttgagtttctcagtccccagcactaacttcttatggcttattggtccagactggcaatgctgctcaatctgtatggaaggaatgtgagagagagagaccactatgtgagctgtctccctctcttctttcatttaataactcaaatgaaacagtcttaaggattcttgacttcatctttctcccttttaaatatatttatattggacttccacctgacctttcttcttatagataggtagatagatagatagatagatagatagatagatagatagatagacagatacaaattgattgatgtattgatgcatatacatatagatgatttgatattgtaaaagcatgcacttctaattttctttgtctacacttgggtgactgtagaattgttttgtgttatttgcttacacttgagagatctgtgtggttcaacatgggatactatcatgtcacaaaagagctcctagcattgatcttgaaagtgtaaggactacagattgtgtctttgtaaggagctgctgtgacttttaagtcagtggatagatagcacagccacatcaacaagaacagcctcgtgagctctcggaagatgatacatttatgcaataacctaaacaatattacggattctgtctgactctatgaagtgtgcgcatgcatgtgtgaatgaatgtgtgtgtgtgtgtgtgtgtgtgtgtgtgtgtgtgtgtgtgtgtgtgtttacacatgagcatacatgtgtttatggagtggtgagtggagatgaaaatagcagaatacatgagagacacaaagcatgagagggtgagaatgaaatctgaaagaattagaaaatcatttcagcgaacacaaagagtataaagaacctattgccacattcatttgctgtgtcttgatcgtccatgcttatgttattatatatattgtaaacctataaaatgtggagcatgatcatggggggaaacaggtccaactgagttcaaaatctaaccgtcagtttattgacctgtggtcgaagacaggttatttaacctccagaaaacctcagaccagcatctgtaaaataggttgtgatactagccacctcttcaagtttttctgaaggttaagtataaagaaaagcattatgccggcatctaatgaatgcctagtaattattaaattgctgtaattccactcaattttaacaattttatttctgactaatgatgatcacttagtaatacttggataaataatttttctttaatatatttagaccattacaattgggtcactatcaggtcaaatctcatgtcatgatgctgttaggtcaattttaatgattactaaatactgtgtatctttctctaagcaaagcaaaacctttatagatcagatgttactttcaaaattagaaataggactacagaaataagaataatttcatccttgacttttaaaagtaatttactgtaagttttgactttaggtggattactgtttaacaataatagtttcattggggtttcagctcaggaaaagagacagatgcacagaattggaagccctttgtgacaacaggctctaagaatttttgaaatctttcatttgtttaaatttgaactgccctttgaggggtctattagttcatcttgttcattttttatttcacaatttgtttgtatgtggtgatagaattacctgtgaagaatgagtgatattgtagacatcttatgttggtgcgcaagcatgcttacctataacaaccattgtatggaacctgctgagtaagagcttgagatgtataatcataaagataaaatgtactttcctttgaagagttaataaaataagtaaatacatttttactgcccttagttgtgtgagtaattattaactctgactatagtttacctaccttgggcagtgaacaaatagactcaatttaggtattttcattcatatgagaagaataaagcatagaaaaatgcagaattttgctcatgactttagcatttgacctatataagacacattcagaaataaatttgataatacttggactgtttctggtacaagaaactagtttccttcttttggttgtttttgtattcacttaatttctcaaaaaaaatcatattttgatagtaggtaatgttgacaaagctttccagggtatacaacctggggagttatgtctgcttgaaatagttcccctgcttttgaataatgagcctctggtgtgcaccttgcatttcagctttcttttctaaccttgttttaatgcctggataaaagagtgctcagcgcaaggaatacttgccgagtggacttccctgtggtaaaacagcatggacagctcccaacactgcaatcaaggacgcttctaaaagctttaatttaaaaataataataataataataagtctgcatgaagatgatggagccctctaaggcatatgggcttagagaattattcccatctgcaaccccctccccctgcttagtagccctttccagggttatgattactggaaaatggctgttaatcaccaggatttttttttgactgcagctgcttcagtcagactcctaatctattaaacaactttgtctccagtttaaaatttgcattgtatactgtatagaataaattttcattgtaatcagagcatccaagagaacttccatatatgatttatagcaacacatttgtttgtatgtatagacctccattctgctattgagccaactgtttgaacaatactgtgggtgatcaacataaaatgaaatattacagcattattgaacacaagcgccacttacaatagtcacattaacagagtttgaattgacgcatccttggcacttggcagaataatacacaatttgaaaacttaactcagatagttaaattttcacttgaacctgaaagaattttttttttgaagtttagtgagcttgtacgaaaccactcggtgtctttgtcaacacttgtgcttattacatttgagataattttaataaatattccactgccagagtcaacattcagtgctaagagaggacacaacagcgctgacttacaaaggactcttttaaaatgcattcttacatgtaaaattgacaggctacaagaagtggttggacgatgttcatcatgctggaaagaatgtttcaattaaagttgagcagtttctcttccagctcttttttttctccattttttatttgctgtgccaaggtatccatgtgcgtttttccactgtcatctggctcgttcccagcagatgcacacaatctgttccgctgtcactaacagggtttggtttatgaaaagaatgtgtcagaacatgccagtgcagtcacttttgcaggttttaaagagtaactgagaatatatgcattgccctactttcttcgtccccatccctaagatttccaagaaacttttatactagactaaaagcttgctttcagatattcttgaccaaatatttactttttattaaaaataaaatatcagaagttcaaaactgtctttagtggttaaatttaagagcagatttttatgagagtgtttcaaataaacccaagatggttttgataaaattatcaaatttccaattatgattatttcctgcaaaattaaatacaaacttaatatcaagctagacttgagcctactattccactaagtcatagctttgtttaaattgttctctgatataataataaagagatggtcataaatagcaactgtttagtctaatagacaccattgttatgttaatcccaaagtagttaaactatcaaatacaatcccatgctttatagagacaatcacctttcaaagaacattgggatattctgttttccatatattcacattttaaattcaacaagtaattttttctgagtgaaattcttgttcaataatgtttctttattctcattaaatatcaatacaaattttaggtttatgttatcttcattggaaataatatttttgccttcatatgaattcttaatggacagtgaatacatccctaagttaataaacttaattatataacagtactttaagttttatgtataatactgcatgcatattcatatgcaaatagttactggacaatatttgtattttgatgagattttagtggtattaaatatctttcagaattaaagtatcacacattgcttgaatgctaattttaagttattgaaacaattttctgacttgggtagcaacttaaatctcaggggaactcaaactttcttagtgaaagtttaaatcagatgacctaaaaatatagattcaaaacttacaaagaaatgataatataaatgatttttgataaaatacatatttagaaaagctagctttggatttctccgacagaaaactttatgaagtacacttcaagtgtcagaagtacttatattaaaaagttgataccattccatagaaaactcttgcaggccgggcgtggtggtgcatgcctttaatcccagcactcgggaggcagaggcaggcggatttctgagttcgaggccaacctggtctacagagtgagttccaggacagccagggctacacggagaaaccctgtctcgaaaaaccaaaaactaaaaaataaaaaaaaaaaaacccttgcagtataaattatgttttaaaacagttctgaacatattaagaagaaaatatcttacagttggaactcattggcactgctattacagcatacaaattaattgctaaattatctctatagaattaaaccagacaactgttacgttttcttaattcctaaagtaaaaggaatcctacaattctatacttaaatgttgatttatgcatgcctatcataaatggattttataatgtttttgatgagcatagcacacatatttaagctgagtcataaaacctgggcaaagtaacacatgtatgctattcagaggtgaggaaaaaggatcaagttcaaggtcagtgtgggctacatagcaagccgactgatgagaggagagggaaggcgatggggggggtgaaaggggagggaaaaggagaataaagaacaattaattctaggttttattctttttatttccaacattttaatttattcataattttatatgtcatatgatctcacatcctaatttgtgggtacctgtatttcttggggtatggtggctttgatatgtgcattggcacaaagagctgagaatcatggatgaactaataagaggcatttggctgagtcctgtggaatgccctgcccctttcctttctcttttcctgctgaaagtcaggtggagaactgttgtcagtttgaggaccaaatgagactaaccactgctggtgttaaggagggggacatgtgaacacagggtaattacagtctttaatcttgtatgaaaaacaagatttcaagacaaaactccatgtgtgaatttgggcatcctgaattgttaatcctaaaatcttctatatatcacttaccgcatagaaacaatcttaaatgtcattaggaagagtttcctccttttagcttgattcacataagttgaatatccacaaataggttttgcccagtgaaacactagattcccccaaaaaagataagcctttcttttaaaaattaatgccttccttctaaagaagtaatccgattttcaatctaacttgatttgttaaaactaaagcaagtatactttccaatgtaaattactttcttgttactgagatgagctttggaaacatttcattttaaaaacagagtcctgttagttgcttcaaattccaacaaagatgggcactcagctattaaacaagagtaggaagatggtccttccaacagataggacacctttctttgtggttaagatgtgatgtgatacttcatttgcatttgcttagtcatgggtcttttttgagcaaagatagatcattttgtaaaactgtccctgtcatatgtattattcatagagtaagaaagtcttcagtctctctcactgcacaagcacaccaaagcctcttgctgcaggtaaaaggctggacagcagtgaccagaaagctttgcactaagctctctttagagaatttcaagacagttgcattctttttccatctgcactggcatatgctgcccagttggttttcagtacttgttggtttatataaaggaggactcatctataaatgtaattgatactttcaactatgacttaggaattctgattctccttttctccactcactagccaacgtatctctgatagctcctgtaacgtttagactgtgtcaaccatttacattgttctttacaggaactatgtactacagttgttgttggtagtaaatataatggccaacagttttggagaacttactcttaaggactgttctaagatcttaaaactgcaagttcattgctttatttattcttcaaaacaatatgttcttccatatttctgcccttaacatattacaggtgaagaaactggtccatgaccttttaaagtagtttacgaaggttatctagtaagggcagcatatgaatctccaatcatggagtctccagagcccattatcgtacatactgagttaagcaagatcctacatacatcatacctgctaggaaagaaagaggatctcatcggttacatctgaattttttatggctggttaggggaaactagttagtcgttccacaaaagcagaagacatatgtctgtgagctttctaagcagaagagaaacaaatatttgtctgacatacagttttatattgataaactgaatgaagagcatttttactgacagacctctttgtgcaagcaatctctggttactgtgtgtgaaatgtactttccggttacagtatgagcctcattgatgtgtgaacatgtagatgttcatcatagtctactgatttctgttttgcttttcatctcttaaactggtccctttctaaacttcacttgcaacaattattgtaatttaatactttttatttatttaaggatttgagatattagacaaagtctatgctggatattaaatgaatttcagaaattatttagctaattgaattagtatggtgcctattctgggtaattcaaattcaaacacacgttctaagtgtatctttgtagtttaaaaagaaaaaaaatcctaaaaccaatggtagatttgaaacaaatagtggcagcttaggatttcttatatataaaaattaatatatattgtttattcaccaaatgtggactttaagttttacatgaagtattgctgggttgagtaaaggagcttttaaagtggaaaaggaacattttttttggtaattttttactgttagcaaacagtatgaactttcttttctctaaggaacagtttttcacaaaaatattgccatagttagaatggaagtgaggacagagtctgatggaggtcagtggaactcagatatttctgaattacccaatgtacatgcttaggacttcagaattaatagctacaatattttttaatgtcatgggctgccttctaggtcttcacagctcacgttaataaatacatttgcttctgctttgtttctgttttgaagagaaagaagtgattgatagtcttaccaagaaaacaggggaaaaaaaccctatgttctctgtatttaaaaatgctattgttgttaatgtcttttgaagatatgggtgttgcgtattatttgggactaatattctacagaaataagtagctccctccatcactctggtgccagttgtcaggggggatttggtcttctctgtgttagtcactattaatggtcagcgctcactcattacaacaaaacaactaaggcaagtagctgcctctgtttcctaacacaactcagacacaatgctttgacttcctctcttagagccttccaattacaacacatactcttaagatgccatggatcattgactttatttttagaatttatttgattactaaatatatcgtaaaggctttaaattactgaaagcttgaggaggcagtcatagttgcaggataattctgaaaaagatagttacactaaagttattagtaatagttccagagcaagactgttatgggttaacacattttaagagcgttttcaaaaaagttaatcatcgaaggactaaaaccaacacacaatttgttataaacagactcattcaaaatttgtgtgatagagttgatcttgggtgtatggtaagaaagtagagagaacatgaagttgtctttttataattagtttagatagtaaggtctcaatcctgactagatgagaagcttttcaaaaccatgatacccagatcccacctccagatttggattaagttgcactgccatctgggcattgtggtttttaagctgcttgggtggtttttatgtaaagactggcttaagaattcctagttaaatgataaatatggattttaaaacttgggcatgcaacttaaaatggagacattctgaaagttatagaaacaaataagcatagtagtttgggctctgttcctacattgtattctccagcacttgctcatggacaccgactcttaacgtttaatgagtcagtacagtgagaagatggtggagctgttcagacctaatgacgttagtttcttttgagtttcagggaagtaatgaagctgtgaagatgggccagaagtaggacaagcgtggctaatccctttctattctctggtatgccacaaaaccctccctgttggggatctcgagataacttggaggactggctcctatcctcccactcctgccctagttcctagacacagctgaaaggaagggtgcctgagcctggtcctcctctgcaaacccctgctttgtcaaaggatatagagcaggttatgaaaaagagagaaaagcaccaacagagagatgccccaagaatcctttatacaaaggaactcaacttttatctcatacaaaaagtaatttaaaaaaaaaaaaaaaccttcggccaacattttcctttttccttcttgttctaaaaaaaaaaaaaaaaaaaaaacataaaataaaaataaataaagtactaaaaagatatcttatctttaggaaaagaatcttgtaaatgttaaaggagcccttaaaggtatgctagtagaagggaatatgtctttttgagagctgatttcttacttttagatattcttttttaacttgtttcaaaattataatataattatataattcccttccccctttttttccctataaaatctcccatatacatgctcttcctatctttcaaattcatggcttttttatatttccttattaatttatatgattaaactattatatatttcatatttccaaagatagaaatacactgtgttcactctgtgcattgtaacttctttgtgtgttctcaggtctgtccatatggtatggaataatggattgttcttccttgtggaagactctatctcatgctctcagcattcctttagttaccttcagtcctttgcctggggttaagacctcatgagctttccccctccctgttagcttgtctatttgtgtcattcttgttatgtgctgtttaggcagcgatgatggacttcgtaaaagggaataaatctttaagtgcaaattatggccttaaaagatacaaagaatagtgggaaccggacttgcttagtacacaatagcaaatataaatacaaagaatatccacatacaaacacaaacacaattatactgtgtatatagaatgaaaagatatgacaataaaagtatagacataattttacgtagaaaaaattgttttattctgctatagaaagtattatcataaaaagacatgcttagagttaaggaggtcagggctttccatgattgtaacttccaagttggttgaccctcttcagatggacactttctctcatctcatgaaaaagctgaacaacttttccaggtgaatcagttcataagtaaataagctaataactttccaagtccagtgtgacgctaaaaatcatacgtgtcatgaggtgttacctttctgaacaagtttaatacaaaacatttcagatctagcttcatgtttgaatatcttggagttcttaaaaactatcagtacctggaaaccagcaacaacaattctgattgataagtcagcgattgaaaaatcactgattgatagacactatttttaaaagtgaccaaagaaactaaaatacaaagccaaagttaagaactattcttaatgtacttccaaaaatgctaaaatgttgaagcatctttgaacggtaaaggggtaagttgggacaacagtgttatgtccctctaactgcagaatttggaagaaaataaaatgacttcttaatttataacagaattacctcttccatagaatcttcccttcccaagtttatgagaccagctgccccattctagattttaaattattggcatttctgaagatgaagtaacaggggaagtgatgaactttataaatagactgcctaaaatatttgccatgaggggtcaagatgtaggcgaagctggaaaaagactttagcttggggattagccagaggccaacagttgttaaattcccaaaacttcctttaaaaagagactaagaatccctttgagaacatttttttttctcttcattgtatagtaagtgaaacccagaaagggagaggggggctaaaaacactgtacctttttagccaaaattaggtcatgccaaccacagcaaattggaagctctacttaaattgtagccttgcagggttgttgtggatcttgttgtcacgcacatggtaaaactgatgtctccagatcgtgggctgctgctggctctgctgagcaggcctgttctgctgtctgaatctaactgtccagcctagctctccagactgtgacccgaggccgtgtctggaaggtatgcagtagaccacagcttttgaaaaatacaaacaaacatcctgtaatttggcaatttctaaaacaaaaaacaaaacaaaacaaaacaacaacaaaaaaaaaccaccacatttcattctgctttatgctgctagcataacaaaatggcaaaggaactaaggacagacagtagagcacagcagtagcaggcaatgttgctgttggacaactctggcaaagacctatttttatccccaaaggaaaaggaagtagaaacacgtacatagctcattcccttatgccctgcctatctgatgggatgggacggtagagagaagacattcaggaggcgctccattcatccaacaagtacttcaaaacatgggaatgtcggacccactgtaaaatgcaaggtttcttccgttttgtaaaaggaacccttatttcctacttacagaacccaacatttccctggtattttaaagtcatcattatagtgttgctttggccataattgaaaactatatttccattatattcaggaaattcacaatttttttttctatttgcagaagatttttaacaaaattctaagatctatatggtttataaaactgtatcatagcatcgcctcacagaatttttgttgttgttgatttttggtttggggttttttttaattttacttatttattttcggacttattgctaaaggagcaacctttgtatctgaaaacccatatctgtggtgtgtcaacaaaagaggtttcctgtctgaggaccaattaccaatttatatgattgattgtcagtgaagtttccattgctggcttttcatagaataaagtttccattgttatgtaaccttccacctgctgttcgctgagctgagggattgggcgggagattgaagaagtaagctacagcttgtcagtagagaacactgaagtcacagttatttagagtggtagtgaaatgtgtaaataacactatcctctggtctccttatatgccagttctatattcttgaaaatcagaaattaaaagccaggtttgtactgtgtgaggattctggaaannnnnnnnnnnnnnnnnnnnttacatattcaagacaggtctgagggctatttgagtatatcttgtgctgtcatttttggtgtccctagtatggctcatagcactatattgtgtcactttgtgcccagtaataccagcacagctcaaatgacaaatatatcgtatctaaaagtatattacaattaaggtaggaaatacaaaatttattttccttggggacagtttatttatttattattatctttattcactttacctcccaatcacagccacctcctccttttcctcctcctcctcctagtctcacccttacaaatcccccatcactgcccctccccttcccctcacagaagggaaatcacctggggtaccatcacaccctgggacatctagtcctagaaggactaggcatatcctatcccactgagatccaaccaggcagaccaagtagaggggataggatccaatggcagggaagagatactgagacagctctttgggtacaatttttaaatagatgatatgaactgtgtccatagaaacctatggtatacctcatataaaagttcaaagattagtaaaaggccatactcattcagtaatacaaatagctgaatgtactgattgagtttgctttcccaggtactattagccagagatctctctggaaaagtgaatggctagaaagagataattttctagatttccaaaatatatcccatggcaccccaaactcagaaggcagctccgtcttcagagaacatatttcttattatcacactcccacgggaacatcctgtctcatgttcaggtaatgggaatggccgccagaatctacgcatgactactgaggggattagttttctgacttacaatgtcatctcactgagctgttcctgtttctcagtgcaaatgtatagtgcttgtcactctaaatgtttactgcttatctctagttggcctgacagacacatgatggggaggcctttcttgagagctaactgagcagacactaaagaggagatgagaagaagactagtaatggagtgagcatgtgctagccaggatggaacagacgcatcatcaggcaacttcagattggctccattcgcttccttgcttgtaccctggagtagtccttcataatattccaggcacactttaagacccattgcctgtagttcctaaatttaaactcttccatgcacatggttaataaacacctaataaatgagtgagcaaataaattgtgatcccctctttctaagacctatgggttcttattcaccctggtctccagaaatacttaggaaggtgacttggctccatagatatgactaccggtgacttgaattgaattgaatgagagaaaaccgggcttatgggggaggtttgatttagaaactcttataagaggttagtgtgaagtgattggtgtgtgtatggagtgattcgggtatgcatagagtgatttgcatatataaaaccatagctggaaaactgagcagatcctgacttgccagggctagatatgtatatattgagttgacatgatttagttattcccatgttggattttattatcaagaaatctctccattttctgaaattaagttaataggaaaagagtattttgttggataggttatgagtctaaaaacagcactccatgtatttaaccaaaacattcttaataatgtttaattaacttgtttttaatgaatctttgagacttctttctctgcactatattgcttgaaccatctgaacatgagctcagctacttcacagggaatctgactgaaagggatggacatgcatgtgaggggcagcacattactattaactggactttaagatgcttatcacaccaatgtattttatccttttgtactgaaaacccaaccatgaaaagctagtgtaaaacccacaattataaaaacggaaatgtataattttgtaactgcgtgtacctttatcctaagaattgtgaaagtggtttttttcctgaaatataaagaaatttgtatcaaaattaaaataattttggattattaagaaaaaacttgataactggaaatattttaaattcctataaagtcttctgcattgcattttttaaacataatttttaaatgggtcagaaatctgaagaagaatttcaacggttcattttaatccgtgtggtcctcagaatttctcaacaagaacagcaccaggccaccattcttcccaggagcctcccatcaggctcagtgctcctcgagccacttggaggagtggttcatagctactctagaatgcgtcagtgtattcacataggtactaaaattagaatgaatctcggttctttacagcacaaaagtaaagccctaaagacagttgtgattcgttgcaaacccctttgcatatcaaaatagaaataatgtcaagatttgtaacttcaataaccatgatacctaagcattaatgaaatggtgtacgtacaatagcactataaaatgaaaatacagtataatgaatattgttcttaacccatattgtatttcaggctctttgagcttgggactttattgcattcatctctgagtcggttatgcataatagtttttccataattgttgaggcaaatgaatgaaggataataattgtcctatttcaaaatagagaagcttggaagagcagttgaagtcatcactccatgagcctttccctgtggagttgcccttcccacatctaacttctgcaagattttgtgtatatatggtgtttactgtgttttaactcatattaaaattagtatttaaagtgtctttctcagtatgacaaaatgtcagctctttggagtacagaattgtattcatttttctatttgggtatacaaactgccgaataagtattctctcaaataaacagttgctttttgcaccatcgctaaacacctgacaggctaaagaatttttgccgtcattgctctaggaacttataacaataaagtctacgtcatatcatagatgcatggagagtagagctttataagtaatcattgactacaacaaaatgtggttctcgtctgcctacaaaacgctgctaattagtgtattatcatgtggtgggtagataatgtttctacacgtttcttgaattattattttaatgttatcagaatttttctgctgcttaaaacatgtaaattaccataacatttgtttatgtcactagtaaaagtcatgagataattgaatgatgcatcatttgatagatacatacatacgtacgtacatacatacataggtacatagatatttagatacatagataggtacacacatagattcatttgaaggcatgtccattgctccaatgggagcttaaacttcgtcaaatctttccatgtgataatcatctaaattattcctataagaccataaaaaattccaatacatagaaaaaaacttgtatctcttgtaagccctttgtaaaatatgccttttacttattccactgttagcatcagcagatggtaagaagaaaactcaaaacgataattaaatcatgaagacttcactagaaatcttcctatcttcatgacatatttgttttaatgatattgttctctaaaattatcatcacttgatttttttattaaatttcatttattcaggcagtctctctagtcacctgctttcatttatacttacttacttctattttgaaagcattgacttacatatctggatgttatggaactaacagcgcatttcttcttagtgctcctactgggagataagttagttatcacatgtacaaaagtacctgctcagaaattgtctcttgttcactaggaacaactccagcctagaaaacctgttacccagtagatattgctgcctactgcttaagaacacaatacattctcattatcattcaagaaattaaatgattacattaaactctttgttaaatactttaatacataatttaaatgaagtgagcatgccttgaactatcttgtatagaaattgactttaaagtctgattctactttcattacctggtcattcctgctctatatttcaacttccatctcagctactgatgcatctagacctgtattttcttgtttctgttaataaaaatagctttaaaattaccaatctatgcagaaataatttaaagtttaaagaaaaaggatgtgaattcttaactgttaaccagtgttgaacatacactttagtataaagatctggagattgttttagccataattttatatcaaatatgatannnnnnnnnnnnnnnnnnnnnnnnnnnnnnnnnnnnnnnnnnnnnnnnnnnnnnnnnnnnnnnnnnnnnnnnnnnnnnnnnnnnnnnnnnnnnnnnnnnnnnnnnnnnnnnnnnnnnnnnnnnnnnnnnnnnnnnnnnnnnnnnnnnnnnnnnnnnnnnnnnnnnnnnnnnnnnnnnnnnnnnnnnnnnnnnnnnnnnnnnnnnnnnnnnnnnnnnnnnnnnnnnnnnnnnnnnnnnnnnnnnnnnnnnnnnnnnnnnnnnnnnnnnnnnnnnnnnnnnnnnnnnnnnnnnnnnnnnnnnnnnnnnnnnnnnnnnnnnnnnnnnnnnnnnnnnnnnnnnnnnnnnnnnnnnnnnnnnnnnnnnnnnnnnnnnnnnnnnnnnnnnnnnnnnnnnnnnnnnnnnnnnnnnnnnnnnnnnnnnnnnnnnnnnnnnnnnnnnnnnnnnnnnnnnnnnnnnnnnnnnnnnnnnnnnnnnnnnnnnnnnnnnnnnnnnnnnnnnnntagaaaattttcaactataatcgattagcaggtagagtttacaacagtagaaatttaatcaatcctagcaatagttgtttacaccaagtaaaatccataaaatatgtaaaaatccagcataagtttttcatacagagtgaggttatggagtttgtattgagtactgattgaggctgatgggcatcaggagaagaagacaaaataatgcagtggcgcatctcagcaacaaaatgaaaaacaatggcttcttagtgggcaaatgctttagagaagttattccttctatatacgtatctttgttttgaaaaagtgaacatcactaatattagtcgtagggtgtgcatgaggcctagagtctccatgttgaacagaaggtatgtgcctgtagaccccacataatgccatatgatgtccatgagctctagaggacccatagcaccaaaggctgctctatttactaagcctttcttaatgctttttggttttgagattacacacacacacacacacacacacacacacacacacatatatatatatatatagagagagagagagagagttttgtcagaatgcatatctatgaaccacatgcatgcagagcactctgaggccaaagaagatattagatactctgaaactgaaggtacagttgggagctcctatgggactcagccagggtcctctagaaaaataaccagtgctcttgatcattgagctatatctgcagcctctcttccaaacaattttaccttcttctgcatgtgtgttcataaatcaatagatagttgatgttggattctctttaccaaaacaaacagcacacactggaatggaccattagtttccagctctagagattcatacttctcatcgccaaaagaaaagggaaattccctttgctgaagcttcctgctctataaagtgcacatgatgatgtacaccagggtcttacggggattcagggagcctgcaagcacagtgcaactcaccatatacagcgagggttaaactaggtatccttaacaatcagaatccttcttcctatttttcttttgtgagaaagttctaataaatacatctacaattaccagaataatcaattaaagacgttaaagacaaatttacatttttattttatatttccaaagatttaaagagtgtttatagtggtttttaatggttttggttaaaatctttaaagatggtactatagaatagaagatttacttatttctggattttccaagttttgaaatgttgattaagagtaagcaatttcttttttgatatttatttttatttcctatctatggatatttgatttgcatgcatgtcttgcaccacatgcatatctcttatctgtggagaccagaagaggacactggacactctggaactgcagttatgcttggttgtgaacccccatgtgaaccttgatctatagaagaacagcaagtgactatcacggctgagctgtctgtcagtcgtttctagccacagtgataagcaacttttggaaggaaattgtaaatttatctttttggaatatcaaacaagacttggatgagaggggtcagccttgaagtttcctgccataaaattaagcattagatatatattaagtaatattaacgtatttattggtatagannnnnnnnnnnnnnnnnnnnccccgttatgtatttatttttatcaaacaagtcttacagtctttgctctacaccccaatagggatcataaatgatggacaggagtgactaatatcctgacaccgagactctctttggcaagtttttcctcacagcttttgacacagtgagcaggacttttatcacaagtaatgtcaatttttaaccagattctaatcttgtatttgtcatcagcttgttcccttcatcagtgtacgatggacacatctttcttgcctgaaagcatacaagtgttaggtctagatgaccatccaaaggtagcaattatccttactatgtggaggggtagacatgtatatattttacattaaacggagcttttcgttcacttaaaatcactctgtattccacatggtaagagctgctacaaaagtagaaagctggactcattctgctaaatttgtagagatccctttgtgttgtattgaggcagatttggttcattctggagggtgaaaaggggagactgtgaactgtggccagcctgagccatccttctctaccctgcctttaaaaacagaagtttgtctatcaacacagaccattggctttaaatcagtcagatcaagtcaaccacctctttggaaattccatattaaaggcaaattattctatctttgtaaaagtttgatgctaaaggaataaaactcttttgtggggtcttctatatggactttttagttgcaccactctgtggttcatactagctaatcattttaagtttgtaaaatgggggttatctctgagacacattcttacccatgtactttgaaagtggaatttacttgaatctatgttttgtaatttagataataattatttgtatccaaaccaaatttgaacaactgtttcctaatgcatgtgagatccaaatctttaccataaagggagcgggtgtgaatgtagataataagccgagtagaaatggtgatcttatgtgagctgcagataccatctgatcatgtcttctaactaattggatctctcagaagcttgctagcattctaactagaggtctatcctgagattatttttaaagcacatttgttatagaaatgaaatgctaaataagaaagaggaaagtggtaacagggaaagttggcatggagaactgttgctgcactcatctcgcttcatctttcttctaaatatagttataacatactgcccgggtcagctgatgtatgcagggccctttcacgactgagtcccttcccagtcaactccatcatggttttagtgaatgtatgtggaacaaagcagctgagttccaatatcaaatccagagtgaaagttgccaatcctccaaatatttttaataaattactaatctcaagaccaggcttaagttgctacttcagggctgaaactaactttttaaaagtcatatctcttactaagatgtcatattataaaatactagaatactatttattctttgatggagccatttattccactcaaggagaagccctgaaaaggagatgtgttcatctatttttactctaagaatataaacatgtctgttacactctagtcagtaaatgaattcagaagccaatatgcctacatgctcaaatttcttctgtaaatgatgaataatattgataaatgaaaattacaaatctgcaatagagcttaagtactgaatagtaaatcattctgttactaactctgtgttccaatgacattttctagatttaaaaaaaaaaagccattcccatatttaaaaatattttgtgcctttgcatcaatgtaagcaaatgtgcatttgaaggaaagttcacaatttgttcacatataattcccttttggaatcaaagtgcccttttcaaaaatagtttatatctttaaaatatagtatttaatatcctctttcccaccagactaaatagattgcaagtgtttgtaagaattaaaatagaggagtggtggatagttttaagagacacgtttgttctcctagctttgtcagtgtgcattatggagctggtcatcatgcaggacggaacgatgaggatggcagctttagctcatgtgactgacatgcacccatcatggccattaatacaagttggcagtgaccttggctgcatcacaaacagtctcctttgtgtggggggtgggggaggggcagataaactatatttgaatgatacttctcctgtgctgaaggcaaagtgggtgcttttaagaactttactgcttaattgtcttctttagttctaaagcaaatatttatagttatcctcatccttatttcctatttccttttgccctctcaaataacctcttctggtgggggaactgccatttgtattcaatagcactttcagaaagagtcaaggctaattttatttttattatagttgtgtatctgcagccatatactattatgcccatcagagtcaaaactctaacgatcaggaagcacacatgcagaggacatagactcataatttgatataataaagcaattattattaaaaatttagctttcacatgataaaacttctcaacagcaaggactgggaacatgggtcccccagtgaggcactagcctcagaatccggaggaactaagtttgagccataccacacatgtaaactcactctggcttgaaaacccaatcctgggatacaaatgcagacagacagatcttgggtctgctggacagtcagggttggctccaggccagcagaactcctttttttcaaaactgatggaaatttttctgaggataatacatgtgtacacattctacctgtatccagataggtaggcacacatgcatatacatcatgacaacataaatagtcactacagggtttaaatgatacaaatgtatattccccacaacttctgagataattgaaataaaatatataaattcatcattgcatagtttctgtatcagatggatttatcgcgttgcagagaactgtgatgcataaaatattaagcaatgacattgtcatcattttaaataacctgtaatatacagcttagtaaaaggttactactgaaagacctacattttaaggttgatttaagtaaacagactttgagcaggttatggtttcttgcatataattgtttgtgaatcatatttctgtcaggaaataatcagtgactatgaagggagaatatttcccgctagtgaggttccatttaaaaatgacttcttcctgagttatggtggtcttctggtactttgaaccagctgtttacaataacacttacaggtgtgactgcactggagaataattgttcattccaaactttggcatgacttccaaattaatcaattggcacaattaaagcagagttactagtcatggatgtattttagtatttcatgtatcagagtgatgcttccaattagtgggtcatttcaagtgcaccacacaatttattttcatacagagttccctcgagcattatttatgacgaaggaagaagtgtatgaatggatgtagctcttggttatcatcctctgtgaaactggtctgtatatgcagtttcttgttatgcttaaattgctatgaaatacactgaaagttgaaggtattttatacctggattttactgcaagtgagtaatgattaagagtctataacactagctagaatgaaggtgcatggctgtaatcctagcactcagaaggcaaaagcaggaggaggccagcttggtttgcacaatgatgttaaggctagcctgaactacaaagcatgaccctgccctaaaaacaaaagcctgggagatgactccatacctataacacttaaaatcataaccccaggaaagaagaatctcagaagagctcgtattgtgttaaggtattccatttaaaccataaaaaaagctgcatttccttttttttgggggggtggttctatttaagatacaaataagacaggagttgaatccaatttcaaaaatacatcagaaagaaactatatagaaatccctcataaactgcaagtcaaacttctagctttcctttcaggtagaagcgcagattgtagatttacttgaatttcatacccttcacttttacctgacaaggacctttgacacaaaacttttacctgacaagtaccacattgtgtaaatttctcttcagaacaatgcacatctttataaattgcggcagcacagcagacaagaactgagagccttggggtcagcctctgccacctcgagaggcagactttagtgttcctcatgaaaagttggacaggttgcatatgtttttctttgcttctatttcctccacaaaaatatgctaagtaacatgcaatgacagtatgaatttacccagatatcatagcatatagaaataatagaaagagtttccaaaggacatgctcagacagtgtgactactacaaccatgatgaggaacaactatttcacagaaataaactatcaagcacagattaggggcagagcgatgccaaattttattattctttcttcaccctgtttttaatctgaacttggatttcttaacataatgctaaaagatgcagctttttggtggcaggtcataaatcacgatggcatctttacttacattacctagttaatatctcataactggtaatagagaaacagagtcttagaaaaacattagatttccaaactgaatttcagaattatgaaaatcacagctgtattgtaattgcataacataaatttctgcctgataattgatttttttgttgcagcatgtcaacagaattcatgaaatagactttactttcttgattagcttaattctaaaatacaggatttttcttgggaaagagggggttgttatagaagttagattgtatatacatatgttgtatttgaaaagggagtgaacctgtttgtgtttggctgtgtgagcacagannnnnnnnnnnnnnnnnnnnnnnntttcacaaaatattgcatacaaattttaatgagttgagctcagagctacgtgaggtgaacagtatcccaacccctgtaggttgggagctcaggaaattctggtatgctctgtctccatcgcccttcccaaggcaggacaggcgaacgacattatgctgtacgtaagcatcgtcagtgtgcactcgggtctagacacttcactgtaagaagtccacacaccaataatgtcaagaaattttctggaaaaggaaaagaatatttaataatgcaagaaattttttgacttaactccataccattcccttaaggagactaaaaatgttgtcactttgacatttcaaacatgtatgtagccacaagaaatgagggcatttcacagatttaaaggggttaaaagtaagtcaactacttattacttacttattggattcaattgatatcctaacttggaatatcacctcttctgaaatgattgctattatttagacttccatacataacatggaaattttgctagatatctgacattctgacaagcacctagctacacagctgttttctgttttatctcactgttttatcctcctgagaatttttccaacatatttaatgaaaactgaaattgtgagaaagaaatcatcactgtttcccacttctttatttactgtaattttactgcttattctgtattcacaaattctcaagaaaggattttctcattgtgtatctttactttatttcttatatgattgatgtctgaaattgccctcctttgcaatccactgtcttttattctatgatagtcattgatcactagttctcatctgaatgtaatagaaatatctaaatactactgtcacagatcactcagctactcagcatcaagaaacatgatatcacatcacatttcttgaggaatcagtttttctctctttcagtgaatttgagacaaaagttttcaatagtacggttttttttgttttgttttgttatgttttgttttgtttttatcaaacctggtgattggccaaggattcatagtattttgggctccaagtacaagcaccaactaaagatctgaagaatttagctacataaaggtgtattttaccagaagagacttcatacaattcaggaatattacaagaaccccttagaaaagttagtgtgggacataaaggatggcacaagagagcagaggacacctccatttctatgagaagcattgcagagaagcaagctgttgggctaacagcgatgaatctggatggagagtggaagtaaaaggaactgcaagaaaggcaagaattaaagtggagggaaaatgaatgttttaagaaatggtaaaggattgaactcaggtaaagagaagggaaatggagatacatacatatagacatacgcactttgcatgtgtgtgtatgctgtgtgcacatgcatgtgtgtgtgcctactttcaccccaagtactgacaatacatagtgtgccctcctttaacagggacgggaagacgagcattggcagcacaaagactatgtgaattaattatatgagagcagaaacctttgctgagtcggttgtcacatatcacactgaacaatccctggaacagctattattttttaaattataactgaattaaggaatgagtaaatgttgctttggtttgatttcttacctttattgatcagtgatatgaacttgtctgtggtcacatgaaatctcacataagtgtgagaagtgttcagaagcaagtgacattaagaaatgaagatctcacggaactccttcacacacacacaccccctggacatgtttccttaaggttattttatcactggaatttttgctatcaggcctactacaagtccacaagctacaggcttaagaatttttaaaataaaacctattatgcaactaacatagcatagtatatcttagttttcgtcaagaggttgagagatgacactgggaactacattcactaactctcttctttcccgttctaaatccagtctgtgtaatatccatcctatagcagtcactgcatgaacacaaatgaattcggcattgtttagtaataataactgaccagtgggaaaattttctccttattaataataaagtatagagaaaagataataatataatctcagttccccaagattcttaattttgtccgggatggcaaactcatccatcagtgaggaagataccctcccaaacacacaaattttaatgggagctacagaaatagtgaaatcagaactttcgggggtaacattaaatggttaaagaatcctgtgcaatttgagtgtttggaaaggtaggatgaaagaagctgtgtggcagaagaaaagatgcaaacttaaaagaggtgagacaataaattggtgctttgagtttgtgtacatgtgagtttggggagtgttgagactgttgctgtgtagcctcagctggcctcagacttcatgcctccaccccctgaaacgctggaattacaagcatgcaccaccacacccaggttagacttttattctttatgactatgtatatttttggattctagagctaaaagcaagaatataatttgaaacgaagagctttgacaatgaggggaaaacctcaagtaaggaacaattagcagaatacatgaaattcaatccagacttcaagtttagggaaggaggacctgtctgctgagtgttgtggggcagggagcaggaaagaagagccaaggcgaggtattctgtgagggattagccgaggggaagaatgtcctgggtcagagctgtgaaatatcaaaatagtttactggggaagctgtggtgctccttttccggaagcccttaaaataggagaggcaaaatccttgtgaaataatttctctatggtattatctaaaggtgggaatgatgatatgagtgagcccagccactgccaatattgacccagaatgacaatgctcacctgagcttaatagaaatacagatctatgcatttccactatgaagaaagaacagcccttcttattttaaaatcttttacttgcttggtaaattattnnnnnnnnnnnnnnnnnnnnnnnnnnnnnnnnnnnnnnnnnnnnnnnnnnnnnnnnnnnnnnnnnnnnnnnnnnnnnnnnnnnnnnnnnnnnnnnnnnnnnnnnnnnnnnnnnnnnnnnnnnnnnnnnnnnnnnccaattaactactatgtcaactagttttttaagtacaatatccatttccttgtgtctaggggtaattaatttgtcactgtttccccttctgaaacaccattttctctaaatacacccataggccaaggatactgatacaaatattatttttttaggatcctaggaattttttattaggtaatttcttcatttacatttccaatgctatcccaaaagtcccccataccctccccccactcccctacccacccactcccacttcttggccctggcattcccctgtactgaggcatataaagtttgcaagaccaatgggcctctctttccactgatggcctcgtaggccatcttctgatacatatgcagctagagacacgagctctggggatactggttagttcataatgttgttccacctatagggttgcagatctctttagttccttgaatactttctctagctcctccattgggggccctgtgatccatccaatagctgactgtgagcatccacttctgtgtttgctaggccccggcatagtctcacaaaagacagctatatcagggtcctttcagcaaaatcttgctagtgtatgcaatggtgtcagcgtttggaagctgattatgggatggatccctggatatggcagtctttagatggtccatcctttcgtctcagctccaaactttgtctctgtaactccttccatggatgttttgtttccaattctaagaaggggcaaaagtgtctatannnnnnnnnnnnnnnnnnnnnnnnnnnnnnnnnnnnnnnnnnnnnnnnnnnnnnnnnnnnnnnnnnnnnnnnnnnnnnnnnnnnnnnnnnnnnnnnnnnnnnnnnnnnnnnnnnnnnnnnnnnnnnnnnnnnnnnnnnnnnnnnnnnnnnnnnnnnnnnnnnnnnnnnnnnnnnnnnnnnnnnnnnnnnnnnnnnnnnnnnnnnnnnnnnnnnnnnnnnnnnnnnnnnnnnnnnnnnnnnnnnnnnnnnnnnnnnnnnnnnnnnnnnnnnnnnnnnnnnnnnnnnnnnnnnnnnnnnnnnnnnnnnnnnnnnnnnnnnnnnnnnnnnnnnnnnnnnnnnnnnnnnnnnnnnnnnnnnnnnnnnnnnnnnnnnnnnnnnnnnnnnnnnnnnnnnnnnnnnnnnnnnnnnnnnnnnnnnnnnnnnnnnnnnnnnnnnnnnnnnnnnnnnnnnnnnnnnnnnnnnnnnnnnnnnnnnnnnnnnnnnnnnnnnnnnnnnnnnnnnnnnnnnnnnnnnnnnnnnnnnnnnnnnnnnnnnnnnnnnnnnnnnnnnnnnnnnnnnnnnnnnnnnnntatatatatatatatatatatatatattctgtatgctaactgttttcagctaatatttctattaggtatatgtattataaagccataaaattacctctaaaaataatgttagtgtaaaagtgctagaaaataataagactctgagcactgaaaccacatagaatcccaaagaaattgataaatgtataaactctgaggtaacaacttgcaaataggagagtattatagcttgtatccaacagcgactgggagagatgtaggtaagaaagcagagatttgtccagaaattaaaacttactgtcagccttcttcaaaccaacctcagaggttacacggcttttgactttgtaccacttaggaacttgaaaggcaccttagaaacagaacttagcttggcttgtgtgcctgtatatgatacttgatgttgctacctggctgacaggcctgcaccaagtgggaagcataaggcacgtgaactctgatagttctgtcttcctgcacttctactgctttgcctgcaggtctttgggcttcagggacaaattacattctttgattgctaagtatctattcatatttctgacttaaataagcagctatttcctatgcctatctcaaacatgtgctttttgtaaaattagaagagtccgcagctctttctgcatgtcttcactgtgataaatactactatgctatccttgagctgtgagtatcaatttgtgagctttcagaggcttgcctctttctgtagagatactgttatcagatgatcacccaaatacattagaaaaatgccctgtactctgagattcaggacatagaaattagataggccatctttggaatccacttcgggaagtgtatgtaaagagatctccagggactgccatcaatttgcctatacttctgaagattttcttttaaattccagattagaaaaaaaatcaggctgaagtaccagctccatttagtaatttctgatctctacaaacagaattttatctatagggggaagtactgtaatactttccatttagtattatctgccaaggatgacttgatctatccttgaaaacagcccaggacagaatgtgtagacatgcagagataaggaggctcctgccaggccttgggctccaggagtctcagctcagctctggcccaggcgtctttcctctgcagtgcacttaccttaccccgcctggatattatagaggaagcattctgcttttctgaggacacctctattcctagttctttgacagcttaacttgccatatcccctcagttttatgtgcaaaagaatataaaggaaggtgatgaaatgagaaaacctggagtggagttgccacagtggagaagaaacgctttttgcagaaacgccttgtttagtccgcagtcatgacgaggttttggaggaccatgtaggtacagcataaagggcgtcttagtacatagggaagagaggagaacatgcaatgtaaaatatcggttagcagtaaggataaagatgggcgggagaaaaaacacagttctgtctcttaaataattctaagcttgtggttcttctttagaacccttaactttataaagaagtattaatttaggccacatggcaaatcgtataacttactttgaaactcattgtgttaatgagataaaaaaaaaaaaagaagaaagtggcttattataaaggatcaagtttgtacaactatttctaaaaattgagaaaaagggaacagtaaaaaatgtatactttactttctttgacactacactgtaaaggaaaattttatctccatcgcttaaaattatatagttctttttgggtcatctctgtgtcacaattttttaaattaaactgaatcatatgtcttttactctaacttcatacttatagacataatttttcaatttgtttttttctataaaaatgcatcaatttaaaaaatagtggataattcaatttgtcttttcattttcagttggaaattaatctgtttggctttaggctatgtaacacctctcattagacggactacacgtagatacatgagcgtttcaaatacagaaagcactgagattttcacataatactgagatcacaatcagagctgctgattgtatcatgttaggtcttttgagagagagaatgaaccaactgagcaaatgactgagttacaccagtgatgtaccccagcactcgagaggcagagacaggcggatttctgagttcgaggccagcctggtctacaaagtgagtcccaggacagccagggctgtacagagagccctgtctcgaaaccccacccccacacaccaaaaaaaaaaaaaagagtatttatacacaaagagaaacaggtctttatacaatactggaatttgaatttgttgtaatcttgagtatattgtcaggcagtcatggtgctatccacaactgaaaaatgaacgatgcgcccaggtacaatttcaaccaatcgacagtattttcacaaaataactgtatattgaagaaagatgtatcgttaaattcaattggtgccaatttagaggcctttgacttcacattgttttgtgaaagcttcaaagattatataccattatgataaaaaagaagtttaaacaacaaatttattaaattgaattttattcaagtgaatttttacaaatgagcatcgctgtattttacgtaatagaacaactgcattattatttccacttttcgggtgagaatatcagaggttagggtactgtcatttaactgagtttgccaaactcaggactgtgacaggagaggataggagtgttcgttgtcctaacacgtctctacaggtggtttacatcttcctggtgtcttctaaagtcacactaccctattaggctgttaagtaaatgcccacctccttgcttctgtaacaactcacccctggcctgctgttctatagcattttctccatagaggttcactacctaaatcatcagtgtttgtttgagctcctgtattgacacttgttgctggagtgtataagcttctctgttacattcccagtgatgtctctggcattgagctatcatgattcatctctctctctctctctctatctctctctctctctctctctctgactaacaaacagacatttttctatatttttaagagccatgagtttggcccatgcaagatgacaatgaagctagaatttgattttgtttttaaatataatccaagctcaagcctcgtttaaaatttgctatcagagtgtactaaatgtgtgacagcgatgagccttccccaaatcgatggctgagagctggaactccatcctcctggaagaggcctgttgcaccttaatctcatttctgaagtttgctgccacccttgcctgatccccctatccctgacaagcgttctctagtgctaaatctgtgtgctacacagccctggcatgttttgcagtgtggagagtctggttgtcctggagtcttgcacagataaaggaaggatacagttgggagaggaatgcactgactacaaagtgcatcctgaaggccatttagctcacaatgaaggtctgtgttttaaaatagctctataacaaagtaactacagagtgctggcaagggctccaactatttatagaactgagtaaggcgtggtaaataccgccacggtacccagttctcccttgccacaaccccaaacttataagaagcactgtaattatatttttctacttgggaaaaaaaaatcatagtagccattatcagtttaaccatacggaagcttgggctgagatttcttttttaaatgcatagttttgagtttcaacagctgtgctgggtctttaatcatatattatctttatgaagcctttttctaacatatgttaattggctgttttctgtgacaaattatgagctcttactttgatgaggttcaattgcaatcatgttggagtcgagtacgtcaagtttccacccctgctggctcctcaaaccactacaaacatccgcacgtcactgcagtgctgagtaatggcaggattggagctggttgattttgctacagattttttttccacaggatattttcagcttctttgtactaaatctgttgcagggtttgccctttttagcagacacatgctctaaaattaacatcaaatcttattggagattactataatacagtgaggaatatttcataatacaacatcccagcgtctgctttgctttactgagatttcagaacatttcttccacattttaagtcagtcacttgtaaatctgactagtactttctacatgaacagcatgttgcagcagacattttgaatgttcctctttgagggaagcgagttatctgagaggatgatgaggtagaaaggccaatgttataaagacattggaagtaagtgtttctctaggtgttgacaaatacgttggaatgttagaaattttgttgttcattatattctttttcctcttcaatattacattatcagtcaggtaatgaaaacaagacgtgttcatcgaggttaacatcctagaagatgtataacagccttttcagctttctgtcctactgtcaatgtttaatgtatgattcagatgaacagaaatgttctactccatctgctctgatagctgtgacagatagcttgtatcaaataccaacagatgatcagtgagagctataattagaacagatacaaaaacgcagtgtgtttgtgtataatcatgggaaattagtcaaggtaattgattaaggtcttcagtgcctgcgtcaaacatcagtagtattgggattcatttaagtgttttctgcctcaacatgtcatgtaaggggctctagataaactgcagttcttcaaaccaaagccagaggtcgatttccatataggcatcaggagtttagataagatgagccagatgttaacagagccaaatgtgactaggcactgctctcctcgggaggctgtttttaatcagctatttccctggggtaatacacagccaatgagctctaattcctgaggctacctgctactgcctgggaacgtcagtacgaggcttacactgagcatttgtgaaaaaaattagagaagaaattaagggtaggggaggttaacttcagaagtgattgctattgcttaaaaaaaaaaaacagtaaaatttgctacttttaaatgcttttaaatgattaaaaatagagtcagtcccaacttgcaaatacagatgcaagtgaaaagctataattggttaatattagttagacttgtataaagatggatattattttgagaatgtgaatggagagccatcttcagcacaagtaagtaatctcaaaatgtctttgtcattagcgctatcacaccaagggaggttgggtttgcaagccctgtgtggtcctgcaacagtgggactgcaaagtcaatccacacactccatcttgagccaacttacacacagaaatttagttccacttgataagacacatacttaattggctttaagaaaataaaccatggtaaagaacaatgtgtaaatgaaacagagcttggctgttaggaagcccgtgagccatgtggcttaattggggccagttgggatcatttaatgattgctgtcagaagatcagatttaatagaagaccacagtggggtacagttaaacaaattgtcatcgggcacttcagatgagccagaccttaattaagttgattagaatgctgtaaaggagatgaagagacagagaaaaattgatgaatcactaaattccacattgagcgatatataatattaccacaaatatcatctatattttacaggacctttatggaagtttgaaaaccatacatattagcctgtaaactttaacaattgtctaaggtttaattacaaattaaaattaggtgacattcagtttaaataccagatgatttaccaagtacttaacaacaagaacatgcactaaaaaatagtgtgacttccctttgtaaggtcatctttaagtgctgaacaatttgagaaagtaagtaacaggaatagcaaattattttaaggacataattttgattatttaacgtaagggaatatgatcttcacttagaatatcttgttaaccactcatgtctattatttactggttatttactgacgaggttactcaggtgttttaaaatgcactcactgttttatctgcatcttctaaaagacaaacttgtgttcttccacatgctacacggacacacacacacacacacacacgaataccaataaatctgaaaagtgtgcctaacatacaagctcacaagaagaaaacatttatagggtatttccatcttaagcattaaatatactaggctaaagactgagaaaaataattttttaaaagaacataatacgctttggaattttatttttaccctaataagacaaaactgtacgttagcaatgtgtgtcacttcgagctgaccttacttgggaagctgacaattcaggcttgctgctgggaaagcatagtgctccacttgctttgttcagtaacagcagcaaacactccaactgcatgtgcttatcagtggttacagctggaacacagaacctcatgtgtgatgatccatagtagctctccctttgtgctaaatacaaaccagctttaccttcatgggaaaccttacactgccctaactggtcccagcaaacgtgtggcggcaagggctgggtgcgtttataagaacaaagacgtgatagaagcctgcatcatctatatagcctgatatagaaatcctgaaatctgtcgtgccgttgaggagtatgaggcttttgacacatttagaccatttggagtttattttggcttggagaatgcaggatgccgttttaactacagtggggggaaaatgtccaaggcagactatggcatgggtaactgtgacagggaatctgtgattccttatgtttgtcaaattgtttgtaatgctgtgcagttgtctggaggtatgttgctcctaaattctcgagttgtgtaaatacagtgatttatttaaaagacagtggcaggttaagcccacttattaaattaattgcaagggttttcaaaatgagctccattttagccttattatatttctgacatacatttcatctccttttgtccttggggaaagatactaaagtaggactagaaacactcacatagagtttccagcagctgtggtcactgggaaattgatgtatttccctagtcatttcttctcttgcagcctgaagctcttctctagctggtacttatgagaaagtccttaatttgtatgacatgttccttcatctaatgcttattgttaacaatgtaagtgaggtctccatgttgtctatatagggatgacatcgttactaactttactccataacgtatacatgaaagccaacatacaagtgtaggcaatccacattcctggcaccaccatacacggtaccattcctgtagtatcatatgtaatgaggctataaccatctgtctttcaaatgcaaacatgtttccagtttcaggtaggaaaccaaaagtctaagtgagaggtttgatcatcaggctacagttacctgaagtacccatttcttaatgcatagactcattcagctttcacttctgtgtggattatttttattctaccaacaagatactgtataccatggtaaaggattaacctaggttaccaagttgtttctgtataagcaaaatgtgagaaaaaaaagtccttagtactaattattaaaaatagctaataaatacctaagatgagatattcaagccttgacaaaaagtgttcagttaaccaactggtaattattagtcccactgtttacctgattgatgccaggatagatcctggcactagaggcatttgattccccccaccccatggtgagtgctataaaggagagggacttagagctttgagaattgtctaggggaagtgcttctgagacagaaggaagaagttgagcacacagaagggagaaaacattccagacagaaggaattgcatatgcaaatgccctgtggtaggaagaaggacaatggagtaagaattttttaagcaattctatttgctttttgcctgtataacactagggtactgagacttgaaggttattcaggatctatcatattgatactaaactcaatcaattgggaaatgctcttcacagcggtatttatctagagaaagggactagcccttttatgttctcaggatgagcctcagctatgtgacttagaagccgaatgcactctattctgtaaaaatatatgataaacttagagaaaaatgaaaatgtgattttttaagaccaggaaactatttctcatcacacaggcaagcactgctaagaataataattgggttatttcatttgaagctcttaagggaaaataggtatgttctgctagttctttttaaccaaagtataattgcacgcctcatatgtctttcaaacaaaccataaagtagaaagtttaatgcatctaaatgcaagtaatgagcaaagctttcccttgaaaggtagtgaatagctgaatcacttgactcggtgacaaacacaggcattcagagacagggcacatatcactttggcctttggctgtacatgggactttcatttatttaataatactatttcttgggtgatacagtatacctaatttgcaggcttgagtttaacaaaacaaggttttctgaggatgctcatgatgatgcaaatgtgagccagaggaaacattatttgccaatccagataaaagaaataattctctccttgcagattggcattatacattctaatgcttaaacctctttgggctgtttttatttaagtgactgtcctgtgctcattgaaacaaaatacatgccttacaaaggtaattttagcagcagagaattaatttcttcccacatcttttaatgtggcatgggagtctcaatctacgatcaaaacatgtaactggaggttatgtttaatttctaaatcaaagtgttgtgggaagacgattgaaatttgtggaggactcagacctcgttgctatgtggttttcttccagaaactttagggtagacttccattaccatgtgagaggagccaagcgtcggtgacgagatgaaaatagtttcaccatcgactgaaagttttcattagttactttgatttataattgaaattttaaggagccccaagggccccgataacaagaattatttcctcactactcgatcttttctttgcaatgtgagatgaaatatgtaatcgatgtatatgactaacaaatatttgtttactgctgtcatgattaagttctctcccagaagttataattcacttgttttctttgtacagaaatcttcatttgcttcagaaagtaaattcagtatatatggtgccattttctggataatgtaatttttggtaaggcatggtagatgatgagggagcggtttctgctgtttcacccaagtccatttcggatctgtttaatttctcatatttacaccttaaggtgatcataacaaaccattaacccagaaccagaatggccttttctcaggtgtttggaagacagaaatgagaaaatgtgtgcctcccatctgccttttcctcgctgccctttatctgaaccagcactccagggcctgtgtgtggggtgtgctgccgagcacactcagcctgctctactcagagaaggaagtggagagttttggttcccattttacacttgtggagcagtttagggaaggaagcacctttacaccttttattgttcgcggttgctgacatcatatccttccctggccagtctgtgcgtgtttcctgccattctgtcaagattcttctgttactaggagggatttgctgaagggaaggagggccagaaagagtgggaggaggaagggaggggaggtgtgtgtcaatcaaactcgcttgtttgtaaatgagggatccctcaggagaatggtctttagctgtccccaagacattcttctctgagcaggtctcagaacactttgccttcgtctgtctgtcggcttatgccaaactcaaagtgaacagaagcctgccatactgaagttccccttttagtcagcagactgactttagttttttatttaagttggcaaaggaagaaaaagtgcagacgactctaactccgtacagtgttctttttcttcccttcgtgttcaaagttttgattgtttacatgtagctgtcattttccaagaatggttccttcatgtgagaactgtagtatccagacgaagcctgtggttgattgtacataatgaaagttctcagtctgactgagcactactatatgtagtttaattactaataatcttttctttcacatgcctgcaaaaccaccgaataggttactacagtaataataatctctttctctagccctcctgaaaataatacttgaaacaaaccatagagtatagtttatgtataaaaattaggttaataaatatttatactaaaaagcagaaattaagcaaaagttatgcaccggtggtgaccttcctaattctttgcatttttcctgatggccttgaaatgtgaggacaccattgatctgttgctattctatttgtgtggactttatacaagtctacattttatgaatttcaggaggcaacacttcagttactgaattgagcattgtccttgtgcggaaaacaaaataaaagtcgaattaggtttaaatttccatctctctccactacctggccatatttcaaagcggagactattttcaatgatatttccagggatcatttcatgtgtgtgttcatatttgcacatacatgcatgctaatatatttgcatatgtagttctaaattttttttcctcattgtgttttaagaattaaaaaaacaaacactttccttggcttcttctaagcacagtgtctggtttcaaagttcaaaaatgccagatggtgattgaaggggctcctttgctttcagaggccaggagctcttgttctctaacgatactcttcttcaggggtgtctccctacttgctttgttacaagtattttgaatcaaggtctgtagacagtgacctcctccctgctgagccactatgctctaatctgttcaccctgaccttccacccaaagtgagtaagcgcttaggcaggcatagtccggtaagccgatagtgccacaggtctcagctaagagaaaggaagggaagatgctcccatatactttgacttgagattcatggattgtttttgtttgtttgtttgtttgttttttgtggtggagaaagccttcttgtctcattggggtattacaaatgcatgggaaatacaagtctgggctgctgcttgcttcttgggtaagactatagtaaatgcagaaaagattcccacttgtatgctgtttaagaccatttctaagactaaatgggtagactatttaacaatgttggatacatcatgtgtgtgctttgcaaattctttatctatatgatcttggtgtctttatagtagtgtctttgccttgtgagtgtcttagtgtgtgttgttcatataacttaaaaactttgagactgctgctaacattgaaaactgtggctggagtcgtaatctttgacaagcacgtcgtaatcatggtgaaactcacacgtggatgccgtgaggccaaactgagctgcagtttaggagaaggacattgggtaaaggagagtggatagtcttagtgattaagcagtgcttaatccaccagaactaattatatcataataacctctgcaattagacaattacctaaacttatatttttaaaaatttactcaaggtaacaaagaataaagaaattgaaagtcagctgaaggtcagaccaagtatctaacagctttttctgttccaagaaccttgaactagagccaaataatctattaagtagtcaggacagtggcttagcgttacataatacatgtgggaatttttcaggtccactgtcagagactaacccgagtcaagagggaaattctgagcagtgtgtgaagtagttatatcctctgacataagagagacaaaataattgaagccgctgcttgcaaatgaaacaagcctgtggaaggcttcctacctagttaagttccaattcatagcaattcactttcattatgtgcaaatatttttagatataattttaaacagagtaaaatatagacttttaatattctgtgctctatgggtttgccatgtaattgataatcattattttaattttaattcatgacctagagctctctggtatataatatcaaggttctgtaattttgtgtctgactccctaaggagatatgatatgtctcttttaaacatttaaatttagagggctgtggtctattattaaaaagcatatagttacaaatgagataataaccttagcttttttgcaccacgtatttcttaccagtgaccgtcattcgcgaggattgttctaatgaagagtttaagagcttcaggaggaagtgctctcactgctaagcgatgcttaaacataagaggaaacaccccatattacttttcctgtgctccctggcagtgatcttcgtaaaataagattaaaggatttagttttaaattagttgacatttacatatatcaaagagcacttccataatcgtccatcttatttgcataactaggggcgttatcacctctgctgtcaaaacacgagattgttttccattcagaaatgaattagatgccctacttagcatacacaggtatataaaggttcattaactctctgatttgggtaatttttcataacagaagggtgaaaattgtcacctaatttcattaaaacatattaagaagctctttacaaaaatacagttcatttcaagtgttgggttttaaaacacagttttcatcatttaaatgacttcttaaattacttataagttattttaattataaaagcaaagtgccctgtgcagtaagctccagtgtgcgatgtgccatgtgctctgagaaagagttatttttactcattttattgttttgtgaagtttatttccctgatgaacctaggaaactggcttgctgcggaagaattgtttaatgtttcgtttttgttcagcaggaacgaatgcagggatttgggaactgagctgtgcgcgtgctgaagaaggaaacgtgtttgaaggaaacaggaaagagaaagaaaaggaaggaaaaaatacataatttcagggacgagagagagaagaaacacggggactatggggagaaaaaagattcagattacgaggataatggatgagcgtaacagacaggtgagtgtggcacatcccttcatatctgttccacacatacgttcaaggcactaaaatcatgctggactctgtgagctcaatgtatccagtttaactgttgattttcatctctttgggacacagcagggaagagaactttaactgttagaaatatgttttaaagattcctgattcctcactttccactgcctcgagacctttaagtggaagctgtatttgtatgacatgaatagcttaataattaggagttaataagcgtagaattgctacactgcacgcatcatcaaacaaagataggcttacatgcatgggaactgggccttttgtggtcatccacttaaaagtttataatatagcttaaatatcctctctctgagaaggggccagctttcttctcatcacaaaggagagtttgaagtaaagccaaacatttccagactctcctgacaacagcagaacttttacatgagctagcagttgtgtaaaacatagagagaagaacttcctgttaacatgtgttttctcttattcctgaattttataaacctggtactatcttttcttttctacacctccagtgataatgtctgtaagacagaaccagttttgaagacttcaaatatcaaatgttccatcctgtgctatgaacctccattatgcattatgagttcctacagtctgagtcactgtctttattctggaaagagtagtctggctatgtgagggtgactagcaggtttagacacatctttctgttgaatatcaggtgtcgatccttaaaaggaatcagtctacctgggtacacacagtggcatgcagacaatggaacctgttccttggccctaagagaggacagactcccactctaacctatttatggtccagaatattaaatatagctttggaaatagttccccacactctaagtctccaaaataaagacactcaccttctatttagtccctgcttacccttgtgtgacatgagaatagattccatttaaaacacaaatgctttcacactcataaattagaatgaataggaattgttgtttgtttcattatgtttactgatggctctttacaaaaagccagtgagcttttaagaactaagatttgcctggttttgttttttaagattatacgttttcagaaatgagtgtatttcacaggacttgaattgctttgagcttaattttgagttaaaggatgaaaaatataagattcatgagggattccactattttcattcatgtatagctgggatcttaaattaagactgaaatattgaacatcacttacattgcctatgggggcattgctgttggaaacaatctttttgggttggggtataaaaatagatgaattatcatttctaatttaatattaatctattttttagcttcgtgagattcattatatctttttttttacttataaagacagaagaaaaactatgggggttgaattgtgtggactttgctgtgctttttaaggaaacaaagcatctatagagatacaagatttgtcacatcatactcttgagagagcaagtttaaaagtttgcatgtagttgtcttgatctatgcttgtagatactcttacctgtattaaaaggtcacaataattttaagaagtggagaaagtatttaaattcagcttatgttgaccttttaaaaagtactaaggatcatttcctttattatataggatgtagagccaatttattatttttctcagtctgtgtgtacagtaggctttttaattcaataccattgaagaaaattagtaacaataatattactgtggttgaagctatgcttcagtggttgtccaagatgactattgactattttaaagagctgtcatttatgataatgtttgtcttgcttacctctcattttctgtgcaaatggtccaaagaaccacttggataagagaatgaagtatataggtcacttctgataatcaaaaccagcgagtgtgtgggggagctcctaacctgggcatcctttaaattatgtgttcacatgttgaaaagaggaatgtcagcagcttagctctttctgaagctgcctgactggggtggcctagtaggacctcacacagaggctagctgccgtttcttcttggaagcagtgaacacagttttttttttttctgcctttgcatttgtgtatttgaccacatacagaataatgtgggcctatgaagaaaaagaaatgctaacccaaagtaagccccgaaatagcatagaacttattaacacattgtgtttcagaaagataactcatctgaagacagaatagtcatttatacacagttctaccttcattgtctcgtttataacaaggaaacaatggctaaagctccattagaaacataaagtagtgtaatacagataaaatttcacatatttttactttacattttttcagtttctacttttataaagccaatttcttagtcttcattaagtttaagttaatatgtacaacaaactcaggaattgtcattttatcttacagatacactcagacagcttgttgaaagtcattaccaactattttccaatgatggcatgtaaattattccatttaatccttaaaataggattctattttatagttagaggttatttatttattaaatcaacaagtattatttgactgtaccctgcccaaaagaaaatccttcctagtgaatagcagtctcattcatggatgagcgaagtgttctgtaaaccaccaggtagcaaatactgtttgcattgtggtgtctgactcagctgtggagctcttcataggtgctctggatgcagccagagacagtagatatgtatctatattcagtaagaaagctttactgacaaaacaaatatgcattacaattgtctagtggaccacaatttatagacttctggtggactgaaatagacaagaactatggaaatacagaacaaaaatgtcatttatggcctgagaatgaaactatcaaagcactatgaaagaacagccagggggtgctgtatttaccactcaagcttggagaatgacctcgccaagcaggtaaaaatatgggaaccacagcattctagaggaaacagagtttccaaggcttgagatagaaaaaagcttggctgaagattcagaacacacttaagatttgagcctggtgtgtggctttagagttataaaagactccacatcgtgttgaacaacatcctaaaacgcttagagagtctgcttcacttaagagtaactggtcaagatcttacagcaaagggtaaaaaaatgccaaagatctagtctagtctcaaattactccttttcaaaacaaaaacatgcttctttcaatgatgctatgctgcacctagcataatttaatggctaaaagacctagaatttacttcatctccttttccagtcgtttcctattggaacccataagagatagataagagttcactttttagagatatataaacctatttatagttccagctctatatgttaccttggcttaatacatactgtagtacattacactacactaaaacagtataactcttcagcaacttatttaacctctctgaacctcattggtagagtgaagattaaaaatagtcacacacacacacacacacacannnnnnnnnnnnnnnnnnnnaggaaacagagtttcccaaggcttgagatagaaaaaagcttggctgaagattcagaacacacttaagatttgagcctggtgtgtggctttagagttataaaagactccacatcgtgttgaacaacatcctaaaacgcttagagagtctgcttcacttaagagtaactggtcaagatcttacagcaaagggtaaaaaaatgccaaagatctagtctagtctcaaattactccttttcaaaacaaaaacatgcttctttcaatgatgctatgctgcacctagcataatttaatggctaaaagacctagaatttacttcatctccttttccagtcgtttcctattggaacccataagagatagataagagttcactttttagagatatataaacctatttatagttccagctctatatgttaccttggcttaatacatactgtagtacattacactacactaaaacagtataactcttcagcaacttatttaacctctctgaacctcattggtagagtgaagattaaaaatagtcacacacacacacacacacacacatgcccattacagtgctaagatatgaagccatgtatatgaagtgcccaggatgtaagtgctcagtgaatgcccagatcagcttctccagttgcaaaccacactcttggagccattgtatcttatagtcactgtgatttctagcaaaagttgttggcctttcactttgaggagttctaccataaaagaatgtcaggagggggtggcacagagtagagcaggaacacaaagaagctcccttgctgagaatcatcatccagaacagtgctgctgcagaaagggtggcctgtgggcagggaaggaagagcacacacgagacatgagcaatgcacgccttgcgacagggaggttggaaagagagtcctaggtcctgtgcatgtgggattgttttcaaatgtatgttactgaccaaattatttttaaaatacttttcatcattttatcacttctacctccaagcttatggtaactaatatttcaatctccagtctctccatcttcttgtttccttgtttatccttgacccttaaggattaggcaatcatagagtcttggcctttttcatgttttacacattctttagttagtgcttgaaacaattggacttttaattggtttattatatgtttcaattttataaacaagatataattagaagcctgttcgatcaggaagatatatatatatgtatatatattcagaatgctaagtaatcctaaacctattcgctcagatgtttgtactgaatttttcatcttccctactttgaaacagctaagataattaaattccaatatattcatcaacttgatacaaaacaacatctaaataaatgaataactacaagaaggacgtatttgcaggtagtacacttaggatctaggacctaaaacagcacatacactttctatacctacacctacacctgcatctacacctacacttgtacctacacctaagcctacacctagacctacacctgcacctatacatatatatgcctgtagcattcctttgttccttcagatctggctatttgttttttgcccacaaagaaaattctacataattatcaatgtgataacttgaacacaaattaaagacaatcagtaacattccccttttagtcaagagaatcctcttacaaattaaaataattcagagttcatagcaattaaattttctagcattccttcctcttgggtttctagatgtttcttcgcatgtaacaactaaggggaggtctgcagaagtgtgttcactatagatgtcatctctaatagtttgtataccctgaggctttatcagctaaatctgattattttgtgctgaactaaagaataaaaaaaattacaattccctcagatgactcaaaaaaagcttccttttacctatattcagttctttacattttagctcaagttacacaggtattttcagtgcaacttcccttcaagatagtatccagaatttgaacacataaaaaagggccggtcacaattctaaatttggagataatatctaattacttaaataaagtttgatgaagttgtgaccaattcagtcttcaaatgtagaagactagatatttgagaaatgcaaattagttgctttgacaaaataagctcttggtgagttctgtcacctgccatggagagcagagttctgcaggcccattgtcaaaggcacttccttccgcgtcgccagaatcagaatgttcctacacgccagttttagctgagacagtaccactgagctaccttttttgatggaggaatcttgaccctgctacagatctggagaataagagattcaatggaaaaaaaaaatgagttttctgtcttagtcgaaataagtttgtatataacctcataatgttggtcattttatttttttccttaataacatattttaacagattataattttccctgaacttgtacaaaaatcatgttcaggtcattctatataaatgaaatatgggagtatcctagtgttgttaagacacatattgctcagagttgattcaatgctgggaatatctaatggacagctcccctctgcatcttcattcttttactaactagtcttaaagtcctgatggaaagtctttgattagatttgaaattatttattattgaagagattagcaaggaaaaccagaagtagagaaaatggtgtttgttatactttcgaaattatattagtaaaaagaaaatgtaacgtggagttgtcagggtgcttgtgtgtgattaaaaggatgccagttcattttgttttagcaattagaaaaattattgacaaatggtctctgaatcatggagttaacacacagcacacacatatccatcccataggggtgttcttttttctatttatgttagctaaatctgctccctgtgccagaaaagaattgccccaactgttaaacacattcattaggtttcctctgataggaaatccaagagaggttaaaacttgtagaaagggctaactgttcttcattaaagaaataagtgctttctctacatgctcaggttatgttattggctctgttttaatttatgattctgacataatttctattcaaagataaacaacctaaaattggtaaggatattttcctgtatctcaaaacttccaacattgtttgtagaaaacagacagaaaatgccctgtttggctctgtgaacatgtgctcacaacattttccccttcaaatgcacaagcacacatcacatgtgaagtagctttactgaggaccaacagtagggatatgaacattacaagtagaccacataaagtaagaaagttttccatacactgaattaaaagaaacactggtaaatgttttcaaaccttgccctttgcagtcaaaactcccttttgcattatgttattcatttaaaatggaatactttcaaacttatggtgaaagcattattctaaagtttataacccattatactttttgaaaaacatttggaaactatatatttttttccaaacataatagcaagtataaaaaataaaataaataacataattaaatggaggattaaaaattccccatttgcagtgtgtacttgtgtttctcttgaaatatgttagaccattaatgggaataagagaaaccaatttagatgtttggaaattcgacttttaattttaaattggaacagtttagcttaagaaatcactaacatttaaataacatttcaacaaatgtaactgtttggaaactacagctgaggcagcctcctgccttctgtcttgcaaggattgatttggaaggccctgagggagaaaatattggagttgggagctaaaactgaagccactgtgggaaggaagaagttactctcttcctgttatgacaggaaagcgtagacaaatgtgcttcctgagttagctcagcagggaatgtaggattctttgacctttaacttaggtatattttgaccatgttgaactagtaaacatgctttggacttccagatactaatttgttttatcttctccacatgaaattagtatatttagtagatgaaggtgcagaggagcagcctgtaaccacggtagagactgtacttacaagagaagtgagctattttcttctacttctatcatgtttaatatcccaaatagatttttaaaattggttgagtgcatattacttttagtttcagaaggtatcacgtacatttaagaggcatttaactattataagttattttgttgacttgaaaaatgtcaataatgaattgtatattttaaaataaattgtattagtgtgataaaaaagaaagaaagaagaaaagaaagagagaaagaaaggaagaaaggaagaaagggagaaagagagaaagaaagaaagaaagaaagaaaggaaagaaaggaagaaagaaagaaagaaagaaggaaagcagccaatcagacctgaagagcccatacaagtgtgtttaaaatgtcacaggatagaattctcttaaaatgtaaagcattaccaggttttgcaaaggccactcttaaaccttgacaaactaaatgatggacactggcttcccctgtccttacgtaatccaattatcagaaattcacagaaacaacttttaaagcccaaactcttcaatggacactcccttgtctgtgatacaatctcctatttattatccaccctcaaaataccatgcaaagcacacggtttaaatttttgtttagaaattgtgtatgttgacttagggtaagaggctgatagagttctattctctgaggccctcattttaacaagtgtattgtgttgagaaagttagggagcactgcttgcacatcctgtggaaatgctcctgtatttcactgaaacatggctcaatttgctggaggctaaggaggacaatggtttcctttgcagcagaacacactgctgtctcttggtcgcaagttgtgctggagggttacaagcacatggtagcagtctgcttaaaagagcccctcactgctctttaaagagcctttcatttaggatggcaagccccttcattgtataaaggagcgcttgtctagaacaccactctgtagtggcacggcctcctcccactgagagtaatcatcaggcctagcgctcatagcctttctaatgacagactgaattatacaaaagaaaactgaagaggaatactcagaacagttgtgccattgcttactgacaggaacaagggaggcatcctggagcatttagaaggccatttccctttttacaattagagattgttgttacagactcttgactctatccctaaccctttaaacacatgggaagacctagtggctcatggattattacagagcacattgtctccaggagctgctcctcctgtcactccttactccctcatctgcctcaacttagaaaactggagatcatcttggtgaccgaggggtaataacgagactgaggttttaaatactttcaaataaagaagttatgtttgtaattctaggtgtgacagaatggaagaacattgaaaacagagttagttgggtgtattagttccaacatattttaaaacaaatgacaattactttatggattaaaattatggctttaggatccagtcactcaggggtagattgcttaaccatctacagaaacctggttttatgccagttctgggaaaatagaagacaagaataaagagacagaaaaagaaagacacagagatgggtaagggagagggagagagagagagggagagggaggcagggagaaagaaaaagaataggaaagagggagggagagaaagagtggtagagagggagatagagggaggggaagggagagaaggagagaaaagggaggaagagaggggagggaggaagagagaaaaggagaggaagagagaaaatgaggagaaggcaggaggagggaaaatagaatgggagagggtggatgggttaagaatcacaccccttgaaatcaaccaagtggaaacaagaagaactattcaaagaattaaccaaacgaggagttggttctttgagaaaatcaacaagatagataaacccttagctagactcactaaagggcacagggacaaaatcctaattaacaaaatcagaaatgaaaagggagacataacaacagatcctgaagaaatccaaaacaccatcagatccttctacaaaaggctatactcaacaaaactggaaaacctggacgaaatggacaaatttctggacagataccaggtaccaaagttgaatcaggatcaagttgaccttctaaacagtcccatatcccctaaagaaatagaagcagttattaatagtctcccagccaaaaaaagcccaggaccagacgggtttagtgcagagttctatcagaccttcaaagaagatctaactccagttctgcacaaactttttcacaagatagaagtagaaggtattctacccaactcattttatgaagccactattactctgatacctaaaccacagaaagatccaacaaagatagagaacttcagaccaatttctcttatgaacatcgatgcaaaaatccttaataaaattctcgctaaccgaatccaagaacacattaaagcaatcatccatcctgaccaagtaggttttattccagggatgcagggatggtttaatatacgaaaatccatcaatgtaatccattatataaacaaactcaaagacaaaaaccacatgatcatcctcgttagatgcagaaaaagcatttgacaagatccaacacccattcatgataaaagtnnnnnnnnnnnnnnnnnnnnnnnnnnnnnnnnnnnnnnnnnnnnnnnnnnnnnnnnnnnnnnnactaccaccaccaccaccactacaaccaccaccaccaccacaacaacagatgctaaggcagtgatagctgctttgaagcaaagttgcccagactaaaatgtagataacatctgaatagagattatctgggttaatgtgggctgcagtaaaagtactatgtgcactgaaggatagtcagtgagttgagatagctgatccttctcctcacaccaggaaaagcagcattctcaaacagtttggagactctttctgacaccgagacgcgcattttattcgttctcacgtgtagggatgctgagcttttgacaagatgagcaatatggaagaaggagatcttagagtgaacactggagctagggtttggagcttttgatagtcactggagatcattcaatggttttctggaatcaaaggggggaaaaagagaaaagaatggagatctagatttaagagttacaattaagtggcagtaagaagttaactaccctgtgtaagatccattgtgtttaaagaaaataaatgctaaataaaccagtcagacttccaaagtatgagcctcaaaaaatgtatatatttcttaaaataaataaataaataataaataattaagcacatgatactgtcagccattagttggggaagccggttgtaatttaaaaggtttctgagcctttgatacaagagtctgccttactactaaatctgtgagacgctaggacaggtcttggaagtcttttcttggaatgatacagtacataatgcttgcttgcaaacaccagaccatatatgggtttgtagttaatgttgttcatgctgttgggtggattgaccaggacaagctaacatttaaagaacactgaaattgcaagtgtggaatatgttcatttactgcgactggcgagtgaagggcatgcagaactggaaacaggagcttaagggggcagttcctgttggaaaagcgtgtgcacagaataagatgaatagaagagacaatgattccaggcagggagagcatccaggccaggaagctgctgggctgcccggggtgacttgataaggatatgaatggttgggctgcctgggaagtagacaagtgggaacctgacaaatgtgggacttgtaggaaagggattatgggacttggtcatagattagactagaagaaaaatgctcaaaaatagcagttactgaccttagaaaatcagaaacagggagaatgaaaccaaaatcctaacagtaagttccccagtagttcccagtagtccccagtagttccccagtgcccagccaagtttctagagagagagagtaaactggctgagagttgtacccacaagctgcaagggttgtcaaataagtggcacaagagtaaccagttttgtgtgtgtgttgttttaacacagatctaaaatattaggtttataatgccatggctagtcttcaagtaattaaaagacaaatcaaactctagttttataattgggagaactgttaaacatgttgaagttgaagaagctgaaagtttcgaagaaacaagattgtttcttctgtcaccttcatttgaatgccctgaattaaatcttacatctccagtttccctgtctaccactatctagcaaatcacgcattttcaaattgtaggcagaaatcagttcagatcatttgctttgtctttgaatgtgttagcacccaagactctggcagctctacaccattgttttgcaaaggaaaaaatagtagtgtgaatacatacgccacatacgagtacgttttttgtctttaaaaaggtgttcttcttccaggtgacttttacgaagaggaaatttggattgatgaagaaggcttatgagctgagcgtgctgtgcgactgtgagattgcactgatcatcttcaacagcaccaacaagctgttccagtacgccagcactgacatggataaggtgttgctcaagtacaccgagtacaacgagccgcacgagagccggacaaactcagacattgtggaggtgagcaagcacactatgagctttctgctgtgggcccaatacatgcttttcctgcgctcctagtcctgtgcctgtgcttggggcgtttaccccatctatggctgcaacatgctggttactcctcccaaaagaagagtcaaaagtggcaaagtgatgacccatatgggatctagaaatcaaggtccagggtcagatcgatggctgcctcttggacgagtcagcaccatcctcccttgtgtatcaggacctgtgagttgggaattgtgaccaggtgctgtgtcatccatacttacaattcattttaagtgtataaaacagcttctccagcagaatcaaaacattttttcaggtgacctcatttgaaccttattatgtatgtcacctctttctaactcattctctctctctgtctctctgtctctctgtctctctctctctctgtctctctctctctctctctctctctctctctctctgtctctctctctctggaaaagacagctagttataaaaatactgcttttcctcaaaatgatatcattatagcattgaaaactgttaatacacgtgaagtcagatggataaagggccatagaatctcagtgaaccttctaatgtattttcaacatgtgtcctatttaaatggtgctttcttatgagcaatggctcccccactaaaaggaaaagagaaattttctctctgcctcatttttgcatttcctgtcctttcttgggacaagtagtagatttgcactgactttcccagagctggaagagaataaatggttcagaatcatgaagtccacagttggatttccagagcccagaccattctcacagatagacctctgtccaaagggtccaaccctaattccaagcaaatacacaaactcctacaaacccttctttttattacaccctctctcataattaattatttaagacaaattctgatttctttccttttatttgaagtttttgaaggcatcgcaattattggttttaaattttcattctgtcactttgcctaataagaacaaacaaacaatttcagttaaaagtcacagcatgtcatgtttgcttatgttggctagtagtctgtgccatgcacttgatgggatcctcaaacttaagactggtaatacaatttacctgccctttaggaaaggtcttttcatgaccacatattgaaaatgctaaaccaaacatgaaggaactagttagttgtgacgcttcaagggcttttgtgtgtgggtactgtatgcttcaaaccttatctcataccacagctataacaacaaatatgccagataacaaactaaattaaaatctgattgcacttgatgtccttggactatatagtccttcatatgctctgaaacaatagagctatattagaggaattagaaaattatgtttacttttaagttttgctttcaaggtttaaaatcttgaagatttatatatggagttctgcagaggagggtgctttatgtacttaaggtgacttcaaatttcaccgtctatatgatatttttannnnnnnnnnnnnnnnnnnnatccagtcctcaggggtagattgcttaaccatctacagaaacctggttttatgccagttctgggaaaatagaagacaagtaataaagagacagaaaaagaaagacacagagatgggtaagggagagggagagagagagagggagagggaggcagggagaaagaaaaagaataggaaagagggagggagagaaagagtggtagagagggagatagagggaggggaagggagagaaggagagaaaagggaggaagagaggggagggaggaagagagaaaaggagaggaagagagaaaatgaggagaaggcaggaggagggaaaatagaatgggagagggtggatgggttaagaatcacacccctctattcattgaatacaaaaccatttctttagaattaggcctcaaatactgtggtttcagactctaaacaaaattaacgaggcttctcttaaaggtagtctgaaatcttcaagggtttggtcttcgtgttcttagtggtgtagtagctactgtttggaaggctcgtcaccttaatttctttagatttttttccagtagggtacagggattcccattgttaatacagaggtaggttcttcaggggtggctaggaatgtaaagaatatggagcaagggtattgaggaaaacggattccaaaatacccttttgtgacccagtaagccaaactaatttcccttcctccaaagcaactacacagaaaatcctgtgctggggttttaaaatgtgctgttggaactgcctgtgtagcaatgtctgtgtggaaatcggagttccattctttttattctcgctgtgagcagacctgtgtctgctgccagccaaagtacttcccattttgggaaactgaaacatctataaatacagaaataatccgtgactactcatgcctgtgtgtggttctcaccagctttcgtgggaatggcttgagtgtctgtctaagggtagccggggctacagaaccacacaaaagcatccctggtttgttggtggaaatagaaaccactggctctcaaatgaatcttggtagcattattttattttctttaaccctaaaagctacctttacctaaattaatgctctcccttagggtgctgttctcgggaaaagggtcaggtggctacaaaagcaaacaaaaaaagtcaatgtacacctcagctaacactggcctgtacctgagccatggaagcgtctgctcagggcttagtaac

SEQ ID NO: 98 - DNA, 2432 bp, Mus musculus
aaaagcttcggtgttcatagaaaaggagaggaggcgagcgcagcccaaactggggggtttctcttcaaagccagctggtctggctttattctacaggaatttttttacctgtcagagtttggacaacaaagccctcagcaggtgctgacgggaacaacttcctggagaagcagaaaggcactggtgccaacaaaagcattgaaaactgtgaagtaacctctggagagatgaagtgaagcgtggaaggccaatggctgtggcagtgaagaagtgcagagggaacgaatgcagggatttgggaactgagctgtgcgcgtgctgaagaaggaaacgtgtttgaaggaaacaggaaagagaaagaaaaggaaggaaaaaatacataatttcagggacgagagagagaagaaacacggggactatggggagaaaaaagattcagattacgaggataatggatgagcgtaacagacaggtgacttttacgaagaggaaatttggattgatgaagaaggcttatgagctgagcgtgctgtgcgactgtgagattgcactgatcatcttcaacagcaccaacaagctgttccagtacgccagcactgacatggataaggtgttgctcaagtacaccgagtacaacgagccgcacgagagccggacaaactcagacattgtggaggcattgaacaagaaagaaaacaaaggctctgaaagccccgatcctgactcctcttatgcactcaccccacgcactgaagaaaaatacaaaaaaattaatgaagaatttgataatatgatcaagagtcataaaattcctgctgttccacctcccagctttgagatgccagttaccatcccagtgtccagccataacagtttggtgtacagcaatcctgtcagcacactgggaaaccccaatcttctgccactggcccacccgtctctgcagaggaatagtatgtctcctggtgtaacacatagacctccaagtgcaggtaacacaggcggtctgatgggcggagatctgacatccggtgcaggcaccagcgcagggaatggatacggcaacccccggaactcaccaggcctgctggtctcacctggtaacctgaacaagaatatacaagccaaatctcctccccctatgaatctaggaatgaataatcgtaagccagatctccgcgttcttatcccacctggcagcaagaacacgatgccatcagtgaatcaaaggataaataactcccagtcggctcagtcattggctaccccggtggtttccgtagcaactcctactttaccaggacaaggaatgggaggatatccatcagccatttcaacaacatatggtactgagtactctctgagtagcgcagatctgtcatctctgtctggcttcaacactgccagtgcgctccacctcggctctgtaactggctggcagcagcagcacctacataacatgccgccatctgccctcagtcagttgggagaccgtaccaccaccccttcgagatacccacaacacaccacgcgccacgaggcggggaggtctcctgttgacagcttgagcagctgtagcagttcctacgatgggagcgaccgagaggatcaccggaacgaattccactcccccattggactcaccagaccttcgccggacgaaagggaaagtccttcagtcaagcgcatgcgactctctgaaggatgggcaacatgatcacattattacttaatagtttttttttttcttgcagtgtgtgtgtgtgctataccttaatggggaagggggggtcgatatgcattatatgtgccgtgtgtggaaaaaaaaaaaaaaaagtcaggtactctgttttgtaaaagtacttttaaattgcctcagtgatacagtataaagataaacagaaatgctgagatacgcttagcacttgagttgtacaacagaacacttgtacaaaatagattttaaggctaacttcttttcactgttgtgaccctttgcaaaatgtatgttacaatagatagtgtcatgttgcaggttcaacgttatttacatgtaaatagacaaaaggaaacatttgccaaaagcggcagatctttactgaaagagagagcagctgttatgcaacatatagaaaaatgtatagaggtttggacagacccggcaagtggtgactaccggtaattgtaggaacacgcctgtcacctaacatccaagcacgctcacaaacctgcaggcatatcattggcgtatggcactcattcaaaaggatcagaaaccattcagagaggaccatacctaccttaaaagaaaagagaagaaaggaaaggaaaggaaagggaaaaaaaagtgtggcgtttgagagctaacatatttaattaaataaataaatctgggtctgcatctcttattaaataaaaatataaaaatatgg

SEQ ID NO: 99 - DNA, 1299 bp, Mus musculus
atggggagaaaaaagattcagattacgaggataatggatgagcgtaacagacaggtgacttttacgaagaggaaatttggattgatgaagaaggcttatgagctgagcgtgctgtgcgactgtgagattgcactgatcatcttcaacagcaccaacaagctgttccagtacgccagcactgacatggataaggtgttgctcaagtacaccgagtacaacgagccgcacgagagccggacaaactcagacattgtggaggcattgaacaagaaagaaaacaaaggctctgaaagccccgatcctgactcctcttatgcactcaccccacgcactgaagaaaaatacaaaaaaattaatgaagaatttgataatatgatcaagagtcataaaattcctgctgttccacctcccagctttgagatgccagttaccatcccagtgtccagccataacagtttggtgtacagcaatcctgtcagcacactgggaaaccccaatcttctgccactggcccacccgtctctgcagaggaatagtatgtctcctggtgtaacacatagacctccaagtgcaggtaacacaggcggtctgatgggcggagatctgacatccggtgcaggcaccagcgcagggaatggatacggcaacccccggaactcaccaggcctgctggtctcacctggtaacctgaacaagaatatacaagccaaatctcctccccctatgaatctaggaatgaataatcgtaagccagatctccgcgttcttatcccacctggcagcaagaacacgatgccatcagtgaatcaaaggataaataactcccagtcggctcagtcattggctaccccggtggtttccgtagcaactcctactttaccaggacaaggaatgggaggatatccatcagccatttcaacaacatatggtactgagtactctctgagtagcgcagatctgtcatctctgtctggcttcaacactgccagtgcgctccacctcggctctgtaactggctggcagcagcagcacctacataacatgccgccatctgccctcagtcagttgggagaccgtaccaccaccccttcgagatacccacaacacaccacgcgccacgaggcggggaggtctcctgttgacagcttgagcagctgtagcagttcctacgatgggagcgaccgagaggatcaccggaacgaattccactcccccattggactcaccagaccttcgccggacgaaagggaaagtccttcagtcaagcgcatgcgactctctgaaggatgggcaacatga

SEQ ID NO: 100 - DNA, 96596 bp, Homo sapiens
gccacagtacccagttctcccttgccataaccccaaacttataagaagcactataattatatttttctacttaaaaaaaatcgtagtagccattatcagtttaaccatacggaagctcaggctgagatttcttttttaaatgcatagttttgattttcagcagctgcactgggtctttaatcatatattatctttatgaagcctttttctaacatatgttaattggctgttttctgtgacaaattatgagctcttactttgatgaggttcaattgcaatcatgttggagtcgagtacgtagagtttccacccctgctggctcctcaaaccactacaaacatccgcacgtcactacagtgctgagtaatggcaggatttgggctggctgatttctctacagatttttttttccacaggatattttcagcttctttgtactaaatctgttgcagggtttgccctttttagcagaagcatgctctaaaattaacatcaaatcttattggagattactataatacatgagaaatatttcataattcaacatccagtgtctgtactgctttgctaaaattttagtacatttattacacatttttaaaagtcagtcagttgtaaggctggtaagtattttctatatcatcagcattttgtaacaaatattttgaattttcctcttgagagggatacagttattaagtgaatagatgatcaggtatatatttaattatcataaagaaaatgcacataatgtttttcctggcattaccaaatttatcactatgttaaaaattccattgtattttcatttttctttgcagttaacatctgttggttgagtcataagaacaattacatgtcccatcaaggctaatgtcctataagatgcatagcatgtatttcaattctctaacagtttttaatgtatgattaggatgaacagatatgttctaatccatctgctctgagaactgtgacagcctgcatcaagtaccagcagatgatcagtgatagccataattagaatatatataaaaatacagtgtatttgtttatattcacaagaaagtagggtaattgattaaagccttcagaacctgtgtcagacaccagtcatagtgggattaatttaactgtttctgctttgacatcaaaatattctaggtaaactgctgcagttgttcaaaatctaaatctatggatcaaatcttcatacaggtattagactttagaatcagatgagccagatgtgaataggagctactcctcctcatgaggctgtttttaatcagtcatttccctggagtagcacacaatcaatgagctctaaatcctgaggctacctgcgcttgtaggaaggcctgggaacatcattacagaacttacaattgggcatatgtgaaaaaattagagcagaaattaagggtaagaaaggttaacttcagaagtcttactttggtactgcttttttagagggaggtaaagagataatttcaaatgttaaaaaaaaaatagaatattaagcccaacttctaaatgcagagaatttctattaaaagatcattataagcaagccaaataaaagttattattgatttatgttagccagaactgtttaaacacgtgtattatttcgagaatgtacatgtgggtccatttcaggatgagtaaataaatgtaaagattctttttcgctagtacctctgcagctgtatagaatggcttcagaagtcctatgtgatactttggtgtgcagtcaattgacacactgtgtctggagctaatgtacataaggaaatttagttccacttgataagacacatgcttaactggctttaagaaaataaaccaagaacaatgtgtgaatgaaacagagaacttggcacttgactgtatggaagcccatgagccatgtggtttaattggggccagttgggatcatttaatgattgctgtcagaagatcagatttaattctccttataagaagaccacagtgggatagagttaaacaaattgtcatcagaggtttcagatgaacaaagccttaattaggttgattaggatgctgtaaaagagatgaagagaaatagaaaaattgatgaatcactgagttccatgttgagccacatataatagcaatatcatatatattttgagagatagtattatagcattttgaacatcacatatttgagcatgtaaagtttctgtgtaaaccttctaaatgtgaaggtttagagataaaaataaatgacattccacttaaataacagatgatttatctagcattttctctttaatgtacaacaaaaacattggcagggggacaatggtatttcttcccatttcaaggtcatctttaaatgttaagtaaattggaaaataaataatgaaagaagcaaattattttcaaggacataattttcaatcatttaacataatatttgaatgcagagtaaaataaagcttttactgagaacgtccttttaggcattcacaccacgatcttaataatattgtgattatttactggtgataatactcaagacaactcaggtgtcttaaaatgtactcttattgttttatttacacatttcgacagactaaaatgtgtttttccatgtgctgtgcacacatgtgcacacatgcacaaatgtatcagtaagactgaaatatgtgttcaacacttataggcatatgagaaaaatatttttagagtatttccattttaatcgtgaaatatgatatattaaagatgaagaatataacgaacataatttttttctaacagggtcatgagatgcctgggaatttagatgtttttatcataatagcatgaaaatctataatagcaacatctccaacttctagcctagcttgctttacagactattttgtttgactgaggttgatgttgtatagtgcttaacttgctttgttcaataacagcaacaaaaatccagctgcatgtgcttactgagaggttagagctggggaacagaacacaatctgatgttaaattgtagctcttgctttgtcataagacagtgcaggctttacctttgtggtgagccctaccacatcactcagaggcctttgaaagaaaacatggtggctgcactgttgtgaaaaattagaaaaacaaagacatgatagaaccctgaattaattacctaatatgatgtggaaagactaaaagctgtggtagggttggatagcacaaggttcttcacatatttagaccatttggagtttattttggcatgggaatagagaatgctattttagctgcagtgtgaaaaaagtgtccaagacaaaatagaccatggataactatgacagggagactgtgcttccctcacagttattaaattgtttataatgcaatacaattgtataaaggtatgtgtctcctaaattctggaactgtgtaaataaaatgatgtatgtcagggataatggcaggttaggcccacttattaaattaattgcaggggttaagaaaacgagttcctttttagccttattatatttctgacatacatttcatctctttttgtccttggggaaagatattaaagtaggactagaagcattaatgtagagttttcagcagccgtggtcatggggaaaattgatgtatttccctagttatttccacttttgcagcctgaagctcttccgtagctgatatgtaagagaaacttcttaatttttttaacactgtaaatttattcttcatttggtgattattgttacaggataaatgaggcattatctgtcagaattgctaatcattagctttggaaagtgagatcttcctggtaaatgtaaggactacactattcacttgatagcattactatatgataggactttcactttatgccttcaaacggaagcaatcatacgagcagcaggccatgttcccagtactactgtgtacccaggattcacatatagtaccacatgttatgatcataaccatcctacaaatgaagatttttttcccagttatgggtagggcaaggaaacaacagttccaagggattaaataatcagtctggagtcacacagcgtccaagtaccaagctagaattctaaccctgttttttctgaccccaaaatccatttaacttccaattctcagtatcaattattctaattccacataggagatgctatgtaaatatggcgaagtattaagtgaggttatcaatctgcttctgtgtaagcaaaaatagtaaaatatttttagtagtagtcagtaaaagtagaagctgaagaaaagaaaatacgtcagttgagagatacacatcttaactgattgtcagtcaacgaatagtcattagctctttctatatgtttgacactagggtatatattgtggataaaacggtgaaacaaacaaataaaacagatgttgaggaagacaagcaaacatacagtttcaattgctgcgagtgctgcaaaggagaaggactcagtgcttagatcttatgagagggaaattcgatgtcatcaggagggcgtggagtacttcctgaggaggtgaaactgaagctgagacagaagggaggagaagtcaaggaggtacaaaaggaaaggaggaacatccaggcagaaagaattgcctagtacacaaaggcctagtggcaggaaggagcatggcagatgtgaggaaatggaaaagatggtcaacattatttgtatatgtggtactatgttactgagacttgaagatggtttgaaattcatattgatactaaattggaataaattaggaaaataaattggcatatggcatgatggtatttatctagtggaaaagaatagctgttcttttattacccttagaagagtgagtcttgggtatgtgatttggaaataaactcagaatgcactcatagctaaggtaatggtatatttataaaatacatggtaagcttagagagaaatggagcaactttcaaggccaaagaaatcctcctcaactcaagacatcacgcagtcgagcatcaataggagtagtaatttggttataccttttgaagttcagaatagctcctaatggaaaaaaagtaaaagttctgcctgttccttttaaccaaaatataattgcatgcttcatacattttatcaaacaaatcacaaaatagaaacctaaatgtaactagatgtaacatattgagcaaagttttccacttaaaaagataatgaatcatttaattatttgatttagcaatactaggtttgcagcaactgggcttatgatcatttttgccccttacgatgtatccagcttgtatttatttaacagtattatttagtgttgtgtgatagagtgtgctcagttttcagctttgagtttttacaaaacattatttgaggatactagtgttagtgaaaatgtaagtcaatcaaaaagatctgctaatatgaatcaaagaaaaccggaatttttttttgaaaattgacatcacatatttcaatgttttaccattattcataggctgtttttatttaagtgactgcattgtacttattgcagcaaaatacatgctttgcaaagataagtttagcagaagagaattaatttcttcccacatcttttaatgtggcatggcagtttcactctaagatcaaaacacataactgaaggttatgtttaacttctaaatcaaagtgttgtgggaagatgattgaaatctgatgatgactcagatacgcttgatatgtggttttcttcctacagaaaccttatgtagaatgccatttccatgttagaaagaacctaatagtgaggagattaaatagtttcactatagatgcagagtttgtgttattcactttggttcctagtttgaatttttttaaagaacctcgagaaactcaataaccataagaatcttttccccctcagtatatctttttttttttttttaatgtgggagcaaacaaatgattagcatattttaccagcatgcattgattttttttttgccggttttcataattcttttttttaaccaaaagttttaatgtatctattttggttctttgcttgcatatttttcatttgcctcaaagggtaaattccaattatatgactgcattaactgtgtacgatgacttttgtaaggcctggtaaacaataactgagatatatctgctatttcaatgaagtcaatgtgtttgttttcttattttcatttcttaaagcaatcataataaaacactaacctagagctgacatgaatttttctcaggtgttttaaagatggaaattaaaaatcacgctcccggtctgaattgtcctcattgtcccttatctgaacctctccaaggcctctgtgtgtggggtgtgcagcacagcacactcagacggttctgctcagagaaggaagtggagagttttggttcccattttacacttctggaacagtttagggaaggaagcacctttacaccttttattgttcgtggttgctgacatcatatccttccctgaccagtctgtgtgcgtgtttcctgccattctgtcaaaattcttctgtgctactgggagagatttgtaggagggaaggagggaggaagagggcaagaaagagtgagggagggaggagggaaatggaggggggaggtatgtgtcactcaagggaacttgtttgtaaatgagatagcccagtgggagaatgatctttagcatctgtccagaagaaattcttctcgacttgggtctcaaaccactttgccttcatctgcctgcttatgccaaactcaaaatgagcagaagcctgccataatgaagttcccctttttagtaagcagcctcattttagttttcttttatctgggttggcattttttctttagaaaaaaaaaatgcagaagactgtaattctatagagtgtaactatagtagagcagttcttcatctttttttttttaaattagtgattatttatatgtagctctgtcattttctaagaatgcttctttcctgtggaaaaaaagtagtggcaaggctgttggaattattttaagcttatggttgattgtacgtaatgaaagttctcagcataacttgaaattttactacatgtaggctagctgttatattcctttttcatatacacacaaaacagttttacagattactaaagttaaataatctctttcttcgcctctctaggcctcctacaaattgatacttgaaactgaccttttaatatagtttttgcataaaaattaggttagagaaaatgttgtgctaagaaaacaatgcgtgagctattgttgaccttcctaattctttaaatttttagtgacagccttgaaatgtggtgacccataatcaaatgttctaaaccacgtttcatgatagactttacttcatgaccagttacttagtgtcatcatcaccacatattactctgcacgtgtacttcatactaaattttggattttagaaatgttctgaaggcaatacctcaagaaatatttatacagaaaacaaaagtttagttctattgaaatttaaacttgcttctctctacattgctttgcatatttcaaaaaagaaaatatattcaatggcatttttatcaaccacttatatatacatagatacatacacacattctctttggcaaaatttttttccagcatgttttaagaaatttttttttaagtccttgctctgctctttttaaaaatggtctcattcaaagttgtgaaatatggggtgatgatatggaggaactctcctaagtttggttcatcaggaactctctctgtctttctgagacttttctccaaggatgttttgctgcttgtttggttatttgtattttgaaatcaggatctgtagatgttcttgtctcttctgccttatcaccacactctaatctgctcaccctgaccttccaccttgaagtgaataagcgcttaggcaggcatagtcctgtaagccgatagtgccaccggcctcagctaaatgaaaggaaaggaaattgtcctatatgcatttgctgtggattcatggattggctttctgtgatagagaaagcttgtttgtatctttggggtcttaaacgtgcatgggaaataccattctaacacactgcttgcttctaaggtaagactataggaaacacaggaaagttgccccattgagtgacatttaagacgttttctaaaaatagatggacagtgtctagcaacatcaaatatatgatgcaattatgctttgtgggtttttcatattttaatgtgatttcaatatgttataactatttttatatgtatttgtcaaatgtgtgttatttctataactctttagaattttgaaccacctccaacatttaaaattacagctggagcaatagtttttgatgagcactgtgtggtcataatgttactcaacatacatattatgagaggcagaactgagctgcagtttagtagagaggcgtgaggcaaaagtgaatggatagtcttagtatttaagcagcacttaatccaccagaagtaattatatcataatagcttctgcaattaaataatcaccaaaaactaaaaaaaaaaaaaatacccaaggtgataaagaatttggaaattaaattaaagaaatcagaagacagctaatggtcagaccgaatgtgtaacagccttcctgttccaagaactttgaattggagccaaacaatctattaaatagccaggacattggcttagcattacataatacatgtgggaatttatcaggtccgttgtcagacaccagctaaaataaacagggaaattctgagcagtgtgtaaagttgttgcattcattgacctaaaacgaagtagaataattggagctgttgcttgaaaaacccattgtggaatgctttcttgttaactttcacatttcagagcaattaacttccgttgtgttcaaatattttcagatgtaatttaaaaccaagtaaagtatgtacttttaatattctgggtttcttgggcttatctcatgttattgatgatcatttctctaattttaattcctgacccagagatctccagtatgtaatgtgaagcttctgcaattttgtatcttactccacaaagacatgatatgtctgtttctaaatatttaaatttaaaggaaggatggcttgttataaaaaatatggttataaattgaagaataatcttaattttgcaccatttattttgtgtcaatgcttatcttttttgattcttgttatctgagatgtagtttaagggctttcaaaaagaaaagatctcactgctgatagatgcttgtaatctaagattaaatattccatattatttttaaggtgttctcacagcaataatttttttaaagtaagattaaaggatttagatttaaattagttgacatttacatatatcaaatagcactttcataatcgtccatcctatttgcataacgagggacgttatcacctctgctgtcaaaacaggagattgttttcccttcagaaatgaattagctgccctacttagcatacacaggtacataaaggttcattaactctctgatttaggtaatttttcataacgggtgaaattgtcacctaatttcattaaaaagattaggaaactttttacaaaaaaaaatacatttcaagtgttagtctttaaaaaagcatagtttgcatcatttaaatgacttgttaaattacttatgagatcattttaattgttaaaaaataaaactacttgatctgctcctgtctgtgatataccatatatttttaacaaaaaagttatttttattcattttattgctttagctccatatagtttatttccttgataaaattagaatatgatagttcttatgaaactgacttgctgttagagtggtatttaatttttcttttttgttcagcaggaacgaatgcaggaatttgggaactgagctgtgcaagtgctgaagaaggagatttgtttggaggaaacaggaaagagaaagaaaaggaaggaaaaaatacataatttcagggacgagagagagaagaaaaacggggactatggggagaaaaaagattcagattacgaggattatggatgaacgtaacagacaggtgagtggagtaaactttttttgtatcattatttattaattatattttctccacatatgttaagggtacagaaaatatcttgaatctgtaaatatctattaagagaagtttgggttaattaaatgtgaccagttaaagtgctgatagtctcttatatataaaggagaaaaaaatcactttatctgtcagaaacatagtttacacatttgtcattattcactttttacttcaacacaaatttgaaatgggaagtgtagttgtgtgacatgaatagcttgataattaagagttaatcagcataacattgctacattgcacgcatcatcaaacaaagatattcttatattcatgggaactagaccttttgtggtcattcacttaaaggtttataatataggataaatatcctgtatgaaaatggctttcattttattcatagtaaatgagattttgaaacacatccaaacattttaacattgtgctgacaacaacaacaaagaaaacacccacacaagatattaataacttaaaacatataggcaaggactatcggttaattcataccattttaaatctgaatttgataaacatagaggcagatggtgttataatttttttctagaatgccaatgataatgtctgtgtgatacaattaatctgttgtgaagactttacacattcaaatgctcagtttggcattaaagacttgtatatcatgaatgcctgcaatttgactctatttttcttcacactaggggagagtggatttagttaggctatgtaaggacagctgggtagtttgtataacgttaaatatcaaataatggtcctgggagaaattatagtactgctgggtcccaaccatctcatatggatcatggaacctgcagagaagacgtttctggactgtggaagagaagagtgttttgcctacttttcggttacactgaagaaggctacacagtagccctggggacaaccaccagactgtaatttccccacaaatgtagacactcatgtcctctattgtcctgttttgtcttcttggacatacaaataggactagaactgattgattcatttttttaaatgtaatgttgtttcatgtgtaaactataatgaataggaattaattatttcttgcatcaaagtcagtacgccattaaaaagtagagaaacttttaggttttcaagtttatactcctctaaattattatatattttcaggtacacacaacttgaactatttttggctgcatgtttagctagagggtgaataatactaagatttatggtggattcctttagtgttttcatgcacatcgtttcttgctgtggatcaagccaaagagcaatcattgtgtcaatagaaaaccgctattttttaattggcctatagcttgaaattgaaattaagactgaaatattgaatgtcatgtaacactgtttggaccttgttatttggaccagaacctattttgagtatagtcaaaaacatatgaattagcatttgcactttattaccaataccagataatttttaggtttatgatattcattatatcttcttttgcttgcaaagttagaagaaaatttttgcaggttgaattcatgagcttttattatgctttattagaaaaaacagggatacaagattttttaatttctatttttaattatgggtacataatagttgtatataatatggaatacatgtgatgttttgatacaggtatacaatgtgcagtgatcaaaatcagggtaattgaggtatacctacctcaagcatttatcatttctttgtattaggaacattccaattctactcttttaattactttcaaatatatgataaattcttgttaactgtagtcaccctatgtactaccaaattctagatcttattcattttacctatttttgtatccattaaacatccccactttatcccctccccactccatgcccagctacccttcccagcctatagtaaccatcagtctactctctatctcagtgagttcaatttttaaaaaaaaaaagtttagctcccacacgagtgagaacatgcaaaatgtgtccttctgtgcctggcttatttcacttaacataatgtcctccagttagtttcactcatgttgtaacaaatgacaggatttctagggatacaataattttaaagccgggagtggtagttcatgcttgtaatcccaacactttgagatgcagatcactggagcccaggagttcaagaccagcctgggcaacataaggagatgcaatctcttattttaaaaagttaaaaaaaaattaactgggtgtggtagtggcatgcacctgtgttcccaaccacttggggaccactaggacccgagatgtcaaaactgcagtgagccgtgatcatgttactactacacttcaacctgggcaacagagtgagaccctgtctcaaaaaaacaaaaaacaaacaaacaaagaatcttaatgtcgcacttttgagctaataattgaatatcttttctttttttatatatagttgcagctacagtggctgttaccctcatccaggttagaagtcataataactttagaagaagaaaacttatttaaattcagcttagtttgacttatcatttttttaaattctgaagacagatttcttgattttattctttagaatttagggtatatttattcttttctccagtctttagatacagtaggcctgtaagttcaatacttttaaacagaattagtaaacttgaaatccaccatgttttaatatatatttcagtgattattttagaggctgttgacaatttcaaacatcttacatataaatgcttgtcttgtgcacctctcacctactatgagagcagttgtaagagtcatttgggaaagagcctaaattatgtaggtcacttctaataaacaaaaccagcaaatccgaaacagcatatcatactgtgtagaggcacccgtaacctgggctttctttcaactgtgtattcacatgttgcaaagaaaaatgctttgccctctttgaagctgccccactgtagactgtccagtagaacctcatgcaatggctcactgtcatcttttcttaaaagttgtcaaagactgctctgccattgcacttgtttatttagctatacacagaataagttatgttttttccagaaaaagaaatactgacttcaagtgtgaaatgaaatattacagcactgatgttataagttgtatatcattaagaaataaaactgttgtgaaatagaatggctgtttaaattgaattttacctttactttagctgtctttcataatggaagtagggaacagctcaaattcagaaacatcaatacatgaaatagtttaggtgagaataaaaattgacagctcaaattcagaaacatcaatacgtaaaatagtttaggtgagaataaaaattgacagcttttttatttaaaaaaattttttggcatttccaagtttacaaaaactatttctttcttagtttcaagcttagacaacatggatttcttaagcaagtatgtaaaaataacattatgaattgttaatttatcttacagaaattttcagacaacctaataaaagtagttaccaattatgtgccaagaactatatatatatatataattacaaataatttttattaataagtcccattttatggctgaataattcatttatctgtgaaatcaacaaatattactagactgcagtgtacctaacaccaagtattcagtggtgaacaagaatctcatccagcttatcctctgctttaggggttcagcgagctttcctgtaaaggaccacatagcaaatatttttagccttgtgagccatatagtttttgtctcaactactcagctctgccctagtagtctgaaagccgtatgcagtatgtaaatgaacctgtgtggctgtgctccaataaagctttactgacaaaaacagggcgtttggatttcacttgtaggctacagtttatggacccctgattgagttaaacagacatgaaatataaaaatatataacaaaaatttcacttatatgtgctatgaaagaataataggaggtactttatttacatcagggttggagaaaggcctgaggaagtgctaaaagatgagctaaaagatgattcagagttaggcaggtgacagcattccagaagcagtatttgcaaagttccttaagagaggaaagagcttgactgaggagctgaaggaagatcagtgggacttaagcctggtgtatgactgtagagaaatgagagaaaagattggatgttagacaggacccagatatcgcaaagctttgaaggtcctgttaagttctaaataactggctcaagattgtacagttaaaactgggaagtgaccaagatctgagcccggatctctcatattcaacacgaaacaaattatgctttttaaaattatgtcatgatgcatctagtgtaatataataactaagagcatggttttgtgtcattacttttcccaattatactgcatccagtataatcaaatggctaagaggcatagtttttagagacacacaaacttcgttcttgtcccagttctgccacttactagctatgtgaccctctagcaagttacttagaccctctgagcttcagcagtaccctcatcactagagtgaggatgaaaaaaagttagtacctttctcattaggtctttaagacaattaaatgaagcaataaatgtaaagcacccaccaaataataagtgctcaataaatttacctattagctattcctattaagactcaggctctttgaaccattagctattatagttaatgtgatttctatcaaaacaactcttgtactgtgtagcacaataaagaatgttacctaaaccttcatttcatgagggttttattttaaaagggtattgaggagatggatggaaaagtggaacaggtagagcaggagcacaaaggagccttcagaagccaacaaggggctagagaatgataccagagcaggagtgagctgatgcagagaggatagtttgtggacaggaaggaaagatcacacaggacgtttgcagaggatttatgacaaggatggggagaagtcgtttcctaaatgttatgcttgtgggacctgttttcaaatatatgttactgaccaaattatttttaactactcctcaccatttttatcactaccagcttctagcttatgctaacactacagtttcagtctctccgtcggcattttttttttacccttgaaatacctccatcagttaggcagtcttaccctctttcacatggtaccaatttttaatcatgctcctgaaacagatttttttctgtgacacttttattgtattttacagtaacatatatatgcaaaggtttaaaaagttcaacaacaaactggtttttatgaacagatggttttgggggtgcttgtttcatttcttttgtgtttaaaattttttaaattaacaaataattgtacgtattcatagggtgcacagtgatgttttaatatgtataatgtatagtgatcaaatcagggtagttagcatatccatcatctcaaacatttatcatttctttgtcttggaaacctccaatatcctccttctagctatttcaaactgtaagatatattaactgtagtcatcctttggtgggatagaacacttgaatgcatttgtcttatttagctgtaattttgggtcctttaacagtttttaaatgaatattgtccttatatgactctttctacaaacaatatatttagaaatctgttatattaggaagaaagatatataaaaattaggcatgcttagcctaaacctatttacttgtatgtttgtatttgaaaatttcagctttcctactttgaaaggataggagaggtaagcccaaatttatttgtgcaacttgttataaaaagacatttaaatatttgtcagataacacagttagggcttaaaatagtaagttaagaaagaaatatatttaaatgccttaagttttcttttctttcatcagatctggcacactaatagtttttgccagcaaacaaaacttcatgtaattatcagtgcaataactggagcacaaactaaagacaatttgcaacattctgttaatagaacaggagaatccccttatgactaaaagaattcagagttcatagctgttacattttctaactttccctcttcttatgtccccatctcagtctcttcatatgaattataaattatataagatgaactaggaaaaaagctggaaaaatgtgttcagtgtagatgcagcttctgacagtttctacatactgatgtgttttcaaactaaatctggtctattcgacactaaactgaaaaataaaaagagatgtatagattccctcaagtgactctttaaaaagaaaaaattttactccttactttttcctggttttcatcaagttaattacagttctaaatttgggagttacatcttaataacctaatagaaaatttgttgaaagagagatacattcactctttaaatgtgagtaactggataattgagaaatacaaattaattgcttcaaaaaaataatttttcggtgaattccaaaccataagttggagaatagatggaagatgcagtctccactgctaaatgcactttttttggccacctccacaaacagaatttccagacttgtgagtttttctttaaatactgtagaagaattatacttgttaatcaagaagtatctggaatctctttcagacctagtgaaaaaaagctcaatcagtgaaaaattattgattttcctatcttttaatccaaaataagcctgcaaatacctcataataatgatgatgatgattgttttttcttagtatcatttcttaacagatgcctgcctccccaacacttgtattaaaaattatactaaacttatttcatataaataaaataagggtgtgtcatagtaatattttaggacatcatacccatcagaattgaattatagggtctattgccacatattggggatgccttcttaaaagctcctcatgcatataagttaaatcattcttttattaatcttaaaattaccaagggaaaagtttttattcaaagatttggaattgctggtgattgaagagttgaaaaagaaaaccagaagggaaaatgacctaaataatacttgtaagagtttccaaattaaaaaaaaaaaaaaaaaaaaaaaaagcagtaggcagaatgctcagatgtatgtttaacagctgtggcctcaggccattcatttccattttatcccttagcaatttgaaaagaattcacaaataatctccccaccatgtagtaggatcacagcaacagtgtgccacacatattactatttatcctgttcggtgcatgatattttatatttatgtcagctagatctactcctttactgccagaaagatattgctccaactcccgtcaatctcattcattcactttcctttggtaggaaatctgagagaggccaacattttcataaggaaaagaataattgtcacttctagaattctgtcactcttctttgaacttgagggcctcaagggtttttattgtttccagttctaatttgtatatctcatataatttctacttaaaactgtaatttaaaaagaatctgatgcttttatttattgtatctcattttgtgaagaaagttgatactgaatggcccctttcacctctgggaatgcatgcacacaccactctgtctgctacaagtcacctttagctttgcaaatgcacaaactgtgtgacattgtattactgagaaaccaacactaaaaatattaacattataaatagactacatacaccgagaagtttcttccaaactgtagattaaaagacatgatgctaattgtttcaaaagccatgtcctctgcagtctgcacttctttaacatttagttcaaaatgaaactacttcaaaaattattagggtatttttaaagtttgcatcccaatgtattcttgttgaaggtagtttggaaacttattttttctgaggataatggctttggcaaaaattttaaaaaattaagtaaatgacatcattaaggaaaaaaattaaaaattgataatatgtaatgtgtatttgtgtttcttttgaaatatgttggaccattaataagaattagagaaccagtctaaatgtttggaaatttgacttttaattttaaattggaacagtttaactaaagaaatcactaacatttaaataacatttcaacaaatgtaactgtttggaaactataacggagacagccttctgtcttgcaaggattgatttggaaggccctgggggagaaaatattggagttaggaggtaaaacctaggctattgtggaaaggaagaagttacactcttcctgttatgacaggaaaatgtagacaaatgtgcttcctgagcatttgctcagcagggaatgaagtatcctttgacctttcccttaggtacatttggctttgttgaactagtaaacatgtttttgcccccaaaatattaatctggtttatttgattcttctcagattcaaattatatctcttatgtagatgagatacagagaaacaaaggtatttattttatgactgcatctacagattggatttagaatgaaaattagccctttaacaaaccaggcagacttgagcagcccatataaaaaatgtgaagcctgctgtgttagtcttctcttttcaaaaggcaaaacattcctaggccttaaaatgggccacagtaaaatctcttatatcctgatcaagttaacaattttcggtcatccttcttccttttcctcatgcagacaaatgcatcagaattcagctgtcacaaattttaaaactcaaacttttatgagtttgttaataaacactcgtttcattaatgtgcattcgattatttaatttagatctaactgtgatttattattttccctccaatgcataagatttggagttttattttgggatttgggatgttgacttagggtgaggggttggtagagttctaaattccacactctaagccccttattttaatccttttatcatgttcagaattttaggaactactgcttgaaaatcctttggaaatactactgtatttcagcgaaacggaggctcaatttgcttgaggctaacgaggacaatagtcccctttgcggcagaacacactgctgtctcatcctcgcaagttatgctggagggttacaagcacgtggtagcagtctgcttaaaagagtccctcgctgctctttaaagagcctttcatttacgatggcaggccccgtcattgtataaaggaacgcttgtctagaacacaagtctgcagaggcactgcttcctcccaccgagagtaatcatcgggcctaaagctcgcgagcctttctaatgacagactgaattaaacaaaataaaactgaagaagaatactttagaacatttgtgccattacttactgtcaggaacaagggaggtggagaaagagcatttaggagggcatttccctttttcccaattaaagattgtcgttgcagactcttgactccagccctaaccctttaaacacataggaagacctgtggctcctggattacagagtgtattgtatctgtgaactgtccatctgtcactcattagtcattctgtttcctcaactgggaggaaactgagagattatctaggtggggggatgaggtggagtagccgacctgaaatattttcacataatgagggttatatttatcatgactcttatttggagggaaaaaaaatgatcaaacctcaaacctttgaaaatagaattagctgggtatacgaatcccaaacacatcctaaaacaaagaaactactatttatgagttaaagaatggtgaaaataaaaaaataaaaaattatccattcattgagcactgtaaggttcaattaagattaggctaaaaatattgtgtttggtggaaagaagtatttgggacccatagatcagatttttgttgcttcccttagtgatatgtctgaggcaatttgcagttgggcctcaattattattatagatgtgagtagctgctgtttctaaaggtccttttctttcagaactctttcctgcaaggtgcaagaacagttaccacagttaaaatggcaggaaagttcttctgaggtgactttatgaatggggctgggcctgggagggtgagggagggggcaggcgtgtggagtggagaaagattatgaaatgccctttccatttcacagtagtcaaactaatttccctaccctgtaggaaatgatacaggactccttctctgtttttagaacttgttatttacattgcctgtgtaaatcagagggccacctttttttattctagctgtaagcagacctgtatttactaccaaccaaaattcttcccattttctgaaattaaaataaacatccataaatatagaactagtttgtgcccactagtgcatgcatgtggttctcagtggctgtagtgggaatggccggagcgtctgagggcagagttggctgcagagtctatacaaaagtagctttgatttactgtcagaacctagaaaccaactggctctcaatttagtgttcttagtattattttttgactttaacctagaaagcagtccttacgttaattaaaatgttatgcattactgtgcttgcacttatcagaatttctgatggttcttaatgtaacattacaaatgacagtgcctgcatactgctcaataaacagttgactgggtccatattgagctgaacttcagcccctaaaatccatagttatctaaaagagggaaggaacactaactaacagaaagaaagatgcactttgtgtgaagagggttggttttctagtccatccaggaacaagtctggggaccttggataaggctattcatgtctttgtttacggtattcatctgaaaaatagggatgataaactgtgctaaagaataagttcaaagagatactgtcgaatgtagggagataattaattataaaatcgttgaacttcttagaaaaaattatcaaataagcaacactgttatctaaaaaataatataagaaatctgatatgcttcacttgcaccaaccaacccacacacaaaatttgaccaagtccagttttttctcctgattaattttaccaaatgtaagtttctactgtaagttaaaatgacaaaaaaataaaataaaacaagtatgtgaaatttccctctctcagtagcaaacttcttgttaacatagtctgagcatccatagaaatttattttcagctattcattttggattacaaaaaacactataattcctctgtccatatatctattcattctatcaacatttatttatttagccaagtattattattggttgtcaggttacaagaatgagcaaaagatggcccaggtactcgagaaaaactaggatatagctgagagagacactctaatctagacctaagtaaataatggtaacacaagctgacaggtcctaggagaccagtcttttacagtatgtttcaaggagcgactaagcctggtgcatcagagaagatactacttgctttgtaaagtgtttcacagttaacaagttatttacactggtattatatcccttacttgacctctcacaaaactctatatgatgcctgttattatctccactttccaggtgaggaaactggggttccggtaagttaagcaattttacgcaagggcacacagctcataaaaggcagagctgggacttggttttcaatttttatgtttttctttctacattgtactgccccagtcatgatgcatgtatcctgtttctttaaaatgtctttaataatgtgaatttgctgttttatcaatctggataattatttttctgtgcattttcagtacatcatttaatgttgtctactcaaattctttacagtcttttgtgtctcgtctagctacaaaaaaagttattttatttcttgaaatatggaaattagaggcgataatgtatgggtgggattgagtaactaaaacataggagattctgtagggtgcatgcttggtgaaccatattgccatttgctcttaactcaaagccctatgatacttaggcatagattaagaacatctaaaaattagaataaatattttaaaggtctctagtccaacttcctgcttaattcaggagccccttctacaccttccttgatatgcagctctatgtgaacatattcagaaatgagctgcttcctgcttggtgggaagttctcatcactagattttcccttgttttgaatctctttctaattttcaacaatgcttactaattttgcctcttcgcatggacatatgcttcagaccttagaaaatgtttagcatttcacttttaattctatttttttctgagttatacattccagattctttcaatggttcctcatgccagattgttctcagaccctacatcagtctgtttaccatcctgtagatgctctaattttgtcagtgctttcttaaaatgtcaccctcagaactgaatatgctaccaaagatggttctgacaaacaaaaagatcagtaggataattaattaccactatagaacgctaaaactttagatcctttcccaaaattccttaattatccccaacctgaacttttgtaattgttttttaaaaatatgaatgtggactttaaaattaccttcatttgattcatcttgattgtgacccagctttctaaaggctgtagaaggcgctatggatatagactcttatcacctactgggtttgctcaagcacccagatttacgttgcatgcagatctgataagcctgccttcctatatacccatctaaaccaatgacaaaaatgtctcctgggatgggaaaagtactgaattctatggcactttactagagactttttgataaacttaacattgatcaattaagtcggcctcattaattatagttcatcagccatatttaaatcagctaaattactaccatccagtctcaaattgtgcatgaggatttcatcacttttccaaatgcttattctttgaaaatctgaactcatcagaaagttcagtacatttttgcgaacaaactcagtcatcctgaacccatggatcctccccattctttctgtatcctgtgattgtaaaattaaatttttatcttcagacttttttgtctttcatcttttttatccaggcaagggataaaaaagaaaaaaacttttctctgaattttttgaagtatatttttcttgaagtctacagcatatttacatatatatttttctccagacatcatttaccttctttattataaattccaagatagtgtaattactttatcttaagatttgtgtcactaataagctaaacattgtagtaaaataaaggtatatgtgtccaaaatctctatttttgagagattaaattatttaaaaggcaagtaaaaaagcatctactctaacataaaattataccgaaacattcagacttcaaaatggagtatttccattccataatccattcgttcagcaaaggttcattgagtggccactggtcagagtctgtgagaggcctgagggatggtctttggggaattcaaatctggcagaagggaaaactcatatacaaccaactttgtaatactggagtaagtctcataataaagatttgtaaaaagtgctggaggactacaatgagaaaggaatgagttttatctgaatgtgacaaggaaagcatcaaagaaagaagttggcatttaaactaacccttacagcgtgatgggtgcatccagtggccaggtggaaaaggagagatggaagtaataccacaatcagctttcaccaagtcaagattagaaataaccagtaaggtagatttcatttcgtactcatcttgactgaatttacatctactattatttttctagctcagtccagagaaaaagttagtctgaaaaaaaaactgaattcacccaactctaaataaaaatacgaattcagattattagatatgactgaaaatataactctgttggccaagtcatgcattttgttccaaataaagaaaattccttttaaacgttatggaattaaatgacttttttttgtccagccacaaggaactgatatgaacaagggagatattattttatgtaatggaagccacagtacctagcacaaatgcctgacatagagaatattcaataaatattgcttagcataatgtttgacatgcggaaaatgctccataaaacttggccaaattatttttatattttttgtgaatagactttcttaaatttttagtaactgatttgtatggtgctatatttaatgaatgtttcttttctcaatttcaacttctaatttctgtttttccttcgcacctaataggttctagagccattatcaacataagatgtatggtatctgtccttactctaggatttaaaagtcagggccactataaaacttaacataccatcatcacatttggggctatttaaagattcaaaaatataaaggaaaaacataaaataaaaaacatacagagtagttctgctttctatgctatatcacacattaagtctctttaatttgataacatgttgacttatgtaaatactggaaaagagagactctttgcctaactactgtaaaaacctctttctgcctcacctaaggttccaaacatgttatttaaaaagaaatatggacttgtccccattacaaactattatcaagttaagaaaaatgtaaccatcacaaggcattatttaagtataaaagcgcagaattgaaatctttgttattgagtggcatattttaaatgaagagttatattccagatctctttagaaagcctaatgcttaaaaataattttatctaactatgaacaatgagaaaaagcattataaaatacattttgagaatgctatgaagaatatgaacataatgcagaattaaatttagagcaattaagagtagattttgaagatattttcttacgtgctttaatacagtcatcatttcagtttgcagttttaaattgcagaagaagctatatgcactgacttctttgatgggtattattaaataagtattcattatccagcagcctatttggttacacaaaaattgaggagcactaaaagtaaacacaaatagtgacattaatgatatttctgtactgaaatgtactttgattatgagtgttgtaacgtgcaaaattctgaggtctgagtacaacagaaaccatactgtattgagacattccacatatagcttgtggtcatgaagtctgattaaaagtggttttagatatatgaaagtagtctaggtcagtgccttctgtattgaacgtattctgtagcctatttcactaagtaaaatgccaatatgcaggtacattttcatatcaaaattggatctaaaagaaatattaaaagacatttagtgcagctctgtgtaattaatgattatgtttctttattcattccaaaaagatggttttcagcccatccttaatatcaattatgactcatctgcataaaacagaataaaagtttctaaagtagtatgataatcagatatgaaaataaaacactagctatattttttcagaagtactttagaaagacaatcaataaagatgaaatagaaggtgaaaaacactgacaattacaagaaagaagaattatccaagttgaaatgtaaataacgtaactgagtaaatattgactagttgatatgggctagtaaatatctaaatgccttattttccaaacgatggtcactacagctttatctttctatcagtcataataacatcttcaaatagccataactggtagactcttcaagtcaccaagacaagtatattttgctagttcttcttttttggttaagtcaactaagaaatttgggggaactaatatttattgagcacctactctaagcattatactcaatactatacacacattattggatacaatcctcacaacagccttaagagtaggtataaatctctgttttacaaatgtgaaaaatcaaactcaaagaactttatttaaagtgaggcgaggcacggtggcttatgcctgtaatcctagcactttgaaaggcttaagcgggaggatcgcttgagctcagaagtttgagaacagcctgggtaacatagggaaacctcgtttctagtaaaaataaatacaaacaaagataaagccagaacatgttggtgcacgcctgtagtaccagctactccggaggttgaggcgggaggatggtttgaccctggaaagtggaggctgcagttagctattctagtaccgctacactccagcctaggagacggggagaccctgtctcaaaaaacaaacaaacaaaagagaagttgttaagtgaatttcgcatgactagcaaattcggcattcaaattcagagttctctaaatacaaaccctatgttctttgctttctaccatactaccttcaatgtcatatgataaaatagtgtaattattattaagtaaggaatatatgtattgttaaaacattttgcatatgagttgttaaaaaaatttcatgggaaaatttatcacatatatacatacatcaattgtatctttctgaagatttcacatagtagcttcccctatcaatttttataccatggatttttaccatgtgcccacacatgtctactggtctaagcactggggataaagtagtgagcaaaataaaaacggcatatacccttgtggagcatgcgctgtagtggaagagaggttaaacagatcacacaggaaaatataaacagttttgtattttttattttgcatattttatatacaaaatatattttgcatatttttgtatatatttggtatatttttgtgtatattttgtatatttgaaaatataaaatgtgattgtaacatgaaggaaaaataaaaggtgataagtaaaacaataattaacaaaatgtggaggaatgaggagactgggaggtcaggctttctgtctgctagtccacagtccttgtcaacataaatctatttagttgtgggggagggtggggagtgggagaaggtggcaggccaggattcagagttctctctgaggtttctagtttggatgactgagtttatggtgagatggggattccaaaaggggctgcagattctagactgaagataatgaggttgaactttggaaggtttgagaatccaggatgtttagacaggtgtggaactggaggacatgcattgggtgtctggagacaaagagaaagatgaagggtaggaatatgcaattaggaattacacacaaatctgtgataaaatgagctggcctctctgcaaggtgggttggatttgaaggtatgaaaaaagtttaaatgattcattctgaaaacagtagcttaattaagtaaattagcttttcccagaatatgtgcctcaaaaacctagttctgaagagtgatagtaagtgctcctcaaaataaataaatatgcaaagaaacaaacgatatgtcagcaataggttcgaaaagcaagttaaacaaagtttaaaaggtttcatagcctttcatataccaatgtgcctctttttccaaacatattaggccactgaacttttttcttaaggagtattttataggaacagtactctacagaatgaatacctgttgggaaacaggtattcattctgtagatgggaaacactggaccatataaaggtttataagagactccgtctccaaaaaaaaaaaaaaaaaaaaaaaaaaagaatgttcacgccttttcagtagccagactggagcaacaagctgaagttcaattaaaagagagttgaaattgggaagagtgaaatgtatttttgcatttggtaggattggcaggtaggaagttttcaaagccagggagagggagctgttgtaggcagctcatcaggaaaaagacagtaggaagagtgaggctttgcagtttgagttaaattgaggaaggaatgattccaggcagggagatcatcgaggacaggaagctgctaggctgtccaaaattgaagtgataaggacatcagtgatagagttgcctgggaaatagtgtgaacctgagaaatattttgaggaaaggaattatgggtcttggtaatagattagattaaaagaagaaaatggtggcattaacaatacagtttctgacctgagagaagaagaaagatacacagaagaatgaaaccaaaaccctaagcatatgatggctaacggacttcccagtgccctgttgggtttctagaaaacagaatacaacatcgtctgagatcacagtcatatcccttcaagtgttttcaattaaatgacatgagactagacaattttaagacttgtttgaacacagatctaaaatgctaagttcctaatgtcatgtccactcttcaaatagtcaaaaacaagctccaaactaattattaattgggaaatatgctaaccatgctgaaattaatttttttttaaatcttaacttgctcaaagaaacatgaccagttccctggtcaccttcattaaaataccctacattaaatcttgcatttagagtctcacattcagcagcaagctagaaatcacacattttcaaatgataagcagaaattaatattagatttatttgctttctttctgaatgtgttagtgcccagggctctgacaactacacaccattgttttgtgaaggaaaagaaaaaagaaaagaaaaaaaccacacatgcatgaatattttttaaaaaatcttggctgctttcttttttctaggtgacatttacaaagaggaaatttgggttgatgaagaaggcttatgagctgagcgtgctgtgtgactgtgagattgcgctgatcatcttcaacagcaccaacaagctgttccagtatgccagcaccgacatggacaaagtgcttctcaagtacacggagtacaacgagccgcatgagagccggacaaactcagacatcgtggaggtgagagagcatgcgtggtgagccccaagcctccgcaagcaggggagtttggacctccccctgccacacacacatacacacatcatgttctttttcttaagatgttcatagtcccatagatagacccaggattattatctatcgcaactcttactccaccttttctctccccttcaaaagttagagtgatgtgatgatagagaccatgtaagatctggtctttgctagaaatcaagtaccagtgtcaaactatttgcttcatctttggcaagtggtcattgtccacagctgtgtatcaggacaccatggttgggaactcttgccagggaatagctcatccatattttagacacttctgatcatttattttaggtatataatagtttcccggcatcatcaaagaaaaaacgtatttaaaaatgaactcaccccaaccttacactttcagtttttcgatttatgtctcttctttgtaactcattattctgaatgctttcttgctggaagagtaaaggcaattattctcctagaaatgttttttcctaaaaattatatcattatatatatcaatgaaaactgttaatatacatggaatcagaaatcagatgaaaatgaatttctaaatgttagctcagtgtttaatcaatgtcagatttaaaaaattgttttattgtgcccaaaataaataagcatgatgctgaaagtcaaaaatgttttagatgtgttagcataagtaacataccatacagttttggctggaacattttttttcccattttattttattttattttatttttattatacattaagttttagggtacatgtgcacattgtgcaggttagttacattggctggaacattttaaaccttttcagcatcgatcctatttaaatactttgtagtacccttcatgagcaatgattaagactacaaaacaaaggaagaggtataataaggatggttcccatctgcctattttcttaatctatttgtctactctggcttccctagattgtgcctgctttctcagaatgaaaagaaaattaataagtgtttcaaaagtatgtactcaagagccagtttgccagagtacacgtcattcttgccattgcttagactggttccacattgtaaaaaaatgtagtgctaatcctgatcaaatgaatatgcctcccacatccatctcccttttacctgttacaattgtctaagactaattctcatttctttgtttttatttgaaagtttttcaaaagtattgagctgattattatattttatttttgccttaacgaggccaaggaaataatttcagagaaacaaaagtgaatgataaatagacctagggtgatatgtgcttaaaatactatgcattattttagtttttcattgataatttgaattgtgtgcttgccttgatcttgaaatttaggatcactgataaaatttacctatgcatttcagatagttttttatttgcatataaatatgaaagtacaaaaatatgaaggtgaacactgcttgtgtgtgtgcactaatacttatgtaaaataaattcagaaaacaaaacaactatttactaaaaactccatctcattactaaaaccattataacaaaagtcagggtaacaaaagaatttgagttggaatttatcattacactggaactgctagtccttaatgtcatgtgaaatgctgtagatccataatgagccaattggaaaatatgttgacttctaaaatttgctttcttaaaggagtttaaaacctagaacattcatcttctgagggtttttcttaggaatatattatatgacttgaaggcaacttaaaacttcatatattggccaggtgtggtggctcacacctataatgccaacactttgggaggcctaggtgggcagattgcctgagctcaggagtttgagagcagcctgggtaacatggcaaaactccgtctctgcaaaaaaaatacaaaaattagccaggcatggtggcacacatgtgtggtcccagctacctggggggctgaagggggaagatggcttgagcctgagaggtcaaggcctcagtgagcctagattgtgcctctgcactccagcctgagtgacagagcaagaccctgtctgtttaacaacaacaacaacaaaaaaacccacttcatatattgtatgaaaacttcatattttttgataggtggatatttgaaagtcagacttctttaaatgccacaaaaacagcactgggttaagagtcattgtttttcatttgaatccttgtcttgcacttttgtgcagtgtggtgagttgggtacctctctgggctgacgttttctcatctcaaaaatgaaggcattggatttgaaagtgcttttgcaagattataatttttaaaaaagcaatacttgtaaaacaggagtaaagaaccagttccattttcttgttaacatcaatagattaaatctctgaatctctcaaaaagacacttcgaggcttttgggccaaatctagagattggatggctcaattatttggatgaacataacatgtaagtctaacacattgtgggtccgtcctgttcaactccctgaattatgcattcttcacatatttggcttttccacattttagtaataacagagatcatggaaaaagaagtaagatgggaccgctaagcttgataaaatttacatcatcttcacatggaatatttttcaaagtgctgcatcactgaaattaggatacttgagacacttggtgaagagggaatctggattggaagttgcatttataaaaagttccccaagtaggccaggcacggtgactcacacctgtaatcccagtactttgggaggccaaggcaggcgcatcatgaggtcaggagatcaagatcatcggggctaacatggtgaaaccccgtctctactaaaaatccaaaaaattagccgagcgtggtggagggggcctgtagtcccagttactcgagaggcaggagaatggcctgaacacgggagggagagcttgcagcaagccgagatcgcgccactgcactctggcgcaggcgacagggtgagactccgtctcaaaaaaaaaaaaaaaagttcccaagtaattcttagacacactaaatttgaaaacctctgcagcactagtacataaattgtgctggaggcaaagacctatgatacatcagggatttgaattcgttcttagaatggatctaccataaagtcaaaagttaagattgtttactgctcctgggtaaaattttaaatcctatttattttaatttaatggaatacatttaactgaataagtttaatgaggagcataatatgtttcatgaagggtcattagttttatatttcccatttggaccattacccctcttccttaaccctctaaaaacagtttactcacaagaagaaaaggtatcgggagagatagaaataatataatttccagcctttacacagaaatacaaatttctgggccataccagagtagtgctacagggtcataggaaattgtgcagtgcgtgggtgttgaaaaagattccttcttttagcaaaaaagctctgcgtaattatcatgtctttgcttgataattagcactactccaacaatggcacaaagactcacaaaggcttaacagacagactgagatcagtttttttatgattatattataatgcagcttgaatatctgtttagatacaatatataaatatgccagatttagtaaatgtgttaaatttttaatccattggttaaaaaaacaaaaacagttattgtattaaaagcacttcctttgaaggaagtccattttacttaactctgtgacaagtatactgggatatttacccaaaacgctagcttgtcagactgttgaaattcagttcggatggcattaaggaactgcccccttcactgcttgttcactagctccactcctcgttctcttagctgtctaagacagcaaaccctaccagtttatgttgggctctgttcctggaagaagatgtggttgttgagtacttcaggatgatctgaagatgcagatcccacaggacatgcttacagcccattgcttcatttagcaatgatttagcaagctccactcatgctcagcactgtggaagagactctgaaacagcaggagacaggcattcttgttaaggatgtaaaacatatatgcaaaaaatcagcttgggaacaattggacggcaaaggaacaataacctcattaatgcagtataagctgctgaaatgaaggtgtaggctaaacaattcaacagaactcattcagccaggtcatgtgtttttccagagcattccaagtgatccttggagtgacaggactcccagacaggttacctccatatccagcacgttttgtaaccacaaaatccttatgggagtatcacttagcacccagccaggaaggaatctctcatcccctcagtgaactcagtgattctaatgagctactcattcagtctgggcccacagtccagtgattaagtgtggaaggggaataaaacacaaggccctttgctgctctctaggaaattcagagatggatgtaactcctgcagaagaaacctttgattcacaactgtctcagtagaggattattggtttttctttttagaggaagaacatgtgtgtctctctctctgtgtgtgtgtgtgtgtgtgtgtgtgtgtgtgtgtgtgtgtgagagagagagagagagagagaaggaaagggacatagggagatggagagaagatgagagatgagagattatatttacctgatattttattattttggaaattttatttgctgtcacctgaatcctgacttctgttttgatttagagacatctaagaacagttgctgcagcaaaatgttttctgcacagtaataattaaggcctaaattgggatgggaaaagccttaaaatagtttataacttgtatagcttcacaatggtgatgaaagttatcaacgagctaagtgctcttacatagtttagtgaaaatactaaatacaatttttgttgaaaagcaaatgcagcaaatagcgaaattggacttctttacaaactcagtatcacaaaatttggaaatggatgtaaatgtgaaaatatgtctactttacttgaccattcattatatctaattagcttctaattttatacttataaaaatatagatgtaaagccactgtagccagactgcctctctagattcctcctctctgggcagagcatctctgaaagaaaggaagcagccccagtcaggggcttatagataaaactcccatctccctgggacagagcacctaggggaaggggcagctgtgggcgcagcttcagcagacttaaatgttctggcctgctggctctaaagagagcagcggatctcccagcacagtacttgagctctgctgagggacagactgcttcctcaagtgggtccctgaccccccgtgcctcctgactaggagacacttcccagcaggggtcgacagacacctcatacgagagagctccggctggcaactggtgggtgccactctgggacgaagcttccagaggaaggaacaggcagcaatctttgctgttctccagcctctgctggtgttaacccaggcaaatggtctgaagtagacctccagcaaactccagcagacctgcagcagaggtgcctgactgttaaaaggaaaactaacaaacagaaaggaatagcatcaacatcaacaaaaaggatgtctgcaccaaaaccccatccaaaggtcaccagcatcaaagaccaaaggtagataaatccatgaagatgaggaaaaaccagtgcaaaaaggctgaaaattccaaaaaccagaatgcctcttctcctccaaaggatcacaactcctctccagcaagggaacataactggatggagaatgagtttgacaaattgacagaaataggcttcagaaggtgggtaataacaaactcctccgagctaaaggagcatgttctaactcaatgcaaggaagctaagaaacttgaaaaaaggttaagggaattgctaactagaataaccagtttagagaagaacataaatgacctgatagaactgaaaaacacagcacaagaactttgttaagcatacacgagtatcaatacccaaatcgatcaagcggaagaaaggatataagagattgaaaatcaaatttaatgaaataaagcatgaagacaagattagagaaaaaagaatgaaaaggaatgaacaaagcctccaagaaatatggggctatgtggaaagacaaaacctacatttgattggtgtacctaaaagtgatggggagaatggaaccaagttggaaaacacttcaggatattatccaggagaacttccccaacctagcaagacaggccaacattcaaattcagtaaatacagagaacaccacaagatactcctcaaaaagagcaaccccaagacacaatcagattcaccaaggttggaatgaaggaaaaaatattaagggcagccagagagaaaggtcgagctacccacaaagggaagcccatcagtctaacagcagatctctctacagaaaccctacaagccagaagagaatgggggccaatattcaacattcttaaagaaaagaattttcaacccagaatttcatatccagccaaactaagcttcataagtgaaggagaaataaaatcctttacagacaagcgaatactgagagattttgtcaccactaggcctgccttacaagggctcctaaaggaagcactaaatatggaaaggaaaaactggtaacagccactgcaaaaacatatcaaattgtaaagaccattgacactatgaagaaactgcatcaactaacgggcaaaataaccagctggcatgataatgacaggatcaacttcacacataacaatattaaccttaaatgtaaatgggctaaatgccccaattaaaagacacagactggcaaattggatagagtcaagacccatctgtgtgctgtattcaggagacccatgtcgcgtacaaagacacacataggctcaaaataaagggatggatgaatatttaccaagcaaatggaaagcaaaaaaaaaaaaaaaaaaaaaaaaaaaggcaagggttgcaatcctagtctgtgataaaacagactttaaaccaacaaagataaaaaaagactcaagaagggcattacataatggtaaagggatcaatgcaacaagaagagctaactatcttaaatatataggcacccaatacaggagcacccagattcataaagcaagtccttaaagacctaaaaagagacttagattcccacacaataatagtcggagactttaacaccccactgtcaatattagacagaacagcgagacagaaaattaacaaggatattcagggcttgaactcagctctggaccaagctgacttaatagacatctacagaactctctaccccagatcaacgttggacttcagcattcttctcagcaccatatcacacttatcctaaaactgacataattggaagtaaaacactcttcagcaaatgcaaaagaatgcaaatcataacaaacagtctctcagaccacaatgcaatcaaattagaactcaggattaaaaaactcactcaaaaccacacaactacagggaacctgaagaacctgctcctgaatgactactgggtaaataatgaaattaaggcagaaataagtaagttctttgaaaccaatgagaacaaagacatagtgtaccagaatctcagagacacaactaaagcagtgtttagaggaggtgaatttatagcactgaatgcctacaggacaaagtgagaaagatctaaaattgacaccctaacatcacaattaaaagaactagagaagcaagaacaaacaaaagctggcagaagacaagaaataactaagagccgaactgaaggagatagagacacgaaaaacccttcaaaaaatcagtgaatctaggagctgattttttgaaaagattagcaaaatagactgctagccagacttaataaaaaagaagagagagaagaatcagatgcagtaaaaaatgataaagaagatattaccactgatcacacagaaatacaaactaccattaaagaatactataaacacctctatgcaaataaactagaaaatctaaaagaaatgaataaattcctggacacacacaccctcccaagacaaaaccaggaagaagtcaaatactgaatagaccaataacaagtgctgaaattgaggcagtaattaataggctaccaaccaaaagaagtccaggaccagatggattcatagctgaattctaccagaggtacaaagaggagctggtaccattccttctgaaactattccaaataataaaaaaagagggactcctccctaacccattttatgaggccagcatcatcctgatgccaaaaccaggcagagacacaacaaaaaaagaaaatttcagaccaatatccctgatgaacatcgatgcaaaaatcctcaataaaatactggcaaaccgaatccagcagcacatcaaaagcttatccaccatgatcaagtcagcttcatccctgggatgcaaggctggatcaacatgcaccaatcaaaaaatgtaatccatcacataaacagaaacaatgacaaaaaccacaccattatctcaatagatgcagaaaagggcgtcgataaaattcaacactccttcctgctaaaaactcgcaataaactaggtattgatggaatgtatctcaaaataataagagctatttatgacaaacccacagccaatatcatactgagtgggcaaaagctggaagcattccctttgaaaactgcacaagacagggaggccctctctcaccactcctattcaacatagtattggaagttctggccagggcaatcaggcaagagaaagaaataaagggtatttaaataggaaaagaagaagtcaacttgcctctgtttgcaggtgacatgattgcatatttagaaaaccccattgtctcaccccaaaatctccttaagctgataagcaaattcagcaaagtctcaggatacaaaatgaatgtgcaaaaatcacaagcattcctatacaccaataacagataaacagagaaatcatgagtgaactcccattcataattgctacaaagataataaaatacctaggattacaacttacaagagatgggaaggacctcttcaaggagaactgcacaccactgcccaaagaaataagagaggacacaaacaaacggaaaaacactccatgctcacggataggaagaatctatatcgtgaaaatggccatactgcccaaagtaatttatagattcagtgctatccccatcaagctaccattgactttcttcatagaattagaaaaaaactactttaaatttcatatggaaccaaaaaagagcccgtatagccaagacaatgctaagcaaaaagaccaaagctgaaggcatcacgctacctgacttcaaactataccacaaggctaaagcaaccaaaacagcataatactggtaccaaaacagttatacagaccaatggaacagaacagaggcctcagaaataatgccacacatctacaactatcttatctttgacaaacctgacaaaaacaagtaatggagaaacgattctctatttaataaatggtgttgggaaaactggctagccatatgtaaaaagctgaaactggaccccttccttacaccttatacaaaaaaataactgtagatggattaaagacttaaacgtaaggcctaaaaccataaaaaccctggaagaaaacctaggcaataccattcaggccataggcatgggcaaagacttcatgactaaaacaccaaaagcaatggcaacaaaagccaaaattgacaaatgggacctaattaaactaaagagcttctgcacagcagaagaaacgatcatcagagtgaacaggcaacccaaagaatggaagaaaatttgtgcaatctatccctctgacaaagggctaatatccagaatctataaggagcttaaacagatttacaggaaaaaaacaaccccatcaaaaagtgggcaaaggatatgaacagacacctctcaaaagaagacgttcatgcaaccaacaagcatatgaaaaaaagctaatcatcactggtcattagagaaatgcaaatcaaaagcacaatgagataacatctcacaccagttagaatggtgatcattaaaaagtcaggaaacaacagatgctggaaagggtgtggagaaataggaacacttttacactgttggtgggactgtaaactagttcaaccattgtggaagacagtgtggcgattcctcagggatctagaaccagaaataccatttgacccagccataccatttctgggtatatacccaaaggagtataaatcatgatgctataaagacacatgcacatgtatgtttattgcggcactattcacaatagcaaagacttggaaccaacccaaatgtccatcaatgatagactggataaagaaaatgtggcacatatacgccatggaatactatgcagccataaaaaaggatgagttcatgtcctttgcagggacctgggtgaagctggaaaccatcattctcagcaaactaacacaggaacagaaaaccaaacaccacatgtgctcactcataagtgggagttgaacaatgagaacacatggactcagggaggggaatatcacacagcagggcctgtcgtggggtggggggctaggggagggatagcattaggagaaatacctaatgtagatgacggttttatgggcgcagcaaaccaccatggcacgtgtatacttatgtaacaagtctgcatgttctgcacacgtatcccagaacttaaagtaaataaatatatatgtacaaaattatttttatgtgctatatagatacatattatacaaggatacttttcttaagagaaaaaaacagattcacttacctaatcatttgcagattttccttctttcagtcattgattgaacaaaaatttgttgaattcctgctctgtgttatatgctatgaaatgcctggagatacagatataaccaaggtccctcaaggactctcagtccttaagttggctcacaaggccatgcatgatctgatccatgtatttctcttactcttcagcctcactttttgcaatttccctgccattaacctgcccttacaacccccatcctatactcaagccacatcgtacatacgtacattcctcaacctctccaagctctgttttgtcttaaaattccttactggatctctacttggctgttacttatccttcactcaagtcaggtcccaattacactttggaaagtcatccttgaagcccccataacttaggttaggtgcttcccctgtattacagtcatcatgtgttctatctttcccatcagagcactgttgaagttgttatccaattgcctgtcccacactagattctaaactcccaaagggcaagggactgtacacgttttgctcaccatcatattcccagtgcttaacatgaggtctagagaaagttacctcctcagaatatatttatagaataaacaaacaggaaagacagacatataatcaagtgattatcatgtggcataacgttgcacatttaaagtatgaaaaaatgtttttacagttccaatgaaacaattcattaaattttgatagagtttatcaaagcacaatttaaaaacactcaagtaatctaggtccatactctccaatatagtagccaataggctcatgagactatttacatttaaatgaattaaaattaaataaaatgtccaattcagttcctcagttgcattagtcatgtttcaagcattcagtagtcatgtgtggctagtggctactgaattaaacagggaagatatagaacagaatgcattgatcatcacagaaagctctatgagacagcactggtctagactgaaatatgaagagggagatatttaaacaaattgtgttttcaaattaataccaaaattaattcttcaatataaaatttgaggagtcacttcggaagtgagtaactgtgtaccttgtgattttggaattcagagcataaatgttcacttcgagagactctgatctggaactaaacactcaccataaaactaaaagcacactttacccctaacctataaccacagagtcaatcagtaaacttatgatctggtcagaaagcacttgcaagttgtccaggctgacagggaacattaactgtgtgagctgggtgaagtatactgtatttttttttaacttgaagcttgtgaatggaaagatgatagttctgtcttattactatttttaatttacttgaagcaacattggaccagtatttacctatataattagtaaattaatttctccagaaaagtatttttcattataaaaaaatttagagaaatagtattcttgagatacattacaaatccttcttagatttactataaaacataattgatatagatcttactgctagtgactaagtaagtctaccctcccctctgttaagccaagcatataattgcttttcaatacatggtattgaaaaattaacaaagtattagtattttccataaagatttaaaccttctatgttgtggcttctgagggaaaaggggaaaaagattttgttatttaaaaagttttttattttcctgaattttaatataattttgtttatatatctttaaaagacttttattagtacctgtaaataatatttttacttgttccccaaagtcttaaagaagaaatgagtctaaaattttttaaatgtattcatatttctcataactataccacaatgatttgtatagatcaaatttgaagagccatttcttttttaaaaataatcttcttgcttaatttacatgttttataaacacgaagagctgcttcacatctcatttattaagaaaataatcattgttgaacaaatagtaatgtgaggcaataaaactgagcttcctctagtctctgttattacacagctctaatagtttgcaagcattagtatgaacacagtgagcagataattacttaataatagtagaagcagaaaagacagggttcaaaatatagacttttatcagtaatataatttctttatcaatattaatcattaccattttgtcatcattattattttacatgaaccttcctgaactagagcaaaacaaagatctcatgtgatctctcttcacctgactcccaccatacctggaaatgaaaagagaaaaatatatagcctggatgataattgtcaatttttaatgatatttacaaatttcatggcatatggaacttggtggtaagcagcatatttgaaccaaatgttacattctagccattgatatcatctaagtaaaactaacattggctctaaaaggtgccgaataagaatcaaagtgtagaatattcttacttcctcaggaaaagttactgaatatatagtcatgaaatattcaaaagtaaagttctaagaatgattctgaggcttgcctagaagcagaattctaagatgatggctcttttcattaaggagtgtttattttaatttcttcaccccactgttggttttggggggtttgtttttgttttgtctaattacaaatccctctcctttccctgaagggcatgacgaagctttgttcatctctgtacctccagctgccagctcaatgcctagcatattgtggacattcaatatatatcaacttactgatgatcattagcataaataaaatttttaaatatacaattttttctttggtgagatccgatgtgttctaataataaaagtgagaatctttcaagtcagctagagtgagtaaatgttgttttgcatcaaaaataaataaataattaaattacaaggcacaggaaaccaagtaaaagtattgcttgtggtgctggtggaaaggaaaggacttccagaccaaggtacagtattttgattactggagaagagagaagaaacctgttagtgctttggccagtattgggtcaaatgaaatgcctgtggcccagtgtgaatcaccagagtatcttgctaaaatgctgattctaactcagtgggtatagggcagggcccaggatccctttatttctgaccaggtgatgctgatgctgctggagtagaaaggatctagatttccttttccaaacatgtatttccttcttcatggaatttggaagtgtgtctgtagactatttcctctttgtaattttatggagggttagaatcatgctataaaacaggttcttacaactgaaattctgtgaaactaattcttgaaaggaagtgtcttaggtttttctggaagtgtgatacattcataaaaggcacatcactacccagtgaggtgggactctggcacatttcactccttagtgtgtgcccatcactttgtactggctgcctggagcacacagttaaggaagatgctgagtccaagtccagacattcaggaagtgtgatgtgattggttaggggcatgtgccttgggtgcagagagatagtagtacccataactttttcattattttcttggtcaaaataatcaataggacattctgggaaaagacttaatcaaagtcagtcattaaaaggactgtaattaggtaaatgctgcatatgtgtacaacagattaagtaaatagattatattattggaaatataccccattttatagctatttggcatattatccagtcatgtctcaatggtgtttagtgtattctgcactactctgaaatttaaccacctggaagaagttatgaataagaaaaaaaattctctgtcaattatttctaaaggtcatagagttaatgactagctggaaggttaattagattctgaaaacctcttcatatcaattaaatctcttatctttatgttttagtaaataaactgaataactatttagagctactgttctagggtaagaaacgttgtaaacagtaaaactacacaatgggtgtttgggttttttcctcacattaaaaaaaaaaatagttatagcaggcatggtggctcacacctgtaatcccagcactttgggaggctgagacaggaggattacttgagcctaggagttcaagaccagcctgggcaacatacagagactccaactctacaaaaataaaaataaattagctggatgtggtggtgcatacctgtactcctagctacgcaggagactgaggtcagagaatcacctgagcatgagaggttgaggctccagtgagctgtgatcatgccactgtaccccagcctgagtgacagagcaagactctatctcaaaaaaaaaaaaagtattacaaaaaagtagatatatgaattaataatagtaacttattttaataatagtaacttattttataatttctgaattactttatttttcaaaaataaaagtgtgcatattactatttaatcataaacaagttccatcactatgatgtcaaggaggaaaccatttcatagaaaaatagaccaaagttaccctatgcatgagctactactaatctaaagccaacttcactctcagttatttcaataggacataagtttattgattgactctgtggttagttccagaaacccaacccctttgaaagttactgtacacatttgtaaataaatggtatatttagcacctatactatgacaattataaactcatttgtgtcatgtaaattttctttggataatataaccagacttcagatgaaaagacatagatctgcattaatctgtaaggtagcctagccacatgtggctatacaaatataaatataatttaaattacataaaattaaaagttcagcttttcagtctcactatccacatttcaagcaagatgtgactagtggctcccaaatataattgtccattatgaaagaaaccctctgttggacagtaaatgacgaaactggtgcatctagtgttctctttcattcaaataactggcatgggctggccgaggtggctcatgcctgtaatcccagcactttgggaggccgaggcaggcggatcatttgaagtcaggagttcaagaccagcctggcctacatggtgaaacctcatctctactaaaaatacaaaaaaaaaaaaaattagccaggcgtgatggcacacgcttgtaatcccagctactcgggaggatgaagcaggagaattgcttgagcccgggaggcggaggttgcagtaaactgagattgtgccactgcactccagcactccagcctgggtgacagagcgagacacagtctctaaataaataaataaataaataaataaataaataaataaacaaacaaacaaactggcatgatggttaatagatacagcccaataaaggatatgtaaactggagaggttgcacctggctacttcaccttccattcctgcagcaggcatttatgacatgcccactgtgcgtcagtcaggacctgagccagggcagagaaatccaaccaggaaagttgaatcactcagttggcatttactccaaggaacagaatatttgttaaagtctatgtgattttgtggagaaagacgagaaaatggagggatcactgaagctggaattgccctgaggaagaagagaaaatggaaaaggcacaggaaaaatgagtagtaagaacgtagaaataagctaggtcccttgtgaacttttccaacaggaaagaaaagatcatgcgtgcacacggtttcttctgatttttcttaattagtatgtgcggaattttatcttcatccagactccatgattggttttccttaactgtagttgttctgaattaatttcatgtgggggaaaaataaagctacaaagtgatttttctaaagaatattgttgaagcattgttatgagagttcatctttcaaattttacttctaggatataggactttaaaagctccacaaatttgaaggaaagatggagattaaaaattcagttccagttacagcaacatcacacactctcattctctaacggagggcgagttatgtaaccttgctgggctttaggttcctcatgagttaatgctgtctaccctgagctccttacggggctgtcatgaggattgcaggttataacagctgtcagagcccattgtcaacccttaagttttaaaaaattagttttattttcaaagtcaagagaaaaagttcagagaagaaaaaatgctaaccaaaagaaagacaaaaattcttaatttacgactgcatagtttatgctaataagtgtattatttataagtaaatattgaatgattatataaataactgtagcattttacataaattaagaagatctaacaaaggtcaacgaattgattttttttttcttttccacaagtatttattaagtgtatgtgcaaagtatggtgttcacggccctccagggccagtagcagtccatggtggacagaatatacacagtatttgttctctcattcagtagatattgatggacatgaagatcatttgctaagcattctgccagttactggtgatgcatctgtgattatgatacccaattatctgaaccataataagatatagacaaagtacagtgggctaacagaggagaaggaaagcagttacaactgtgagcacctgaaaaatcttactgtagatttcagatgaaggcatggccttgaataagtagaataatttgatatgctaagccaatctgagaaccatttttcccatttaaactaaaagtgagactaataaatgtagtgatatatggacattaaatgcatatatgtatatatatacacacatatatgtagtatgtatatgtagcagcctttattttttgttttctgttagcactggattttttaatgtatggtttttctataaacagatggttataatttctagagaaattccatagaacacaaatgttagaaaaatgcagtgaatttcattgcctttaagcttaataaaaggttcaaccttaaagttgcatcccacatcgttagtttaactttacagatgagatttttttttcccctctctaaattctaaaacatgatacatctggctgagaggctggaaaattgttacatgcctgtgcaacattcttacaacctaatcagttcttcaacttttctcgcagtttaatcattggagaatgttctttgtttttgtagtcactgtttcacatagtaacagcttgttgtattttggtctgtttgccagagggtaggtttatttttaaaaccctgaactctgaatttttctttatttttccaagattgaaagcagctgaaatgcctggagttacaggttgaaggctgcttcacaatatgtggaggaagcttctttccctcctccctttgtgtgtgtgtgctttttttttaatttttccctaacaaatgtcttctaactggtagttgtctaaaaatagaaaactgcttaactaaaaatagcctggctctcagtcgtgccaaggaaaatggagaggaataggcgtggaatagaaggctgagtaatccagttctattcattcagagaaacctttgagaatgcgggcgatgataaagtgccctcaaaaaaccacaggcccgactctctcttcagacttctaggtgccaataaacattttagccccaggatacttttttttttttcctcataggttgtaaacattttctgaaagacaaggctttgtttcagggaacctgacaaactgccataaataactaactttcctaaggtcttaaaaattcatatttgtaagatgtattttaaaagagaatcttaaatgaaagtattgtaaaataatgtacgtcgtgtaataattaacagaggaaactctgttataataaaaaccacttactgcttgcaattaaactcaaaactttaaggagtttcacagcaagaaaattattcctgtgactcattgtaccttaagagagcagctgactcattttagtttagctccctgagacatgaaattctcttgttcagtctgtatccccttaacatgccaacatttagtctctttcttaaaattattattttcactcaagcagatttttacttttaatctttaaaatgatgtagaaactactttgaaaaatagcatttctggagtaggatggcttttagtttcaacaaatggaattctgagtaagtcataaaaaaatacgtgtgtgtgtgtgtgtgtgtgtgtgtgtgtgtgtgtgtgtatgccagttttgcaatgggaatgctttttttttctattttgttttgcttaagtaatctgtaaaccaggtcaaacatagcaacagggtgtggaaatgtcagcacagttcatagggttatacgagtctgagcattgttatgttcagttcctgtaatgctgctggtgataagactcttgagacaaaagacgataattgatggaaagaggcttaaatcattgctagaagaatcaaggtccttgtatctgtgtacatcgactcttctggtctccttccgtcttgtaaagcattttgtcgtcttgcatgttggccccctactgctctttgtaatggatgcagaccacaagtgattcctttatgcagcatacagggtgtaattgtgtctgtgtggtgtattagtaattaccaagctgaattcccatattgtatctttactgcaggcatggaaaaataggacatacaaccctgcgaaaccattttcaacctagatagtgagccacttagagctgtattccagggacaaagccttttacatgaatactttttaaacaaaattttcattgttgagtcatttgtaccatgcaggataaattcagtttgggaaattattacctttgatattatattattcatttctgactcttcagcaaagtctgtaatatggaaaatattggttctttttaactgctgaaataaaaaatatttttagatgtaatagtgatatgagctatggtaactatgctaggctatcatacagaaagagtactacgtgaattactacatataatagattctgtaacatttataaacatgaaataatatagttattttagtagcattttatcttaaacagttatatgttatacataatttatcaatattggctcaagcattgttaaacttcagaaaaagctgacaaaaaattttgttacagtaaacagatataaattattaatttctttgctataaaatttgcatccatcctttatgtattatgtagctgatattgatttgactacctccaaatcattgtggatttgaaatgtctacagtattatctgtaatagaaagccaaaataatgcaagcagcttggcttaaacaaaagaaagtatgcttattctatgcatcaaatgcttataatgacagttaagaaatattaaatagaagtgcaaagaaattaatacagcaatttcattatcgattttcaatgcagttagacttatattgcaaattattcattaaagcattcaagatttttgttatatttttaccttcatttctgaaagtggccttccagtatgtatatcttaaaaatttgcttccacttttatatgtagattttgttttattcaagcaataattattaaattcttaggatatacagaactttatattgatgccaggagaaatacaagtttggaagacattgtctgtgacctcacaaaacttacagtccaattaaggtagaaaatacatgtgggaatcaactggacaaaacaacgtaatgagaactatggggtatttagagggaggcaacatagcacagtgttgaggagcatcagttctggagatagactgcctgagttctatatgtccttgggcaaattacttagactgtctgttttattttttattttattttattttttttgagatggagtttcactcttgttgcccaggctggagtgcaatggcgtgatctcagctcaccgcaacctccacctcccgggttcaagcaattcttcctcagcctcccgagtagctaggattacaggcatgtgccaccacgcccagctaaattttttttgtatttttagtagagacagggtttctccatgttggtcaggctggtcttgaactctcgacttcaggtgatccgccagcctcggcctcccaaagtgctgggattacaggcgtgaaccactgcacccggccaactctctgtttcttaatcccatcgtctgtaaatagaggttaataatactatcttctgcttagctgttatgagaattaaatggataaacatttataaaatgcttagaacagggtctgacacttggtaaggtttacaataatgataacgacgacaatgatggcagtgccgctcctgataccatgtcatcaagcaataagtggtagaaagaagtttaaaaggtcaggacaggcagccatgattggtagtcctttttaggctcaaacaagtcaaattcagaaagatggatatcaattgatgaaaaacgtgggcaaactttcaaaaaaccaagtatgcaaagagtcacaagaaaaaagaaacaagggcatgaaaagtattagcttgatatgaagagaatattcacataaataaaaagatataagaaagatggcaatgaaaatgggaagaagagacagggaaatcaagcactctaaatatttgatgtggaattaaatgtgatacaattggcatcagaaagacactccgtggtctcgagcagtaaattagcataatgacaattcttgagagaggttccgctggaaaagacagaaacagttgtgaaaagtggaagtgccaaaatattttacgttttgtaagtatgtatatgtgtgtgtgctaaaaagcctgaaagctttcaccaaacttatatttttatttcataggacaagttgcttcagaaatattcatataattttagtttgcactaataaggtgcacatgcatttctgtgactgaggactatttatcacatacagtgtattaaaaaagcaaattatagaggcctcaggaggttttttgttgtgtttgttgttttcgttttgcttgtttttatttttttttttttgagatgatttcatgcccattgcccaggcttcaatgcagtggcacagccttggcttactgcaacctccaactcctgggctcaagtgattctcctgcctcagcctcccaagtggctgggaccacaggcacataccaccacacccaacgaatttttgtattttttgtagagacaggattttgccatgttgcccaggctgttcgaattcctgggctcaagtgatcctcccacctcagcctctcaagtgcttggattacaggagtgagccactgtgcctggcctaggaggtttattttaaactatataagcttctttacagtaaattgaaacataaatcaaaatcttataaatttagaagttcctaatgaagtagtgcactttttaatttttagacagagtctcgctaggttgcctgggctcttctcaaactcctgggatcaaaagatcctccttcctcagaacatgtgcagttttttgttttgttttgttttgtttttgacagagtctcactctgttgcccaggctggagtacaatggcacgatctcggctcactgcaacctccacctcctgggctcaagcaattctcctgcctcagtctcccgagtagctgggactacaggcatgtgccaccacacctggctaatttttgtatttttagtagatacggggtttcaccatgttggccaggctgggtcttgaactcctgacctcaagtggtccgcttgcctcggcttcccaaagtgctgagattacaggtgtgagccaccacacccagccaggacatgtgcacttttaatgatcacctaaacaggtcaggattctgaatacaatactgtcaaatatgaaaactctccccttacactttcacatccatataataaaagccctgccctttcataaaaaagacagtgtggtgctggaggagggacagacacacattttagcgtcagacaaacctggtttctgccactttcataaactctgtgatcttgggcaacattctgaatttccaccaagcttcagcttctgaagcagtaaaaaagggataataaaactcacttttggtcttcctgtaagaattaacttatgtacatatatagccattagcacatgatgctcatacaactggtatttattttcctgctgttcctttttgcatatgtaaatttaggcaaaaattttaaactttcacttgtatatacacacgcatactttggacactgaaatcttcagtgtatttggtgcttacatttaaataaaatgtcacattttataaattatcatataatgtatgtatatttcttgtgtaataacgtgatgaaattcttcagaaataaggtcctcactacacagatttttaaactagggaaagggtagaaaaaggaaaaaaactaggagtcaaaagtaattctattaagtccagtcaaaatagagttaaaagaaaaaaaaagtggaactctgccaaatagaggggcttgcccaagttctcttagtgaactctggtagatagcattaggatataatttatttcctggtgtcccctttgaactactttgtatccaagaagaggagttagacaatgagagagaaagtgaaagaacgagagagatgtagggagaaagagaagggggtaggttgattgagatttcaagacaatggaagtaattagcaaggataacacaagtgtccctatgctgccagtttctcttctgacacaaaaataaataattgatttcattgaagtattagtcagtcaacaatgcttagtgtgatgatattgttaacagtgaaatatatatgttgtgcattgcttctagggtgaaacttaagtatctttgccctggctcccgcagtattttcatggcagtgaggatacatactcttggaaatgagccaggaacactctaatgtattacacatgtggcttaataccaggtgaacaggtattttaaatattctaatcacatacccacaatgtatatcgctactgggaaaaggatatcatttttaaccactggtgtttgttctgagccatacctttttcacactctgaagattttcaagacgaactgtgatttggggagggatggccatctcagtcaactttaactgataggaggtacaacaaatttatagttctgaactctgcacctggagtctggctaccgaaatcaaaccacttgctgaccagcataaaaataaataggaaaatatttcagtgttttccacaattgcgtttgtacaaatacaagagattttatttatattaaagaaaactgtagtttttcgttttttcttttttctttttcttttttttttcgagatggattctcactctatcatccaggctagagtgcaatgatgcaatgtcagctcactgcaacctccacctcttaagttcaaacgattctcctgcctcagcctcccaagtagctgggattacaggctcctgccaccatgcccagctaatttttttgtatttttagtagagagggggtttcaccatcttggccaggctggtctcaaactcctgacctcaagtgacccacccgccttggcctcccaaagtgctgggattataggcgtgagacatgagacactgtgcctggcctgcaaattcttatattatgattaggggaagaaatttgttttccattagaaaccaccattaagtttgcaagcattgtaacataaaaaaaaaaaaaaacctcactttgctgaggcctaaatttctatattgaaatattactttctgggggaaaaagataaaatctacccaaaagtacatctaacgagaaataattctgaagattctttcagatgttctgcttcatgctgtacacacacacacacacacacacacacaaacctacacaaacctacatatattcacatatacatgcagttaatgtgagactggcagtttccagcacaaaatacatagcttccatttcactgtgcacaagttcctgtgtcagatcaacaaaactttcattgatttctatctatctgcttggcttcgacaataatgtaatgcaatcggggagggagagtttctaacttctcccagccacctgccttaacctcatgcttcattcatctcggtatagactggattcctttgacaattagtcgatagtgtacattacctcatggaagcagactttgaactatgttttgcttccttttaatggtactgtttcccctcatcttttaacagtgatcttttaaaaagaagtgtgattctgttcagaatgatggtgatggctgtttgagacattttaaaactattaggtggttaatatgtggttaatattatttattcaacagaaaatggactttaagcgcatgtgaaaagcaaagcatcataattgtaaacttcttttaaaagttatacaactttatttagtttcaattttccaaaagtccagtttcccatctgagagacatgggtattggcccggctgtgggaaacctccagagaaaacaggggagctccgctactgcggaagcagagtcagtgactgtgggtggcattttctccgctgagtcaggtcctgccagccctaccccaggcttctaccaacagtgcagattttctggcaagatgcaaaacccaagtgtttgtggttcttgaagctcttctgcagtttctccttttccttggtactttgggaaattttcactttagaagatcacatcttactgtgtcttccttgtaactgttgaaaaaattgggaagtttaagtcatttattttatttttcctctcatctggcctataaagtaacttggtgttatgtgcatgtttttcaacaaacaggaaagggaagagattatatacccatgattttgaaaataatttttatacagcatacaagatttctcgatgatccctcgctttgcccagggagaaacaatagtttctccataaaagcatacatttttctcttttccccaatctattccctcaacccaagagaaaatgtagtcttgtagttaccagcctttgcatcccccatctgctcaagcaaattgaagagaagaggcaagtggttggcttctgcatctgaagaatataggtgccaaaataataaagtggacctttttgttagtcacagagacttgaggttcttgctagtattactctaatcattgtaataaacctgtgcttcattttatgcagataggtacagtctgtatattattgggaaggacttccttcctaggcttaggaatgttaggagttgaaacatttagcagccgggcgtggtggctcacgcttgtaatcccagcactttgagaggctgaggcgggtggatcacaaggtcaagagatcgagaccatcctggctaacacggtgaaaccccgtctctactaaaaatacaaaaacaaaattagccgggcgtggtggcgggcatctgtagtcccagctactcaggaggctgaggtgggagaatggcgtgaacctgggaggcggagcttgcagtgagccaagattgtgccacagcactccagcctgggtgacaaagggagactccatctcaaaaaaaaaaaaaaaaaaaaaaagaaaagaaaaatttagcaccctttcttttccttggggcttcaacaacctacacttcattttaactagatagatagtacctacatattggtgaagggctttcccatctattctagatagtacctacatattggtgaagggccttcccatctattcagttgatattatagcaaaatagtaggaaaaacattttagataatattttttatcagaaaatgaattccgttacaaacacatccctttatgaaaaaataagatttgtcagtcatttcaccaatttcagctgagagtaagtgttcaaaggatacacagatacacaggcatggtttaggcaatccttattgttaaacaaccttgcagacgcagaataatttgatagctaagagagaaaattctggagctcattcatgggttcatagacttggttccaccactcactaactttgtaaacttcagcaagttcttgggccactgtgtgcctctttttttcatctgtagattggcagtcattgtggaagagtagcttgtgaggattaaaaaaagacccatgcaaagccacgggctcagtccctggcacatgtacatgcttggtaaatggtaggtgttattgctgaggaatggattcaattaaaatattaagaaaattaatattttgatagtgatggaagactggtttaatttcctcttcatgccatagaagaggaaatgttgtttttataattacctaatgaagaatctggaagaaatgattttgcaaatgatacccttaagctcatcactgaactaacaaaataactgagatttcataagttatggaaattgaaatacctaatttaaaaagtcaagtttgcagtacatttccatggataatgcctgaagttattgaagccatcatgactacaaaatcaggcagccaggaggccaggtctacagagtctgttcagagaaggctgtctggggccacaggacagagtgcgccgtggggctggcagcatgcacttggccttgttgagttagacaacaggtgccgagccactgccaggtgtggatatcaggatgaacaaaattgctgatggcctgtcataaagctttatgttagatcataaagtgctgagcccatatgatgagagatgagttcacatagcaagggatcacttgaagtgttcacttgattttcccctccctgtctttcacacgatcttcaaattctctctttttcactcattttcattccttccctctctccctccctccctttctttcctctcccccttccagtatttttctatctatttataacctctgtctctcattcttggtattcttatttttaaacattttctaagtagaatgacggttactggaggccggaaggggttgaggttaccagaggctggaagaggttgatgagggcgggaatgaggagttgttgatcaaagggtacagatagacagagggaataggttttgagagctactgcacagcagggtggctatggtcaataataatgtatttatatttcaaaataactaagagaataaatttcaaatgtctcaccataaaaaataagagaggtgatagatatgttaattagttagatttaatcatgccacattgtatacacataacaaaatggcacattataccatataaatatatacaagtattgtttgtcaatttaaaataatattactaataatttttttaattatggggaaaagttcatcataacagttaacaaattgattaatgaaatttatcttaacaattttatgaacaccaaagcatcatcaaaataaaagtagaagaggcatttgatgaaattcagtttctattaataaaaattcttaatggactaggaatagaaatttccttaagtttatgaaatatatcaacaaaaagggttcatagtaagtgtataatggtgaaacatttggctcattccttttaaagttataaatgagataaatatgctcccatctctgctttaagtcatactgagggcctagtcaatggaacaaaatgagataaaaaaataaaatgtatataaatcacacacacaaaaatactctctatacccttccatttttcagttctcagtgtcactctagcttttatagcatcatgtgaaatccaaggtgacaatgcacacctaagaatattatcatctgcataatatatgcagtcatgggaaatgagattttgtgaagtaataattggtccatgattctggactgtcgattcatatatggatagcattcagagaataaggaaaataaattgagatgaatttgattttaattattaatttaatttggaaacataaattttgaaaaaaattaacctgataataaagtaacttagtctatataggccttgattagcatgcagtatcagtaatagtacactttgcaaaatatttcttatgaattatattttatttgtaagtatttaacctagaaagaaggatctatttgccataatgcaatgtatgttaggaattttcagattgtatttattcatgactcgtgtcctctccgagcaattacactcaattcataattgcctacactagtgaaaaaggatccttcacattaataccataaaacagcaggaactgcaatgtgagtccaggcacagcaacccccaataacaaatgagccaggaaactagcaggcaagtcccagtggaaagttgagcagaggaccctaactctgaaatgctactggcacttttgatgtcggtcctagaaatactctgattatttttctggtactagctggaaataattatattgttaggtaagcaaataaaggccctctaattagcaaacttgaaatttacattaaattatgaaattcccagggcccagtactctgccaggtactaaggataccccgacacaaggcacagacctgccctcaaggagcgcagccttgtgtggaacagaggcaggcacacagtggcattgcagcatgcagaactacgacaggactgcaggaaagacgagtttaaataaagaaagccactggaatgatgtcagtgtgtttgcagcagaagccttgagaaactgcctcagaattttgaagcacatttatttttaagcacctgaagctcttatcaaacagtcctatcaaactttctttcatcagacacctacccaagtcaactgaacgtaaaatccaccacttattataaattcacatattaggtgagtggtaatgagataacagctacagaggataaatggattcaattctctccatctctacaagtaatctataatgtgacaggagagataaaaggtagaaacttactttgggaggccgaggcgggcagatcacgaggtcaggagatcgagaccatgctggctaacacggtgaaaccccgtctctactaaaaatacaaaaaattaacctggcgtggtggcgggcgcctgtagtcccagctactcgggaagctgaggcgggagaatggcctgaacctggaaggcggagcttgcagtgagccgagatcgccccactgcactccagcctgggcgacagagcgagaaaaaaaaaaaaaagaggtagaaacttatttgcagaaaagaaacaattatttgcattttaagtttactgctgtgagttttggagatttagtctgtgagactttcttaatgcatgatgtagttgttggtagatagaggtttgttctctgaccatttgacaacatcctgaaactctaacaacttctacctccaggtcaactgttgaacctgcaaggagccttttccccagatctctgacttccagtcggcctttctgcctcttgttcactagagagtacatcctggtttcctgtccttatgctaagtctgatgaaaccccaggatgtctgtctgctggcttaactggccctggatcagcaactgtcccctgaccagcaaccatctacccattatacctttcactgcctctgttaagcagaaggtttgccagtatatgaaccaatacagtgaaaacactaatattgcattagccaagtcccaggagagattttacatggaaagggagaagtaatatacaagtaagactagagaccaagactgctcaccttttacagacctggcaaacctgactaaaacgcgagagaggtttggttttcaagggggaacatttggattcctagccactagcttttgcttagtctgcctgagcctctccattgtatatcatcaggctgtccttaccattagtcccctgtaggacacctatccagaaaagttaaccaatttgtagcaacattctactgtcagatatcctactagttgccaaggatggaaagtcgtcaggagacttcctgtctgcaagaatcttataatctagaaaatgatataaaagcagaaaacagatagcaacaatatgaaataactgttcattatatagttctaaggaagaataaaagagacattaattctattaactctctcttccacgtgattttttccttttataatttaagtttatgtacgaggatgggggatggtggggttgaggggcagatgttgctaagggtagaatcagtgtatatgtacagtatgtatacaaacctaataagtgccctctatgtgtttttagatttcattgtaattccattttaaataagaacttctgttgctacagccttgaattccattattctttcatcgacaataacaacatttattgagtgtcatccatgtgctgggaacattcaagatgctgtggatacagaggtgaaaaagacaaagattctgctctcatagaacttcgttctaacacactgaaactcttctctccccaggcagccacaggcggctgtgacttacgtattgtgttcccacaatcccagtgacgctctgcactcctgatacttcacttttctctaatcagaacaatatgggtattgagcagtatgtgttaacagttgtcaatggcagtctctgggatggcatatcacaagctcaggcaaaaccctcaattagcatctaagtgtgtttgttcttcacagggcatattaactggggagatagactataagagaccctccctgctcattgctgtcagatcactatagaataaccaaaaccaaagtgaaaattttcaagagtgaatgacttatagccactccttgaagagcaggctggtttattaggaagagggagaaatcaattttaaaaagatttgaatgtcacgtattatgtgggaagaagttgaggataccataaatgaaatctgtgttcacaatccagaattggtccttgaaaaatctctctgcctgctatttaagaaattgaagaatagaaataacttgcagtatttttggtgctgtcccaaattgaaaactgttattggtgatgttggtcctgtgacttaagacatgacaaccacaacatagagaatgttccccatcaggacaagggccagcccaggagaaaagtgggccagggtcaagcccattagatgtctttacctctcttaagcctggctgtcaactgaacgtaaattccaccactttaggttgggagacaaggaattaaaggaaacagctcaatctttatcttgggagttcctgactgtctcagaaatgaggaatttgatatcttaagttctcaggtatgattaaaatagtcatgacataagtcaatcagttgccaacctcaagactttattttgcaatgccttatggaaagttctgtgtatactctgcttttctgataagctggtaataaactggagatcccaactgacagatattctgtaaagtacatcaagggtaatgccttgtttcggaggggagacgtagaaatagagaagagaatgcacaaaggtgtctattgcagtaagttttgttctcaacatgtttgtgtcttcctggcagtaacagagcagcagcagccacagatggcttggaagcccatcatgccccagactctgagcaggtctaaacacagagaaatcccaccatttgtgaaccagttacaatagtctgtgtcacctcctccattccctcagctcccacagggatgtcctgtgccgcaatcttgaagtcattccagatattgctttaacctaccagaacttgtactccttacattttgaggtaataatcttattaaaacaaataaatagtactgtcactctacaagaccacccaactcatttgaattagtgtctgtcactgttagaaagtatgactgtcaagtttgtttgcttattcatttatccagtgaaccataactgagaatcttggttgagtccacacatattacccaagccctgtgttagggaccagagatgcccatttttcacagaactcactacctggtggtgaagcagacatgttaaaaaataaattacagtataacataccacatataaaaaagaggtcaaggactgtacaggtacagaaaagggagttcctgagtgccttctacaagcgttaggaaaaagcttcaccaagtaagtgagggcattaggtaatagggtgtcctaggacaattaaggtttgtgtaactgagaggaggagtaaataaggatattctaggaaggatggaatggcgtatatcaaagcagtgtttctaaaggattgagctgacttgccaaatgacatgaaatttcccccttggccaaaacccagcgatatagtttggctgtatcctgacccaaatctcaccttgaattgttacagtccccacatgtcatgggagggacccagtgggaagtaattaaatcttggggatggatcattcccatgctggtctcatgatagtgaataagtcttatgagatgtgatggttttataaatgggggttcccccgcacaagctctcttgcctgccgccatgtaggacatgcctttgcttctcctctgccttctgccatgattctgaggcctccccagccatgtgaaactgtgaagccattaaacctatttttctttataaattactcagtcttggtatgtctttattagcagtgtgagaacaagctaatacacacagtaggctggagaaaagaggaaatgagcctagaggcaggtggagggttttcaaggagaacagccatccaattagatgtgcattttaattagaccctgccagaagtatgaaggaagattgactggaaggtgggagtccaaaaacaaacagacaaaacacagaagaccaaatagaaagaataacgataggtgagtcaagaaattacggaatcaagggtgatttctgagttttcagcttgaacaagtacattgtgacatttgctaggaagggaaagatgggagagaaatggatgaaggggtaggctggaatccagaaaataaatgggaaaagaaatgatatagtagaagagatcgtgggaaatcctgtagaaatgaggaaatgtggtgactcaaaagatagctcagaagtgactggtgaatgcaaagatgtaggatataagctactcgcatttcaaatgactaatcacgcatagactcaaattgaataaaaaggcatttacaactaggaaataaaaataatgatttgacttattttgatgacccaggataacatctacatcttttgttaaaataagtcattaatggtttatgaaagatgctccaacatgttatttgtaaagcatcagtgcctcaagatacagcctttttgtccctgtaaccaacccatttgcaagtaaaatgccatagtctaaaatgtttagtatgtgaagttacaattattatacattttatactttcaaaaaacctgttctctgatcttatattaatttactcctttcctctctcaacctttgtttaatttatagttctgtcttgtcttttccttcctcatttaagaaatcactaacattgcccattcttcaaaacaacctacaacttgattctttgcattccagcctttcttttcttaacttgcattataaagattattaggataggctggacacagtggcccatgcccataatcctagcactttaggaggcttaggtgggtggattacatgaggtcaagagttcaagaccagcctggacaacattgtgagaccccatctctaccaaaaactacaaaaattagccagacttgatggcacacacctgtaattccagctacttgggagactgaagtgggaagatcacttgaacccaggaggcagaggttgcagtgagctgagatcatgccgctgcactccagcctgggtgacagagcaagactctgtctaacaacaacaacaactatagctatagatatagatatataggattaactgcatatcctatcatgcatttcaattattatatattaaatgttctctctttagtatttcacttcacatctctgctggattgaggatctcagggagtgttttacagctaacgtgtgccagacttccccatctcagtcccattctaggccaactcatgatgcatgccctgtccgggttccaatagaggtttggcggaagaatccttacaaacaccaaatccttgatctgtcctgaggaagcctgaatcatctgattggccccagaatcaccctgattttccatgaattccctcaggcaaatgttggcccagaataagaccaatgtaaaagcccaggagaatagtggagcagtagactagcatccaagaatgggggaaaatgatgaactttgcccaagaatttgaaagcatgcttaattcagatttatagtatctgactcacattcacaaatttccctgtgctctttcctacaaaggttttgtttttcctttgctaacctttaccttctgcctaaaatatcactcccttttttctctttccatgctgaaaattctgtgccctctttcagctacacttttgatcactgagattatatgcttatgactttctggcattaaaagatttcactgactgctcagtttttctgagggtgtctatttagactagtacccctaaattttaagcgttcaataatgtaaaatttgtgagttataatgtttcatacatagtacaaatcacacctacattgcactgctttctaacttaaaaactgtacatttcaaaaagtagtaaatttgggagttattaagagggaataaaaacattgagttttaacgtagtgtgaaatggtagtaataaatggaaaaaaaagagattgcagttgcaaaatactgcactgagactaatcttcctccctctaacatttgaacattcttttctgttctgttcatctattcatttcagtttgtcatgaatgctgcaaatatctagtaagttccgaccacttgccaggccttgtgctaagttctggtgatacgagatgacaaataaactattcctaacctctagtagctcatagtagcaggaagaaaaacacatacataaacaaatcatctttatcaaatgtccagaaaaatcatcttagcatccagaggaccactggcagcacctgacatatagtagcagttagtaaatatgtatcaaggggtctggaccctactacagcctttgcctccagccagccagacagccttggtcaagtcaagaaacctccacatacattaacattgaagtggaaatgtgtgttccattcattcatctagcatttattgagcaactacagtaggtcagactgctctctggtgaaactccaaagtgaataaagcaaagtgctttgttaaggacctctcaatctagcagaggggaaaaagcacataaaggatcaataatgtatgattaagactatagtgggaaaatgtgtagaataaaatgagtgcctgaatgaaggagaaactgattcagcctgagcgatcagaaagtctaaagagaggagacaatgtgtcagctgctctttgaaggaggaacagatattggtgggctcattcctgaaggagagcccagcttgagaagggatgcagaaggaaaggcatgcagcgtttgcaccattattcctcacccactgtgggcatgaggaagggccggatgatgcttggcggtctcatccagactagagtatcaataattagcaccatttgaatgtttatgtcaaataatttgtggcccttaagacagagttggtggatgtttccttgtgttcaatacatgaaaaggctttcaaatctttaattagtgtgtcttttatttccattatttgaagatgaaaatgattcagtcaaaaaaatttcagctccaatattaagattatcttttgaggaagcatataaaaataaaaacaatgacaatatccaaccccatccaccccttccccagtagaagttgatatctggctagaatgagcattaataaataacctagagaaatacagtattgtacagttttatattttcaactttttattaaaatttttaccacaagtgaataatttttgttaaaatctaactttttgtactctgtattggatatgatttgcttgcctaattaaagtctacctgctgattatactagatttaatatattaatgtgtcttcatttctagaataagaacaaagaaaagggactatggtactacagggagagatagtatagacaatgcttacagttttattaaaacctgtggagaaatttcttggcatctaatcttccctcagcctaaggcaaaaaccatacaatgttataagtcaggtcagagctttttagttttaaatttggctgctttcctaacacataagcgtacaaaacagtatctggcacatggtaggttttcaataattgtttgccgaataaattttaaatgaagtaaggcactgggcacagtcctcaaagcacctctctgtagatactaaagggtcaggaaacagcagcagcgtgagtaccagcacaccaatatggaaacactttcaggaaatattcttagaaactcaatttataggcagtattcatttcaactgcacttcctattcctacatgaatttactactttctaaagattattcagcttgttaagagtagatacttatcttcataaagctgtgaacgacaagcaaaaaaatgattcaggatcagaggaaaggaaactaccttttctaagttgatgcttttttttcttggtttttgtgtgaacatgacattgatgcaactaatagtaataattcctgcatgtgttcttgacacatcaaccctctgaagtaaagatcacactacctatgcaacaaagtgtgattacttggatttttaacaaaggttaataggagtaatttgggggtttctccaggtttctctgcatgtagaatgggcaggcacaggaaaaggatgatgatgaaaatatacattcttgaggactgagactgcagacatgtaaagaaattgagtggttgaaagcttttagtctgtgatggtggttctctgaaaaaaagctgaattttacttaaatagcattaatataaaaatacagcttcatataatcgaaaaaggtcaataatttacttatttctttttactaacgagataatttttgaaagaataaaaggaaaaaattttttaaataacaaaatagtatttaagaagggaaaaatcagttttaatcactgcataagaaaaggattttctagttgataacgtaatgcctaaaacaagaaatgagagctccatgtagcattctttttcatttatattcctttcagtaacgaaatagaatctgttcccctaatgaaattctatttcattagaatttttgaagcacctgtcacctatcatcatcagtttgtacgtatttcaagtttttccgatgagcaaatggaataatgcagggtccatatgtccacatgtctgggaggaaagattccacgtggtttttggattacctgtctggactctttctcccatttattgcttggaatatgtcaccttctgtcaatctaattactcctctaggaaacggctgttctcagctcacagtatgacaatcgctgtcttgtgaaaatatcccagaagcctctgtagttgatggatctacctcaacagtgtcactctgacgtggaaagctgacttcagtatacaggcttgctcaagatttacttgagttctctgaggaaagagtttcttcagatacgtaaggagagaagctggtggttttaggagatctcttgccttatcttgacatacatgaataaatcttttcaaaacgtagtcagtcagctgagagacagtatatacatttaggacttccagcccctgtaaaagaatgacaattgaagtacctacattacctgaccagtgacacttgtaaaagatcagagaagctttcaaaggccaacagcagagattttgattttgctagaaaagggcccgaaggaataatgcttatttatccatttagtcagccctttcgttcatatcgactattcattactgtgataaagacagacttggctgaatctaacagaaattcttttgttatcattaaacagctgtagatttttaatataataaagataaaactgctcttatagttccacattcacactatgatattcaagtttgtgccatcacttccattttcagagctttataattccaccataatcatttgttcttggcagaaatgtgttatacaagcactcagctgaggataatatttttgaacatttttttcaatgttctttctggttatgtgattatgggaatttggaactcaatattaatttgctcttcagctttgtgtttgtatatctcaaaatgctcttttttaaataacacaatttaacttgaatcattacttagattcgggtgatattcatagcaagataatgcagtcagatacaagaagaatgtattgggagaaaatgagccacatttttccttctcatcactgccatttcctttgtgactccatgccacctgccttgtttgtttaatagtttatataattcttcaggtacaaagtgagccactgacctaattggtttttttcattcataaactgatgtgttttattgaccaatatgcattccaactcttgactaaaatttgacatctaagaaaatcaatattttagctctattttcatacttgaaattttccctcagcctaattttttaaaatttctacttctttttttttttttttttttttttgagatggagtctcactctgttgcccaggctgaagtgcagtggtgtgatctcggctcactgcaatctctggctcccgggttcaagtgattttcctgtgtcagcctcccaagtagctgcaattacaggcgtgcgccaccatgcctggcttattttttgtatttttggtagagacaggtttcaccatgctggccaggcttggctcaaactcctgacctcgtgatcggcctgcctcggcctcccaaagtgctgggattacaggcgagagccaccacgcctggacaatttctacttcatttatttcagtgtccagtgtactaactatagttacatatgagtgagagagatctagtctgcactcatcacttcacacgggtgggaaaacgggcaggggaaagtcaggccccacactgtctccaggcaggaggcaaatactcgttgactgaccttggaccatcatgcttggccatatgggtttgagacctggcataggtttacctaatctcttcatggaagacttgtgagagataatgggttaatatttgtggagatctttcaacaaagtgtaattgatgtttgaatttttataaaccaaacacaatatctaccccctgaaagctttgtgagaatatttagcacacatgtatgtgccagatggattgtaatgacagttgataggcctctcctcacccttgcattctgttgtcagaaatctgcatatcaaaacaactataatttttacaataagatttattggttaaaagatttgggtgcacactgaaaaatctactgcctggataagactataaattaacattatggaaggctttaaattaaaggtttatataagaaaattattggcagggtgccatggctcatgcctgtaatcccagcattttgggaagctgaggcaggagcatcccttgagtctaggagttcaagagcagcctggacaacataatgagaccctgattctacaaaaataatttttaaccaggtgtggtggcacacacctgtagtaccaactgcccaggaggctgagttggaaggattgtctgggcctacaatgtggaggctgcagtaagctatgaccacgccacactgcattccagcctgggcaacagagcaagactctgactcaaaaaaaaaaaaaagaaagaaagaatatttttaacatgtcttatagataacttttgaaaaatatcaaataatattttcttgatctgacatatttttctctatacaaatgaattctaatgaaaaatatgtggaatataatgcaaaaacaatcagaaagtattcttaaaagctcaaagatatgcagagatcaaagcagaaacacatcataatacaatagttatcagccagaagaatgtttttgtggttgagataataagaaaagagtatgaagcacaggaagttaagttagtaaataaaattattattctaatgtattgtgatgttctttatagtattactgtagaaagtctctaaaagtacttgttatgagtgaaaaatgatgcctgtagatccaagataaggggacaggtggccccaccaattataaattccccaagattgtaaatgtatattttatcatgctgtgtcaaaatattcattttaatattcaaacattttaccacataataagctgtaaccatatgtttatttgttatattataccactataacattaataaatatttacagagccactgtgtatcccagatatattagaaatcatagctttcttgattttttattttaagtgaaaatattcagtgcctcagaaactaattttaaataatgttacatttgttacacattgataagagccaaggagtttagatttttaagactgacacccccctttttaactcatgttgttttatttattttccccaattgcatgaattaaagatggggtgttatctcagctttgaattccttagcttgatgtcacagcttttgctttatttgtatgtgaattctgtctttaataaagatgagctctgctgaactttccattaatgagagacacttaggtatgcatctctttataacggatcttggtggtaccaggaaaattcagaaatgttgctagtctattaataattaacatgacaaactatgattaatcagaagttttatgatctctaaaaacataacattatctctgtaaatcgaattgtatacaattaagttgacaaccgttagtaaaaaaaaataataataataaagcaggccaggttgtggtggctcagcctgtaatcccagcactttgggaggctgaggcaggcagatcacatgaggcaaggaatttgagaccaacctggccaacatggagaaacccattccctactaaatatacagaaattagctgggcatggtgatgtacccagccactcaggaggctgaggcaggagaatcacttgaacccagaaggcagaggttgtagtgagccaagatcactccactatactccagcctgggcgacagagcaaaatcctgtctcaaatttaaaaaaccaagtaaaactcaagactcctaacttatactttttctgttacaatgttacattagtatttattcttctgtgacagctgagactagaccagacccacatccaggagacaggaggttcaagatgaggcactgactttttactttcatgtgtcagtctcagggtgattcctactcagctgaaaaactaggaggaacccttgctagtttggtagttattgacttggttacctgttttcagtgttcttcgtcttccttactcagctcagctgttttcacttttctttccacctgtgtttaggaagagaccttctcagtattataaattttgataagattttcacatatatagaaccctaacaaacaaaagtagttctccatataagcacagcgtctgagcattcttcaccgatgcttggtggggatattagctgtgttctcttacaccctttagctgtcaagtacatcagaagtggaggctgtggggacaggacaccactaatgccaaccattagtttaaattcacacttggatctgtttccaacatttctgcttttgtcatcatcacaggttcggaaatcattgtgtaatgtcctgatttctgatttttctgtgggaagagagtgttgcaatttgccaccttaattgtattctgctgtaattgtctctcactagatatttgaagcacgtaagaattctgtatcatgaaacttgagtccttataccctctgttcattgactgaatttagttgcaagaggaatctttcgcttttatttttttaaactgctgatgagcactcgattgaaatgactcagctttcatctgtggtttctcttccctaatagaataaagcatatgtaataacctgaaatactggacagcttgaacttctttaatgcccctgaatgtctcttacagcctttgtctaggtttgaactttccaaattatgtatttcagacgttgagaaagaagggccttaatggctgtgacagcccagaccccgatgcggacgattccgtaggtcacagccctgagtctgaggacaagtacaggaaaattaacgaagatattgatctaatgatcagcaggcaaagattgtgtgtaagtactcagaacacccttcattttttttactcttgatatttctctgaacctggcaggcattgaacaagaaagaaaacaaaggctgtgaaagccccgatcccgactcctcttatgcactcaccccacgcactgaagaaaaatacaaaaaaattaatgaagaatttgataatatgatcaagagtcataaaattcctgtaagtaccaaaggtagatggctggtctgctgataactgctgcagtaacataccttaaccctctcagtgatggctttctctaagactcttcggaaagtcaaacagataaatagccatctcatcccacgggcagctcatttagaaagcaaaccctaaaggatgctgagattatgtaatctaacagagttgccatcgaaaagttcattctgaggtagaacagttcacagcaggaagagaaagatttatgagacacaccgtaaatttacacaatcttttaaacacacagtccatgcaaatcacaatacatgagtaaaacactggaacctccttccaagcaagtttgagaattgctataaaatacatagattatacattgtttgctaagagcagatactcaagtgggtcagcaattctttcatgtaaactgacaatcatcacctaaataaaagctgatttctgaataaaacttcagcccctctccctatacatgaaattcaacaacagcactgaagggttaaagctaatgctcgctgcagggaacagactgcatgaaacctaatggtaagatttcaacatgtttgtgtgctggggtgattttaaagctttatcagaatattatccgctttgccaccaacattttccatgctttaacatttggctaatttttgttttaaccaaatgaaaaaaattctaacagtcaatcatatgccttgccagatatttaagagaaataactgcatgtattattttgttgtccacatatataggaggaaagtacatactttttattagattctgtcatcaatcaaataatgttaattttgtggcttaaaggggtgaaacccaaggctcacataccttctaaataactaatgttagtgtctgaaccttaattgtatacaagctcctcagtaggcaatcagttccttttgaaaaaagttcattttttgtaagttagcaaaacagcctaaacctgagaaatgagagagactgaagtgaaaatatgttttggtgattacaagtgcagatatgtggggacaaagttcgaggccaaattcacaactgcactcacaagataaattaatactttaccatagtagctgcacactcaaacctgaattgaattaaattgaacactttaaaacttatttacaaaatgtgtgcatattaaaatttctatccttataaatacctatctgcttcttttgttaaatgaaatgtcagcagtagaacttttgttgaatcagaattattaatacactgtatcatgaaggaaagctaagtgctgtaaattcttaagggtttcataaaactgactattatatgcgcacattcatagtgggcactttatgaaatggagtatttagtattatatgtagccatgcatacttgttatgtccagaattattaaataataaaatatccattggtattttattttgcctagaagaaaaaaagaagcggctcatttgggccaatttttatttttatttatttatttttatttttgagacggagtttcactcttgttgcccaggctggagtgcaatggcacgatctccactcaccgcaacctctgcttcccaggttcaagcaattctcctgcctcagcctcccgaatagctaggattacaagcatgtgccaccactcccggctaattttgtatttttagcagagatggaatttctccatgttggtcaggctggtctcaaactcctgaccttaggtgatccacccgcctgggcctcccaaggtgctgggattacaggcgtgagccactgcgccacgccatttgggccaatttttagttcttatgatctgagtttatcttgctatataatacattggtgtggagcagctgtgcattaaggtttgtaagtgtaggatgttaaggcggagtaccttaggtgtgtcagatagtaagaatcccctgcacagttggaataaagacagatgtatgcagtactgctgatcactcaatggaagcgatcatataggtggagttttaacccctaaagttctggaagaatgcacattggatcttgtttctcatactttagggagagagacatgtaatacacacctgtattccctcacaggatttcagcctgttacgtaaagagttcaagatcaagatacgtgatttcttaaggggtgcagtggtgtgtggtaggggctgaaaaaccacattagagtttacgggcagagctgtgagaaggagccacccagctccgagctatgccacagagtctccatctctttagtaagtgcttcagtcttcacgatgaaaagcccagtttttgcacatcgctctgagttgctggaagtcaattttgttgaaagtttccacagctgctaaaacatttacagcagggcaaggacactctgccctttgtatgtagagagtgtctccacctctttaaaaacattacaagactgtttttctatttcgaagacccagtttgaagagtttcccttttaaaacagaaaatttaatattgcagtcacctgttagcatattgtaatttatgcccatattcctcaattacataaaataattcatgggtgatttggaactgtgtcgagcagcatttcctcatgctgggttcgccatggttcatgctgggcttcacagcaagagaaaacacctccgtctgaggaaccagcagaagttaggaaaggggctgaatgaatgagaggcgggtgcaagttggttgagagtaaaagggaagggaggaagtggaaagaaacagtatgtattttcttcaaaataatgggctgtgaagagagagaaataatgttgtatgtaggatcaagggaggagttaaaatgaaagcgcttgagattatttacatgcagaggagaagtgcttggaggaaggaaaagattgaacatacaggtacaatggagatagaatggcaaagcctctcaaggaagggaaggaggatgggacctaaacaagaaggtgttacagatggagccaggtgtagctaaggtggtagctgggtagaattacgctgagtaggtgaccatataatgacctctattttattttatttttattttttattttttgagacggggtctcaccccgtgcctcaggatggagtgcaacggcgtgatcctggctcccctcaacctccgcctcccatgttcaagtgattctcctgccttagcctcccaagtagctgggactacaggtgcctgccaccaggtctggctagtttttgtatttttagtagagatggagtttcaccatgttggccaggctgttctggaactcctgacctcaagtgatccgcccgtctcggcctcccaaagtgctggtatcacaggtgtgagcctccatgcctggctattttgttttttaatgtatttagtttagcttctgtagttaattagggaagggggaagcaggtgattgaaaaaggaccgagaagttagacatcatgaggaataggagttggagagggaatgaacaagtccatgatagacttgtcaggcagccttgagggaatttagataaccagcattggtactcacaagtcatcagagttgtatgattttttttttcctctactacagcccagcagctggtaatggttaatcaaaatttaaaggtgtcattagtggcaaaaaaagggtggggggaagattcagttcaatcactcacattaaataaaagagggcccattaactaaaaatattttactttaactattttatttgatttttttattggacttttccttgtggtaagtttgggaaaatagtgggttttggatgagagttcagatacttttctgattatgactcactacagtaaccgtgatcactttgttcagggatagaaactaaaagttttttagctgtcatgtctgtgtccttcaaagctgggaccggcttcatgggccctcgacttggccctgttctcatagggctgcacttggttaaatactctgctgtcattgtcttgaagttcttaatacttttttaaaaagggcccccacattttcattttgcactgggccctgcaaattacatagccagttctgctgacagcatttcatttaatcaccccaaattctctctttcttcctatcttgagtgtttgtaaaaggtggagcctggccctgaagtctttgcaagtttggtgtttttaactactttttggctttcattttttagacaaaaaaaaaaattgtttaaatgtagatgctttcaagtttcctaattttgaaaagtcaaggagaaaaagaataatgccaatttcttagaaatatttatatgtgattatagcatttgcattccctaaaatgtttagagcagcttcatctcttcatagatacaaccatttcatgccttagataagaaaatcaaggtcaagggagattaaatgacctgcctggttagatggcaatttattacataacctggactgtaactgagattcctgatagaaaggctagtgtttattctgattctctaaaatatcttctcagtgtgctcatttttaagcttataatttgctttcaaaattattatagatagttcctttaactcagaaacagaaaatctaataccgtatgttctcacttagaagtgggagctaaacaatgggtacacatggacataaagatggaaataatagacactggggactccaaaaggggggaaggtagcagggcggggtgaagtttgaaaaattagctcttaggtacaatgttcactatttgggtaatgggtacactagaaatccagtccccaccagtatgcaatatatccatgtaacaaacatgcacatgtatctaaaataaaattaaattttaaaaaattattataggtagttcttgatacaggtaaagcaaaagattaatagaatacaaatgatcttggtatattttatgaattttgaaattttcaactatactctgataccataattatatttgactgcttagccaatcacaaagtagttttataataatcattatcatccagttgtttctgatccagaattctagaagctgaagaattaattcttggggataatagtcagaggaaggaaggagtagaatgactttcactgacctgcttgtttggatggttctgaactcattacataattattaataatcctctttattttggatgtgcatataatcacccaagggtgaggggatatgggctttgctctctaatgagacacaaccaacattctatagcatattcagggaagatatagttttatagcagatccttagatacctattaacagttaaacatttataagtagtaacagtgaattcaaattaaaacatttgtagcccagagatggctttaaatacaaactctaagcaaatatggaaaaggggagtctttaagatttattttttcctaaaacctgagacactccagtgtagatactcacccacatttcatgagaacccatttagtttattatttacatggtccaaagataataaactgctaatatctagcccttattcacttaacagaatgatttctgactacagtattttatttctatccaaaaacttatactgtgttgcatagtgtttggtagcaaaagcaacagactcagtcactagttagatgactttgggtcacttacttaacttaccaatttgaaaaggaaagaattatatctatggtcaagggatgtttaaaaggttaaatcatatcatgtatgtcaactatacagcacagtgcctgctcaataagtaatatacagtaaatagaagctttacttttgtgtcagtagagtgtcttcctaaaaattctcctttgaagaaaaatattaagttcgtataataagaagtagagtaggctctgcattgcctcacagcaaaagggcactatttaaccaacatcataaatgattttataaccaaggagaaagaagagcaggagaaagagatcaggatatgggcaaggggcaggacaaattgcaggattaaatagggtggtcagcgtgggcttccaagagaaggccagattttgagcagagacttgaaggaggtgatgcagttcgtcatggaaatgaggcagggaggcagaaggtgttaggcgatgagataacggaggttggcaaaagctagagcttaatagggcctgtggacccttggaagaaaaaaattctcatcttgagtttttattctaagatgagagccctcacagggttttgagcagaggagtgttggcatgacttaagcttttaaagggtcaatctaatttctggtttgaaaatataaaggatggcaaggaccggagcaggtaaatctgttaggacgtgactgcagttatctaggcaagagatggcactgcttgagccagtgtaatagtcacaccctccagtcattttgatacccaaagatagtccaacagatttccaaaatgctccctaaggagacagtcccacccctgtagagtaccagtgttctagatctagagagttactattatggcccaaggttgcagcaggaaacagatggcaaactctaaagggtaattgaagacagtttgttaaaaggactgtttacagatgggtagagttaaggaaaacctgagagaataatgaagtacattagggcttgcaacctagaagctgttcctatctctagatctgaaagagtaagtggaggggaaaagtaccagatcacagcaagatctatgtgtataggagagaacaactcaaaaagagatggggtcttcgctagagaaacgcagcctcagccagcctgtggcccagcaaggatgatgccactataaaaaaataccctgactttgctcccctcctgctctctgtgctgttgctggtgcctcccccactgaccagtgggaagccagagggcaggagagcctggttgatgcagtctggagggtcagctcctgggcacacagtacagtgaaggggctagagggtgggtctggatggagcaagtggagaatatacctagtagaatcactttactttgttttcttgggtatgctagagcaatccttatttggccttttaatgaagaaatacaatattttattcatgctatagacttcgactttacagcatatgctgattttttgttgttaaaagggggctggacatgtaaggctaaattcattatttgatgtcttatcaaacatttatattccattatgtcatgatgtctatccaaaaattatttcccctgtttactgtagataaatcctaataaagactgaccatattacttatatcacttgaacatttttatttccctctaaaacaatgacagattgggccagatgtggtagctcacacctataatcccagtactttgggaggccgaggtgggcggatcacctgcgctcaggagttcaagaccagcctgggcaacatggcaaaaccccatctctactaaaaatacaaaaaaatagctgggcgtggtggcacatgccaaccactacttgggaggcagaggcagcagaatcacttgaaccagataggcagaggttgcagtgagcagagatggcaccactgcactccagcctaagcaacagagtgagactgtgtctaaaaataataatataataataaaagtaaatatgaaataaaatacaaatgaaaaatcaaagatgtgtgaaagaaaagagttttgaatgtaaagcatttgctgttgtcaagattgacatgtccagaacatggaagaaaagaaaaatgggaaattaataataagggagcataaacataaacaaagaaaagtattgtgatcatcaccaagataaacagagaaatattacacagaaagatgtatgatgcaggccagccaaccaaacagtaacagaaagtggatgtcagcactaagggcaaacaatagtaaaaacaaaatgggaccaaaaaaaacaaccaactgagcctcaagcacatatgcatttaaatttgcacaataacttattgagaacccccaagggaatgccttaatgccttctataaatcctattccatatatatgtccattttatattaagaatgccatatgctttgataccatatgagttctctggcattatattcaaagagtatttttactcgtaatgcttaaaaaaaagtagctacaattatgttcctatgttcatctagttagtacagcagaaacataaacatgattttgcttaaattgacaaaataattactcaaaaatcaatcattgaaacctggattaatctaattagacatccacacagcttcagttcactaaatatttgccaactttcacaattgagatacaggtcttgccatttgtcagtggcggtacacaccaaaatatgaagcatagtgttttctgaattaccacttcaaaatgtgaattattgaatgatacatgctctgttgaatcttgtatgttaaaatgcctattatctttagagttacttttaaaacatagactttaaaaaatgataattaaggtatatgtgctatgcacatgcttggagatgattttctatcattaaacttctacataaatatgcttcaataagcaattaaatcaaaggcttcggtttgcattttaatcctttttctctgtgaagtcatcacaatcaggcacctttgatcttgcagtcatttctggcaccagattcagatatcacaaatgaacaattactacttaatagaatggaatccaaagacaatggagtctaatgaaatggggctttgttttaaacaaaagtgaaacgttttttaatggttgcaaagaaggagttctaagcacatttaagaaatcaatttatgatctgaacgtcttgagggctcttcttaatggtcttctagacacaaagtagtttggaatgtagaatttttcttggaaaaataagggctgtctgtcttgaagagcttctgttattaattcttttcttttacctttgttttgttttctgttcctgcaggctgttccacctcccaacttcgagatgccagtctccatcccagtgtccagccacaacagtttggtgtacagcaaccctgtcagctcactgggaaaccccaacctattgccactggctcacccttctctgcagaggaatagtatgtctcctggtgtaacacatcgacctccaagtgcaggtaacacaggtatgtcctcataaggatgtaatgctaacaaatagttggaaggaaccattttcggcaaagccaacactgctttatctacgagatgttttctggttttccacttactctccttcatggcttaccatccacccccgagctaggtctcctgcatgatagagcctaaattctttagtatgtttttcgaaatctttcataatctgccgtttatctttttcattctgtcacctatctcctcctgtggctatattttaaccacatactctcaaacaggatgtcagatatcctttctccacacttttacttctgctcgtcctccctgcctaaaatgccattttccctcttcctcctggccaagctaccacttctgtgaaaccttcccctgtgttctgtgatagtatttatcccatttagttatttattatttgggtcaatttttttttatttatacagtaacttatcccacaaaggacttaggcagaaaggaaatatgataagatagcatcatttgtaagacatgtgaaataaaaacaaagctgaatcagaaatgaagttaattaaacacatgtacacctgccacaaatttgtctctgcacttttacttgctgttgttcaattcacagtgtccaagagaaaaataaattatttctcagaaaaagttcatccattcttagtacttagaacaatcaaaatacattatgatgaattgtatttaatatatgtctattttgatactggatttaaagaacatttaagggaagaatgttctcttgatttgctaaactaacagtaggaaccaagtcaatgcgtattgaatataacaaaattattcctttatgtttccagaagcagcatcaaaaataattgtatttctaagtcacatacagcaaaccattatatatttgcatttcatatttttaaaagtactctataggaaatttttaatgtatcctacatacacatagctgtatgaaaatagtttattcatggaggaattttcctgtagaatacttatatatctgccttacaattaaaaccaaacatgtattactatttttgttacagaagctttatatagaaaatacaattaaattcatccaaataaaaaattttaatcttgagtctgggaaatgtatacaaaggacttcattgagccattctcttgacttttgaatatatttgaaaattttcgtatgaattttcagtaaccacatgtattcctttcagatcatactagaatgcagttcactttcctatttgataaactcatgctcatttttttgaatttgatacggtatttccaaaatattatctgattggaaataataaacatttgcttaaactgtaacgaaggccagatgcagtgggtcacgcctgtaatctcaacactttaggaggctgaggtgggaggattgcttgagcccaggaattcaagaccagcctgggcaacatagagaaaccccatctctacaaacattttttttttaaattaactaggtacagtggcttgtgtatgtgttcccggctactcgagaggctggggtgggaggaccacttgagcctgggaggttgaggctgcagtgagccatattactgccactatactccagcctgggcaacagagcaagctctgtctcaaaaaaaaaaaaaaatcgtgtatatatatgtatatatataaacaaacattttcttttaattccaaaacctgaaccaactaataattacagagtatcacttagaggcaattagaaaatctagatgatattctcactattattcttttggctgaatgttgtttttttcaaaactaaaagtaatttttttttttttgagacggagtctcgctgtgttgcccaggctggagtgcagtggcaccatctcggctcactgcaagctctgcctcccaggttcacgccattctcctgcctcagcctcccgagtagctgggaccacaggcacccgccaccacgcccggctaattttttgtatttttagtagagacagggtttcaccgtgttagccaggatggtctctatctcctgacctcgtgatccgcccacctgggcctcccaaagtgctgggattacaggcatgagccaccgcgccaggcccaaaactaaaagtaatttttatgttcaataccttattgaaacatcttgactctcataaataaacattgccaaattttaacatactgtctaaagttagcaatgaataagcatatgtttcttaatctgtggccggtgaaaaatttgttatattgtgtcagtcaataagattttagtagtaaatgtgggtagattcatgaaacgatcaaatttctggacaattaacattgcacaaaattaatggcataaaacatatttacaaagaactaaacatcaaatgtgaggtcatctgagcatatagtagaccttactctttctttcactttctataaaacatctgcttagggaaaacctagacttagaaataataaaaatgcagagaccaaagactggatttttttaaatgtaactttcttagaaaaaagattctgcaaaatgtcagtgattgaatgtatttttaacgtttgagcacagcatggcacaataaaacaaatgtcagccatctgacttgggttgtactttacaagtttatgactattgcaagaggacaaaatactgaggttgctgaaggtaaagtgttttgttctgtgggcctttagcctttctcgttttgatcttcctctttaatccataggtggtctgatgggtggagacctcacgtctggtgcaggcaccagtgcaggtaagcccagactccatactgcagtatgtatcattgttctgagttcttctactaggtgatttgcaggacaaagtcttttgaacaaataaagttaagagatctgtgagaggcatggaaaaatgacaccaagaatttttaaagcacttttctgaagcaggagtggttaaatagtaacttagaagaaaactatttattaactagaaccttccttaataaagcttcaactggtcagcagagaattaagggctctgatccaatcaacttaatcctggataccatccttggacacaagagtacctttagcaaaccatactttttgtgttctctgttaatcatttcacattaaatatgaatcattttccagccaaagaagtattgaacttctatgcatttctaaagaagagtacataaagaaaaggaggggttaagattttaattattcaacaatactgttaataaaataaaatcacattggcattaaaatgagctcttagacaacatgaatataatgcatccccaaaagaccctaaaatatatttcagctaagaacttcttacactgtgaccaataattgtctcagtcacatttctccaggtttccgtgttaatttgtaatattgagattattgagatatcgatgtcattttcaatgcagaggcaagatagcacaatactttcaaatgccaactgcagttcactattggcataacaagtaaccatggtaatttctgcagctggaacatgctatacatttaaaatagtaggaggcaggcatgaatgacacaaggttatgtttgaaatgtcaaaaaaaatcaagtttattgaaatagacatggatagcctaattaaaatattttgccagggtcaagtagaatagcctgctaattataagaaagaagataaagaaaattggtttacaaatacatttttataaatatatctatttgagggtagagtttctctgttctgatgctggctcttcactaattcactgaataatgaagaaaaagtattagacctacacagtgattagcaaacaagatgaataacactagcttcctattttatatatcttttgaaaattaggtcgagccaaattagtgtgtaaactcacgtagtattttgctggacatggaaatgaaattttttccctcaaaaaatactttgtggtttgtagcctcaaaatgagagaaccagatcaaatccagaccaatgtttcttggatccaagtctctaccaaacactatgattagaaagaatggtgaggactgagaattgggtggtcacaaagaccaagatataatataagaaaaatggtttagatgttatgatgttttacccaatatctcactgcaccgatttgcttgccattatggaaacagctagtagtggttctgaaagtcattaaaagtagtaaaaaagggccgggcggcggtggctcacgcctgtaatcccagcactttgggagcccgaggcgggcggatcacgaggtcaggagatcgagaccatcccggctaaaacggtgaaaccccgtctctactaaaaatacaaaaaaattagccgggcgtagtggcgggcgccgtagtcccagctacttgggaggctgaggcaggagaatggcgtgaaacccgggaggacagaagccttgcacagtagagcccgaagatccctgccactgcactccagcctgggcgacagagcgagactccgtctcaaaaaaaaaaaaaaaaaaaaaaaaaaaaaaaaagtagtaaaaaaaaaaaaaatgtggaggaaaacatggcctactcagctttgatggaagtggcttgttactgcttaatagctagaatgctttggaatcctatattgaaaataaaaagtgtttggttgttcaattattctgtcattgtcaattcccagacagttggctaagtttaatgatcctctagggatagagaagactctcaatcctgtaggcataaaagtttgacacacgtaggatatagtaacattgaactaacaaaatcttatgcacttagcaaattcatcctcttacctcaggacctctaccataggtatgagaatcttctaattcagaaatagaagaaaaccaaaagaaagatactgaattactccaccctggtgataataaatattatatcttgattgcatattatagctacgagcatgtagttttcacagtttctatatagctgtgaaagtgttacccatattttaaaaatagaggaagaagccctttctaactctggtcccaaggaacacctgttgcagatgccacttagtctcaagcttagctgtcatgtcctactcataaactcagccatcttccccttctttctcatgccaaccagtatcatatgtcaggctgaatatatccgtgctgatgtcagagaatcacataacaccagaggaaaacaaggccagccagaatgttgctacattttcagagaagaaaaccaaagcaaaaaggccaaaatatagcttccaaattttgcatattgtcattgaaattcaaggtttcagataaagtttgaaactcttgaggccaagtggcgagactgcaattacgttactttttagcagctgcagtttttttctgaatcaagtcatctcactttgtaaaaaaaaaaaaaagtgagagggagggagagtctcatgaggcaaggaagtaaattgaacatttattttgtgcctataaatactaaaagaccaaaaaggtaagcatgctttttttcagctcagttttatcataaagtgtagcatctttcccatccagtgcctgagccatccttttctcatcataccatcatccagtaagtttctagaacatcctaattcatctccctgctttatattgcatcctgcttcagtctccccaggactgcttgttctttcttaaaaccttaagctaactgtaggtcatcattcacatgccaaaaatccagccatggcttctctttcaaaattaacagtgaatatcttatccctaggcccattcctactctccagccttaaccttcttcccttctgccactgctatcaagaacccggccctccagctctactaacagtagacatctaaactgctcttactgtgcactctacaaaaagcatcattctcataatagtcgtttaaattaagtgttcacattatgccctttctacagattaggaaactgaggcacagggaaattaagtaattgcacaaggaagagcccaggtagtcaggtcccatactgtgtgtttgtatgtgtgtgttttgagacagtgtcttgctctgtcacccaggttggagtgcagtggcacgatctaggctcactgcagcctcaatctcctggtctcaagcagtccacctccctcagcctactgagtagctgggaccacaggcatgcaccaccatgcctggctaattttttaattttttttccttatagagatggggtcttgctatggttttcaggctggtcttgaactcctggattcaagcaatcctctctccttggcttcccaaagtgctaggattacaggcgtgagcctctgcacccggcctcagtgtgtgctcttaattgctacactgtgccgccacttggcaatgtcacggccgcttactcttacctatgcaatcctagcatgcctttccttcttctgcttcatgctattgagcactctttgtcatcccacagaattcagttcagccatttgagaaaagcctttcctgactctaacagacaagttatgcacctctttcctgtgcttacatagtagcctgtaccaacattacatttctcattgcattatgattgcaacatctgggcacatctctctaggacgctcagctctgtggaggcaaactctttctcattcagtttgtatgcccagtttaacacctaagcgttagcacacagcagatacttggtaaatgtttgttagctgagtaagggaaaaatagatcttctagccatgaagttttaatagtgttgatgtaaaccagaaggaacatttcaaataaattatgtaattttcaataaaaaaagatatacccttgatctgtaactcacaaaaataatgtattcttctgaaacagtatacaacgaatgtttaattaaccatttgattaaatggctgagtaccctgggccaataaagcaaagtttcattaactcctctaatattcttaacggaaaacctgaagagctgacatatagtagtaaatgaaatgtgggttggtatctcagaccatcacaaatcacctcttaatacaacttcttatcatcacttaacttgaaatactttcaaagatgaagacaaagggtaataaagaagtagcaggatggagttgtactcttggtataagagaaatatacagcaagtcattataatacattagttagtaacagtgacttttctaaggtttcagttgatggttattcatccactacttaattctttcctcttaacaacctaaatgaaaagtcactgcttttaaaataacattttgtcataactctataaaacttttttttttgagacggagtcttgttctgtcacccaggctggagtgcagtggtgtgatctcaggtcactgcaacctccgcctcctgggttcaagcaactctcctgcctcagcctcctgagtagctgggactacaggtgcacgctgccatgcccagctaatattctgtattttagtagagatggggtttcacccgttgtccaggctggtcacaaactcctgagctcaggcaatccgcccacctcggcctcccaaagtgctgggattacaggcgtgagccaccatgcctgaccacattaaagcttttaacatgctaatctgagtggttattgatgatggtaagatcaagttcggttgttttgtagtcattagatttaatggaaataaccattagcagagcaatgccttgtgttggattattcactatcccgttagtatcctttgttttcactttgataatacgattgccttttattgagtagaaaggaccagtatgctcaaggagttattgattcatagttgagatcaaaaaaagagaaaaaagaaatgaaaaacctttaggaattcctttgaacatttaagataattttacaatctacatagctatttgacagtaaggcaaaggagatttatgtatattggttaataattttaattggcatttattgtaaattagatataattttataaaaaagaaactaacatctgttttcttattttgaatgttaattgttgactattttatgcatttggttatcaagcattgtcacttctggaatgcttaatttatgtcagctaaatacatggagagttgatggtggcagtgtactgccgtggataaatattgagcagtgaataagagatctggtttccagactctggaaagactccatctagcaagaccttaggtcatgactcagcacctttgaacttagtacttactcagattggagataagaaacaaatatttttacaatccatttacacgcaatgttttatgataatataatcataaaattttgcttatgtttttgtaattcatctagcattgaaaaagaaaaaacttagcatattacaaaatagaactaagtggaaagaggaaaggtcagacaatgcttaatttttctgtaccagcaccattgttttgcaagtatttgttttcaagaatacttatcaaaaatttcttggctgactttcttattggccagaaagacttctctgcaattcttacttagtgacttaaaatatcagtgaagtggttaaaaatttagtttaaaaagttggctttaacaagtttgcattttttgttgcccaggaaaacataacttaagattgcaatattcaagaaagggagaaagatacttaattaccctcaaataagaaaactaattgttagtataaagatataatttttatattatttttaaaatattattaagcagcaaatgaaaaaaatctaggttaatagttgggttctgttttgaaagtattgttccattagtttgaattgttctgaattaaaaattctgaattcattagcagttttaccttgggagttcacccaaaacataagtaaataactaacggcattgctttattattattatttatgaaattaagtaacaatgatatttttaacccaaaccaagtttatcaagattaaagaaaaaaaaaaacctagtcctcaaattagatagctacagcatgtggtatgcagctactgccaagaaaatcagtgttcactttccatatacaaaaccaagcaaattatagataaaccattaccttgataccattctctaggggctcatgttgaagtgggaaaggcaggtcaaagacaagacaaatgaaaaatgttacaggttaagtcaggatgttgtaaaatatgccttcgacccctttggtttgacttcattcttaaggagtttgatttccagaggaaaaaaagaaaattttaggttataacttcctagagagtgttttagcagattttagagccctttgtttatcctgatttctgacttcacaaattgtatcctttttattctctatccttctatatctacagtaaagtactgtgaagattggtttctttactcatatcccattgatttaacctaatagtgtgaaggataagaaaaccttggttgtttttaatattaaattcaagccgttaatatttccccctgaaatactagttttattcagaatttgtctttttttctcaaagcagtcttttctctttatacacctattaggttcctcttccctatctttggcatcatgataagattttatttggagataacacagaaaggaaagcttttttcataatcatcagtgatgtgacattgtgcatcagtagagagcagatgctgaaggggggatttggttaaaaaccccctcttttggaaatcagttttttacttaccagggactttctcactcggtgcttcaaggctgtcagccaagagtataatctgctgtttttagacaaacctttgccaatcacttaaattttgcagttacacttacatagtatgtttcagttgaatttcaatccaaagaatatttagtcatgatacagtatcatatttgaaagatcattagctatgttaaacttaagtattataccaagaaccttggataaacagtttaaatttataaccaactgatacgtccaaaaggtgctaagtgttcactgtgtttatttattattgctccatttcaattgttttaactgaactcaaatttaagtttatctattttactagacattatgccttctttttacaatttcttgaccttagagtccacccaccacctccagttattataaagaaccgattatgttgtatttaaagtataaggaggaaaaagccctgctatactaatatagaacattataatatagtagtaagagaaaactaaatctatggccagtttacatattcaaacattataacattaatttacataacaatcaagaaaactgaatctttagttggctctaatattaagcaactcagtgaaaaccgtaaaaccatggaccaaaatttttgcccaaggagtagtttgggaaaagattccagaggcagatattcaaaaaaataaaacaaccaaggaaagtatgtgatatacaaattattttagggatggcactattgcccttgaaaagtctgttaaactcctctttttccggattgttgtaaaaattaaatgagataactgatgcaaggggtctagcacagtttctgccccagagtaagtgcttgttaataaatgtgagctatggttataatcatctacattcttgattttctagcctttctggttataatgtttagcttaatgcagttccagtagtatttatgaaatgtgtggtgaagggagcacaccagtaggcttcacagagatgtccagcacggggctcctatcctcaagggtggaagtaaagcggatgtattaataaatctgaagcagaatgtgagagcagtacagtacagtgcaacacatttcactttgaacgttatgaacttctgatgtgttcgcagcagttgtgtaaatgttaaaaccacaagtaattattctttctcttctgtcatgctctctctaatttatactgtctcaatatttttgtttataaaaatgactgaaagaatgagcgattgtgtcaataatgaagacaccccctcatttttagcaaagagacagccccaaaatctcaagaagtgaacaattaaatgagtcataaatctatcattcatagttaaatggaattttttaaagatagtgtggttcaatagcatttttatggtgcaattaaaaactatcccttcagtaaatcagtacccaaaggagaatgatatttgggttttttttttttttgtactggagacatcagattgtcaatttcttccttatttgcaaatacaaggatgcatgctaaatctcagacatctggcttttgtaatgtagtggtagcaacctgcattttggattcaaatcaaagcctcttccttgctgacagggtgatctcagtcaagtaacggaagcttcttaagcctcagtttcctcatctgtcaaaagctgggatggtgatgcctaaatccgcatgacagttaggacaaatgagaaaatgttcgccaacacaaacctacttgatggactctcaatctttggaaaaacaacttagtaataagtaaaatttctttacctctccctcacaatccagagcttacacagtatgtgctgtacgttaaaagctcattgtctcattgacagactgttaatttcacacacacacacacacacacacacacacacacacacacgcaaaatcgctgaacaaaacacagcccaagaaacgtcaaggacaaataggctagatatgaaattcctgaagctctggtccagcatcaggtgacatggtcaaagagaagagacagctctctttttagaacgtctgatgcccctgaactggtatggccaagaataattcttggctttggtatagtcttggggtatttctctaagaatataccacaaaatgcactgaggtttcagagaagtttcttcatagtttaacattatgcattattatataatttccctaagaaacccccagaaaaagtggagcctttattttgtgtgtaagaatccctaattaggagtctttagcaagataagaatcagaaatctgatttgccccctttctacattaagcatattgaaattttcatcatacccagatttctgacccctgaatgttttgtggttgccttttctcttagagctattcaatgtaaaatatctttttttctcaaaaaaataaaaataaaaacaaaactgattttgatacacaacagctgaataactcacagttcctagcatatgtaacaaggtttcaggcattcaggctaggactgcagtctagaagatcatatttttccactaatttttttttcaactgtcacttccagtagagtaggggattgtatgagcaagtttatgatacacaatttaaagtaattttctataaaaagatgtatgttcatttgaggcacaaaacaatatcctgatattggaaactaacttttaatcttaaaactttaaaaactaaaatataaaattaattgatgatagtgagcattattatgtatgtgacatttcctgtctaacaacccagtatgctgtaactgttttcaaaattgctttattttttttttaaagtgagtaaaacattttgttgaagtaaaagcagcaaattgatacttcagaggtccagctgtgtgttcagcttaatgttttcctgtggcaatttgcttcaaatccctcaaaatcagatactattaacaaattactaaacaaaattatttttatacatttatatattagaagttatttcccgggtaacaactaatcgcagatactaaaaaatactggacatttcactgtaacattgggtgtttctgatagaagctggtctcttaaattgacagtaagtaagtaagcatcgttaccatttaagtatattacaggggagaagattattgactaaaatattacaaaatctacttttaaaagcatatttaatcatccactcaaaatagcacactaaaagttaaacagctactctggtgttcagtgtagctaaactcagtatttcctacttgtaaatatttatttatccagaaagagaccagaaatatggtttgaacatcaccattctgtgcctctttatgagaattcagtgtcttctgaaccagaactactatttactatgcccaagttgaccttacaacatgtccctcaaacttgcacatcacctctggcttaggacaaccttgactgtcctgtccctagttgtgtcctctcttcatttgtatccccataatttgcaaatgagactcgacatagaaaggctttcactatctcagagcatgactggttctgaaggagcagtgtagtgttgtacttcagggcatggactctggacatactgcttgggttcaaatcatagcttcaccagttgatagctgtttgacattgagcaaattcctggacctctcttttcttcggttttctcatttctcatttttcatagggatactattagtatcccacagggttgttcttgtgaagattaaaagtgctttatatccatgtacaatatctagcacttacatagcagttacaagtgcctggtactcttctgagcagttaatgtgtatgcttaatgttgtgttgttggtaaataatactatacactgtgttagcgattgctaatattgttggatggtaagattgtcaatgactgcctcagatgagtacctgagagcctctcattcagattactttcatgcttctctcacactagggaaatacttctattgagaaaactaaggctctgtagggttgagagaactcttaacagaaacattttgagtagaacctagattactctgccttatcttttttttgtccccaactcctggatgcctgtaaacctttctctctgcgctgcctcattcagacatcatttctcatgtattctagagcaaggcgttctaactagcttctctaacagcagtccaacccccttttgtctctcctttccactgccatcattgttcctttcctaacacaaatttaataaagctaacaactaagaagctatcttaggcactcattttctagagtataaaatttggtaaaagcttagtataaagcctacagtgtaaagttaacataatcttagaggttcatgttagccaagccttctttttcaacttcggaaaactttctgctcttcaagatccattgtttcatcttcagaggaatgcccctccttctaaactctgagatctctctgtcctgcattccttctctccgcaaagcctctctctgaaccatctgataaattcctgttcactcttaatagccaccctgccaccattcttttccctaggataccatgcagcttatcttttggtgaaaagttctgtatgagtaaattagtattgagatttaccttgatataacgacaacctgtggcaacaaatactcgtcagtgtggaagaaaatatcagagacttcaacttttcattttcattagggaaaatgtctgacttgtttaattctaccacttgcagttagctaaggtaatgtgctgtgaaatgattaacaggtgcaacaggtagaaaagacgctttaattaactctctataaacaaatttagtaggtgggcacttacatgatttcctggctttcatatatatggt

SEQ ID NO: 101 - DNA, 2161 bp, Homo sapiens
  misc_feature (244)..(249): "n" at positions 244 and 249 can be any base.
aagatgcatggtgaaatggtgagatcagaaaggggccctgcatttgataaaaatgcaaaaaacaaaataaaaatagcatgaaagaaactagtatatacaatggatgtcagttgacccaatagattgctaatgtattaaaaacaatttagggtgttgcaatgtgatatgttctaaccccacaggttatccttttgacagctgaccttaaacttataaaatgtaagcagagtaaaagaaaacaganagaanatagttactcaaatgtgcaactgcacaaatatacccccctcccgctattaagataacaaaacttctgctattaccataatattatatatattagaaagctatacacaagcatgttaatttcacagatttttttaaaagattcttaatattttatataattagaaatacacacatttcaaaaacaaacttctacaaagagaaaacagttatcttggttagcaaagcatggagttcttcatggcttagggtagtgctttctatacacaaagtcctttttggttttttacaggactgtttaaaatattagcgacgctatcaaggaaaaaatacataatttcagggacgagagaaagaaaaggaaggaaaaaatacataatttcagggacgagagagagaagaaaaacggggactatggggagaaaaaagattcagattacgaggattatggatgaacgtaacagacaggtgacatttacaaagaggaaatttgggttgatgaagaaggcttatgagctgagcgtgctgtgtgactgtgagattgcgctgatcatcttcaacagcaccaacaagctgttccagtatgccagcaccgacatggacaaagtgcttctcaagtacacggagtacaacgagccgcatgagagccggacaaactcagacatcgtggagacgttgagaaagaagggccttaatggctgtgacagcccagaccccgatgcggacgattccgtaggtcacagccctgagtctgaggacaagtacaggaaaattaacgaagatattgatctaatgatcagcaggcaaagattgtgtgctgttccacctcccaacttcgagatgccagtctccatcccagtgtccagccacaacagtttggtgtacagcaaccctgtcagctcactgggaaaccccaacctattgccactggctcacccttctctgcagaggaatagtatgtctcctggtgtaacacatcgacctccaagtgcaggtaacacaggtggtctgatgggtggagacctcacgtctggtgcaggcaccagtgcagggaacgggtatggcaatccccgaaactcaccaggtctgctggtctcacctggtaacttgaacaagaatatgcaagcaaaatctcctcccccaatgaatttaggaatgaataaccgtaaaccagatctccgagttcttattccaccaggcagcaagaatacgatgccatcagtgaatcaaaggataaataactcccagtcggctcagtcattggctaccccagtggtttccgtagcaactcctactttaccaggacaaggaatgggaggatatccatcagccatttcaacaacatatggtaccgagtactctctgagtagtgcagacctgtcatctctgtctgggtttaacaccgccagcgctcttcaccttggttcagtaactggctggcaacagcaacacctacataacatgccaccatctgccctcagtcagttgggagcttgcactagcactcatttatctcagagttcaaatctctccctgccttctactcaaagcctcaacatcaagtcagaacctgtttctcctcctagagaccgtaccaccaccccttcgagatacccacaacacacgcgccacgaggcggggagatctcctgttgacagcttgagcagctgtagcagttcgtacgacgggagcgaccgagaggatcaccggaacgaattccactcccccattggactcaccagaccttcgccggacgaaagggaaagtccctcagtcaagcgcatgcgactttctgaaggatgggcaacatgatcagattattacttactagtttttttttttctcttgcagtgtgtgtgtgttataccttaatggggaaggggggtcgatatgcattatatgtgccgtgtgtgga

SEQ ID NO: 102 - DNA, 1398 bp, Homo sapiens
atggggagaaaaaagattcagattacgaggattatggatgaacgtaacagacaggtgacatttacaaagaggaaatttgggttgatgaagaaggcttatgagctgagcgtgctgtgtgactgtgagattgcgctgatcatcttcaacagcaccaacaagctgttccagtatgccagcaccgacatggacaaagtgcttctcaagtacacggagtacaacgagccgcatgagagccggacaaactcagacatcgtggagacgttgagaaagaagggccttaatggctgtgacagcccagaccccgatgcggacgattccgtaggtcacagccctgagtctgaggacaagtacaggaaaattaacgaagatattgatctaatgatcagcaggcaaagattgtgtgctgttccacctcccaacttcgagatgccagtctccatcccagtgtccagccacaacagtttggtgtacagcaaccctgtcagctcactgggaaaccccaacctattgccactggctcacccttctctgcagaggaatagtatgtctcctggtgtaacacatcgacctccaagtgcaggtaacacaggtggtctgatgggtggagacctcacgtctggtgcaggcaccagtgcagggaacgggtatggcaatccccgaaactcaccaggtctgctggtctcacctggtaacttgaacaagaatatgcaagcaaaatctcctcccccaatgaatttaggaatgaataaccgtaaaccagatctccgagttcttattccaccaggcagcaagaatacgatgccatcagtgaatcaaaggataaataactcccagtcggctcagtcattggctaccccagtggtttccgtagcaactcctactttaccaggacaaggaatgggaggatatccatcagccatttcaacaacatatggtaccgagtactctctgagtagtgcagacctgtcatctctgtctgggtttaacaccgccagcgctcttcaccttggttcagtaactggctggcaacagcaacacctacataacatgccaccatctgccctcagtcagttgggagcttgcactagcactcatttatctcagagttcaaatctctccctgccttctactcaaagcctcaacatcaagtcagaacctgtttctcctcctagagaccgtaccaccaccccttcgagatacccacaacacacgcgccacgaggcggggagatctcctgttgacagcttgagcagctgtagcagttcgtacgacgggagcgaccgagaggatcaccggaacgaattccactcccccattggactcaccagaccttcgccggacgaaagggaaagtccctcagtcaagcgcatgcgactttctgaaggatgggcaacatga

SEQ ID NO: 103 - DNA, 41637 bp, Mus musculus
  misc_feature (11290)..(11309): "n" at positions 11290 through 11309 can be any base.
gatctcatcagagtccctgctgtgctgctgtctgtctgtctgtctgtctgtctatgcccttactaaatcttctaataatcatcttgccccaaaggacagcatgtctcagtgtatctttcttgagtcccaaacccatagcattttggttaggaggcaagccaaggcaatttgacttgactcatcactttcttgtggaaacagaatatctgaagagcagctgaagagatatcaggtctacttcagctcacttggtagagtctatcacagcaggaaaaccatggagactggagtagcttggttggtggtggcaggcaccttttggtacaacttgttcacatcttggtggctcaaacagaagcatttctgttctaagtgggaaaaatgttctgccagatattaacaataaaattaaaatttttttaaaaaaagggttggttaagcactcaattttaaggactcaattttgtatctttccaaacctaggtaaatatcaggtggtattggtggttcacctctaatttcggtctctaagatccccaaaacaaactgactaacaagactagcaggctgtgcatttggttgagagaccctgcctcaatgaataaggtgcaagcagcagcaaaagaagattctcaccatcagccctgtgcctccacaactatgcaagcccacacacatgcactcactgcttgtagatgtatgtaaaagtgtgcattcaagcatctaacacacatgaacacgtgcacatacaaacatcctcatgtgcgtgcacacacattcatgcaagggatgtgggaaatggagggaacagatataagatctccctcctcctacttcagactccagaatgtggatggtgcttaccagagtttccagattcctgtgactctgaacaaaattgagacgtggaaagtcgcagaataaaaacagtttatcaagaaaggatgtgtgccgaagctgggcaagactgagaagccacagcaaatgtgcaaagcattgagactggtatgtgtgagagtgatagaaacacacacacacacacacacacacacctttattcctttgagacaaggtctttcactgaatctgtatctagattggcagccagcaagtccccaaacccttcctatctgcagccctcagttctgaagttgtaagcaggtgtggccatatttgggttttccatgggtgttggttgtttgaactcaggtctgcaggctttgtagtttgcaggttttgtagtttgaatgagaatgacctccatcactcacttgcttaactatatttggccctccgttgacagaatgctttgagaaggatcaagaggtgttggcttgttggaagaggtgagccactaggggaggggtttgaagtttgaaaacattagtgccactcgcagcatgtgtctctctttgcctcttggttgtaagttctcagcgactactccagtaacatgcctatttgtgtgcttgcctgctgccatgttccccaccaaataaactctgacactctgaaactgtgggcccctggtgtttgttcttgtttgttttaaacaaaatctcaatagttagattttttaccaatgaagactccagagccagatgctggggtgaaagtctgttaggggagagagaggcagaaaaagcacttcctcttcctcagcagacatcccagaaagaatgcccttcaaactgaatgtccctcccttctacttcctgtgcacctctctattagttttcctgactctcactctctatggtttttcttaataattctatgttcactccctgacaattgattgtttgatccacatttgacctatggttgactttatttgaatctgtttataatattcgagcagaaagcccttggattaaaggtgtgtgctaagactgagccacaccacaaataataacaggtttttattattaataatgggttttttattattaataacagtaaacacacaatctcgaggttcacagtgtcattaaattaaacagtttcttttctaagttgccttgattgtggtattttgttagaggaataggaaaatgacaaacacatatatcaaattctcttactcactaacccagtggctctcaaccttcttaaagctgctgtgaccctttaggacagatcttcatgttgtggtaaccaccaaccataaaattatttttattgctacttcatagctccaattttgctaccggtataaagaataacgtaaatatctgtgctttctgatggtcttaggtgatccctctgaaagggtcattcaacccccagaggggtctccacccacaggttgcgaaccactgcactaaagcacctccccagcagcaaggatttcaggtgtctgtttcccaggattacaggcttagctcttttgcacacactgtgccgtttctcccatgctctggtacatgagggcacagaggggaagatttccagccttccacttcactagctggatggctggtttttgttgtggttggtttttttttatttaaatattattattgtcattattattgtgtatatgtgtacacatgcatcatggccaaggtttagaggtcagagcacacttgagggagtctgtttttgctggaaggcaagtgcctttacccactgagacatcttgctggaccccaactcatttctctgacatgccaggcctgctttggcctagtcacatgcttcacgccatgtgaaagtgatagcggggggaggtttttagaagtgaagccttgaaggatcctcacaaggccttacaaatgtgatgggcaggcatcatgcagtgtttggcctgcttgtcgctcttccttcaccaagtgtggacacagccttaactccctccagcagtaggaaggctccaagttctgttacacttagtttgtttgtgtatgtgcatataccacaatgcaccagtagaagtggaggttagaggacagttttaggaattggttttctctttgtgaaccccagagattagagttaggctgacaggctgggtgacagggacccatcttgctatcttggaagcagataccaagccctcagctggtacagtacacacaccagaccctcagcaggcacaggacacacaccagaccctcagcaggcacaggacacacaccagaccctcagcaggtactggacacataccaaaccctcagcaggtacaggacccacatcttcagccactcaacacctccactgtgagaatatgaagctttttataaattactcactgtctagaattgtgatgcataggtacacatggtataggaaaggaaagatagaactctgggacaaggaactgaggtgcatattttacatatcaaagcagacctggtctccaggttctcccagcatccctcagtccttacctggcataccctgccccagggccagtgatctagccccagagtggcttcccaataaacttgcttttaatataatctaatctggcttgaattggttcatttcactggtggaaaaataacctatcaattttaattttaaatttcactctcttgatttaaaacaaagcacccagggctggagagatggctcagtgattctgagcactaggtatttctccagaggacctgaatttaattcttagaaactacagggctttttgtaaccatgtgttactctagttccaggatcccaatgtcttcggctggcctccctatgtgcacctcacatacatggtgcacagacatacatgaaagcaaaataccccatacataactttttaaaaagattactttttaaatcaacaccaaaaactgaaactcaaaaggctaaacaaaccaaactctggatctgttgaaataatcacaaaggtttactcttgtgttgcacataaagaatgccagtttggtaggggcttcctatgcaattggttttgcagggcagattcaggttgtgttgttgttttcccccttcaatgaacatttatgcttgcatatacagtaggatcaagttgtatagtcttttcttaaaaagttattccccatacccaatcacacatggacaataggtcccatgcatggccaacactattgtccatgtgccttagctgcaggtgctataagcagaaggtcagagaaggctgtgtggaaatgtaggcaaagaagaggggctaggcatacatgactgaagatgcagaatctccacaaatccaggaggggctgtgtgaggagacagaggttaggaggactatcaccaatgttttctaccctctcaaaacgtgactaatgaaagctaaattccagtctgaggatgaaccctccacagtcctgggaacagcctgccctctgtggtcattttagaaggccatgaataagaagtttgcatttgagagtttgaatgaagaagatacagcaatagttcccattttccagatgcggtacaaggagctcaaatttggggatgtctcaaaagtcgacttaaaatttaaaaagcttaagttttagctttagctgccaacaggtggtctctccacacccacaagcccagttcatggccagacaacagccatagctgagtacattcagaaacacccttccattcccatgcggcagtccctcaggacttcccttctaacctcaagactcaacagtctctgctgaggccctaagtcctctttccagtacttcttcctgctctgcacactgatggcaaaagctgacaggttcatgaaggaaaaggtaaaagtaggatggcagagggactgtccctttgggccttgtctgctcactgctatagtcagtcccaggcagagctgcagaggatgaggacaaagcctcacaggcttataactttgtcatatatatgttcccaaatagatttgttctttcatccccacaggtgggcaggtgagagcccaagctctagggtctttcattttccagtgacgtatgaagtcttagtgagctacaggggtggagcagaatctaacgatgctctctgtggtcccatgagtctgatggacatccttgatctatcctaagatgcagagtgtggctgaatggatgagtcaccaaccagcagctgcagaacacacttcttatggtgatgagaaggggcacagtgtgtgctaggggatgaaattaacatatttagtgccagaggaatatggtcaaaactaaggggtgggatacagagcagaaagccttgactcccatccatgggactgtgtgccttataagggtatgccaggctctgacaaacttatgtgttctgcatgtaaagagctttattatgttgaaacaccaaagaactccaaatagattggaccagaaaaaaaattcctcctgtcacaaatgcacgaaataaagaaaaaagtattaaaagcagtaagggaaaaaggtcaagcaacatacaaaggcagacctatcagaattattacagacttctcaccagagactatgaaagccagaagatcctggacagatgttatacagaccccaagagaacacaaatgccagcccaggctactatacccagcaaaactctcacttaccataggtggagaaaccaagatattccatgacaaagccaaatttacacactatctttccacaaattcagccctataaaggataatagaaggaaaactccaacaagaggagggaatctacaccttagaaaaaacaaaaaagtaatcttctttcaacaaactcaaaagaagatagtcacacaaacataattccacctctaacaaaaataacaggaaacaacagtcactattccttaatatctcttaacatcaatgggcttaatttcccaatgaaaagacatagactaacaaactgggtatgtaaacaggacccaacattttgctgcatacaggaaatgcacctcagtgacaaagacagacactatactacctcagagtaaaaagctgcacaatgttccaagtaaatggtcccaagaaacaagctggagtagccattctaataccgaataagattggctttcaaccaaaagttatcaaaaaagataaacatattcatcaaaggaaaatataccaagatgagctctcaattctgaacatctatgctccaaatgcaagggcagccacattcataaaagaaagtttactaaagttcaaagcacacattgtacctcacacactaagttagactccagagaaccaaataatcctatcaacagagaattctcaactgaggaaacttgaatggctgagaagcacctaaagaaatgttcaacatgcttagtcattagggaaatgcaaatcaaaacaactctgagattccacctcataccagtcagaatggctaaaatcaaaatctcaggtgacaaaagatgctgataaggatgtggagaaagaggaacactcctccattgctggtgggattgcaagcttgtacaaccactcctgaaatcagtctggtggttcctcagaaaattggacatagtactacatgaggatccagctatatcactcctgggcatatacccagaagatgctccaacatacaataaggacacatgctccactatgttcatagcagccttatttataatagccagaagctggaaacaacccagatgtccctcaacagaagaatggatacagaaaatgtggtacatttacacaatgtgatactacccagctattaaaaacaatgactttaccagtaactatttttaactggtaagctgtgcctctagcccttgacattgaacttttgatcttcctgcctcaacctccccatgctaggattacagatccttgccacctgtagtggttctaatagggttggcccccatagactcatgtatttgaatgcttggcccttaggaaatgacactattaagtgagtgtatccttgttaaaatggatgtggtcttgttggaggaagtatgtcactgtggggctgggatttgaggtcctacgctcaagctctgcccagtgcagaagacagtttccttttgtctgcctttggatcaagacagaactctcagctccttttccagcaccatgtctgcctgcatgttgccatgcttcctgctatgatgaaaatggactgaacctctgaaactataacccaggcccatttaaatgtttattttttataagagttgctaggtaatggtgtcttattcctggctatagtttggtacatacggagaagactggaaagcagtaccttatgaatatactaaactacagacatatttttaattcatagattagaggattgtcaggttagttgctaatcattttctttcctgaatgagtaaataaggaaacaatttctaacacattctaactacagagtctaagctcattgttgccccagctgagggaaaagttcctccagggaactgcagcagcagtctgcagcccagccaggttggaagtttgtgccctgtggagaccttcctaaagctgtaatcccagcatgtggcgggtggaaacagaagtacctcataggaatccaatgccaacctggctgcaatatcaagtcacaggctagcttgggctacagcatgagcctcagtctcaacacatacatgcatacggacatgcatgcataaaataaaacagactctcggagccttagccagtggatctccacacgcaggcttctcatctgcaaagtttaatagttatttagccctgtgtggttgtccacacctacagtcctagatatttgaagacccagctacacctccaccaccaccaccacaggtaaacacacactttgctagcatgggtctgaaaagaaatccaggaagagctagccagcttccttctttgcagttgtattctctttacagtctgtttgaggctggtaaattcattgttttgttagacttaaaaatgtctgaaagttgccaggtgtagtgatgtatatttttaacactagcacttgggaagcaagtttcttggttcatggctatcctaggctacagagtgagttctgagaccagacaaggtggcacaaaacaaaacaaaaaaaccaccctatctaaaaacaaaagcaaaatataaaatgtctaaaagtaaaattttaaattcaccccacaacataaaatcagcagctgcttaaagcaaaagcatctagtttattaaagtacagttgtactggggagcctcctgcagggaactcacaggctcacttcccaaaatatgtgtggtgtaatgagctcatccaagggggcagggcagggcgaggcgtggtttcatgattctatttttaaagtgtttataagcacatcctttattgcctaagtcagctgacaagggagaaatgaatctcacatagcaggtagaggcaaactccgtactaatctgggtttccttagaaagtctaaagggtagcagtgcttgagtttcaatgatcagctctccaaccagttctagaatccaagaaggaggccgcccaccccacccccccacccccacccccacccccagcctccccaacagcctagtgcagactgcttttgccaattcccaggctgcttggttggtgtgggctatgctagcttgctctctgtgagaacagaaaggtcaagtcctccacaaggtgagcaacagagattcctgtaaccatcaaaggacttcaaagccacacaaagctctcacatttataaagtaattgcagacagccaggcgactttcctcaccaagtaaatctagtcttgcttgttatgtaccttaaggttctataacctgggcgccgttcctcaccccagctttctgtcctacctctgccagaagttttcttaggatatccttgaagggcgattcattttccaccgagggatcgtggaaagatcattttaagggatgcgttggacctggtgaggatgatgagcaaagtgagcagcaacttagttacaggggcactggcttcacaactcagcctaggaccccaggtctgtcgttgggatggacattagacctcttttgttctctggggtctggtaaagtacctggcctttgatgcggagcatttggaggggggagcaggataatggtgactggagttcttggaggagctttcctcctagaactgtctttgggtctcaccttcagtaaactttctaacaaaaaagcaaacccctagaatattacctggagctaagggatcctagaagtcgctctaatagtggagctgtgccatcgaacaactaattcagtagactaaagatcaaaactagttgtgcgagcagagaataccgcaggcaatttttgccaaaacttaaaagtacagtatctgaactgaatcagggcgagaccatcctggctgcttgcaagcctcccgcagcaactgggagagctggtcctcttggcaggtcctggggaggatctaaaaccgcaaactccggccaggaagacgctctctggccacagattggggacacaagcccggggtggggtggattctcaccaccgctccgcccggttccgcctccatctccatcccgcgccccggggcccgagggtgggaggacggaatttcccagcgcgggggttcttgtgttccgggccagccgacaggctctttctgtttacggagagaaaagggaaatggaaaaggcggggaggaggttggcgtcggctgcgccaccccaatgctggttcaggcgcctagagtcagggttccgcagagccctggtcctcccgctgcctatcgcccggcctccagtccgccgtctgtcctcagaacgcccacacgcctgggtccggcaggctggccacccgctgcccaccgacacagaacactcaggttaacagggtttagggtgccctgagtgtgtttcaggggcagggatgcccgggggttcccactctgaaacggagcgtgcctcccaccggtgaacactcgagtggcctgctgcacgcaggtacagctggaaaacaccttgcgcaagaccgcggggcggtgtggactcgaggctcctcccaccttcctccttcttcccggatctcgggtgaccagtcagtgcaggcctgggctgtggcgcgggacgcgagcactggcgctcaccgcgcctcctgcgggggacactgcctggactgctgaactctgtttgctgagcctgggtgagtgcaacttggagcctaaaggacccctatggtcgctcagtttctgggcttttaccttaagcaaagcttgtttatcttaaggggccaagtgggtcgagagggagttgtgggaaacatatttggatcccaaaggaaaacagaatctttttttttttttttttggataaaatggatggggttgggaaagataaagccaacaaacttgcttagcattataagacatctgctgaggcacccaacttcaatggattgaggcttgtgtgttctggcccttaaagactttatcctgtaggagaataagagcagtagacttgattcatcttgaagttttgaacaagagtgaatttgattctacagggctagaaagcatgtttctggaactttttcaaaagaaaaatatattaagagatatgtcctaaggagcaatgggttgtttcaatgggggaaaatccctttttaaaatgggaactaacacaggcattatcccccactgcaaggcagaatatcaagactgtatatagtctgcgtttacttgctgggcaactcgaggttcgctgtctggatgttaacagccaagtcctgttttctattttcatagctattttctgaaataattctaagttattttatagttaatattttgaaatttaattacaaaaaaacccaccagtcttggactgcatttggaacaactgtctctaaaactgccctaactctccatcctgctaggacatatgggttttggagaggattttgacccgagtccaggatcaggcattttaagctgagcacatttgtcactaaactggagtggcttcatcatgcacagaaagggatgctggtctgtgtagctcagaaaccataagctaatgtgtggtctgcttagttgagccaggagggtgtaggatgctcctcaggctccagaggctgttggggcactggtttgctgggcagcagatctttgtggcaagagcctctcaggaattgagcaagctctgtagaaagtttcagaattaaacatccttccatctccctgtcctccccctctctgtcttgttcccatatagccgtgtgtgtgtgtgtgtgtgtgtgtgtgtgtgtgtgtgtgtgtgtgtgtgtgatagagagagagagagagaaagagagagagagagagagagagagagagagagagagagagagagnnnnnnnnnnnnnnnnnnnnttaggctttaagtatagccttattataagggcacacattctgttcaagcctttctgcaggtttgcaaacccaaattggtctttcctttcttgaacagtgctggatgcctcccccccacaccccttctttctagagtcgcaaactttactgttttgtcaggtcatttatttgctaattcagcttggagcctttaccaaggaagcttaaagccaaaggatttttaacttctgttttcctagtaaattctacagctgcagaaactgcaactaatggctatgctaaactgaggttaaaggttctctctcctatcagcttacacggcttcctgtgtagcttgacaagtcagggacttgaatcacagtcttcttcagcgatgtgtaagatgtctgggaaggcactgtgtggaccatgatctagatttaagtgtggcgataacaaacaccagcagacttttctgtctgggctcgccttccccctttgcttcaacatagacacaatctttaaaaacttaccagactgagaaataggcgtcaaatcggactcacagatgagaaaggaggccagcatggtgtctgttaacctaggtccacatcctagtgcttgttgacacagcttaacttactacacaccagacactggtagattgtgcgcaggagcttctgtgattggatgataggcgctattattatctccaccttgcagatgagggaaaccaaggtacagattgagatacttgtttaaccatctcataggcagaggttggtggtgagatttgggcatgaagacaggagtattttaatgtgggatggatgctagatgccttcttcatttgcacatcaggagcacatgacttgatcatgtgtgcaggtgtccctggtggaaatttccagaaactttgaactgaagctccacgttgacacaggtgcatggctttggcggagtaatactttgttacttggtgtgtgtgtgtgtattggtgtaatgcacgtgtacatgtgtgtgtgtgtgcgcgagtgtgtgtacatatatattacaggtgccacatgcatagtacatgtgtgtgctggtacatgtggaggctagaagtcaacattggctgtctttcccagcttactttttagggaggtctttcattaaacttcgagctcatgggttcagttaaagttgccagccagtgagctctagggagtcacctgcctgcacactcccggcactggcactgtagcacttgccgaggtcctgtgcttttatggacctgacatatcttccagagaggcttaagtcagacaggctttgaaatctgcttacatctagtaggtgctcttattttttctcacttgtaggggagcagagttatctcaggacccagagggacagtaccactttttattgtcactttttatcggcttgcttgacttctcttgtcatctacatttcctaagtgtagcacctgatcttgtgggactgaagtgtcactttggctggtgaagtcagttgaacttcacctgtggctcgcttatagcagatttggttttcctgggctcttttctccttctaaagcctctccagatataggtattaagttagctttctgggaccctcaagatgtgtgctttgtgctattttaaaaaagaaattcaggtgtcaggagggtgctatgactcacagatcaatgagtcacctttctgatacttgtttatctttggcacgtatagatcccagctcctgtccccttctatagagctgtttaatttcttcccaccagatttccccacacactgatcttcttactgtttcacaccctccctccgtttcacaccctccctccaagtaagctgttttacatgcttgcttctctcttgggacttagcttgcttacctagttagttcctgaatttcagtcaagtggttcattttctttcaaaccactttttctttaaagccacagccatcttgagctgtacaatgaagctgtacaaggtcagtaattataaaaagcagaaacctctgtcttcagagagacctggactgctctctgctgtgtttgggtttagtgaaagtttgttttcagtagctaaagcagatgccagagtcagtgcctcccaagcatctcaggttttccctgcaaagcaagctggactaaagattttctaaggtccctttgaacttggcactgtccacttgaattcacttgtgtgagtaaagaagaatccttgttatgaacagaggcacagaggagcagatctccaggccctttggtctccaatgcaaacacattatagtgaaggatatgtttgtgttttcttctgtagactcccagcaggcactacagtgatggagtacatgagcactggaagtgacgagaaagaagaaattgatttattaattaagcatttaaacgtgtcagaagtcatagacataatggagaacctttatgcaagtgaagagccaggagtgtatgagcccagtctgatgaccatgtatccagacagcaatcaaaatgaggaacgttcggagtcactgcttcggagtggccaggaggttccctggctgtcatctgtcagatatgggaccgtggaggatctgcttgcatttgcaaaccatgtctccaatatgacaaagcatttttatggacgtcgaccacaagaatgtggaattttattaaatatggtatgtttcttctcatcagttgagtgctgtgtgctctgctttgctggtagtgcttcattgaatgcacagtggcattgaacttggcttaagaatggctgccagacacaagttactgtatctggttactggtaagaatcacttctttcttaaaaacgggaagaagatcttcatgcaaattccattgtaggggcctgtaatttagtagtgaccctatgaagaagcaatgggaatatactttgtttactatagggcatgtaaggtaagcactgagccctgacctataccctcaacccttacagatttattttgacaattcactgaaaggctcattcattatatacatgaaagagagggtcttaattggagttcatcagtcaagagacatatgagtgctgtcttaatattttagaaaacagaattattttctcttatcacgttggttaaaaatggttcttatagaactgcagcttacaggtggcaaatagctacccacagattcactctctttaagtggtgatgacccacggtgatggagttgcttagtcatcccaagtatgcagataattcaaaaatattgtgacaagtctttgttaccacagtagttgctcaggtggagtgtttaggtgtggctggcattctgtcagatccttattgtgtcagaggtgaatatgtgggcgatggttaaaaggtgatctaattttgtaaaaaggacagttggcaaaagagtaggcggtaagttacaaacatgcctatttgtagagatggctctcttttgtttggtgtgtacaaatggcagtatgtcccgtgctgggggagctctttccaaagagcctgagttgggacaaaggacatcacaacaatagcaataataataataatcttaattgtctcatttatttaatgaaaaatagcacagtaatttaggtcagctatgaagtgagttgtttgtcaactgtgtttggctcagtaagaagcaagctcacattctacataggggtgtgacttcctttggtgtgggtctaccacactgcatttaacagtgggctaaatgctttgtctgtaggatgtgacttcattctataaatgggaatttatcatttgaagtagtagccataccagattttctcaggcagggtaaaattagagaagtatgcttcaaaataacacacttgggtgtgacaaattcagtgcagatgcatttctttcgtttttacacatatttgataaatgaatacaaatgagataaactaattgtccttgcttgtgaatatatagagacttaggtgtgcttgccctcaatgaggagagatggaccacagtccaggtacataaggaatactgggatattttagagactcttagaaagtggtttcttgcttctctttaagggtagaaccagaagagctaacacagaaagggccagaaaccacagtcattagacggatgtacaacctgaccagcaaaggtacaactgaatggttatcatttcttgctaaagaggccatgctcaacacatgagcaagtccaaactaaaaataaaattatgaatcaaagataccatgaaggcagggctcttaataatcttaaaaatacttgtattttcttttaatgtggaagaatataaaatataaggcaagaagaccagaaagaatgggatgataggaagtagtatagctcatgggcaagtatatccatcttcgttaggcctgggagctgggcctctcaggactgtgtttgactttcctgatactggcattaaaaatgaaactgttcccagtggcaatctgtcacagctgtgtgcctcataagtcattgcctatggagtcgtctctggtcagagctggtctggcgtaatggtcataggcatggcttttaaccccattgactctggcacggtgccttctgtggatccatctatcatctagtcgagctttcttttgtcatgcttcatctgcagacttagcagagctgtgtgctttgggctagctttgctgttccttatctctcttctttagagaattagctgccacctagaatgggtccagagtaaaatgtgtccataaaagcttcctacatagggagagaaacttttccttacctacgtgttcatttggtaggcatacctggacagccatggtgtatgtggctattccagatactagatagcattttgatagtctgtaccacagggagctcactgcctggtgctgcaggatgcaagtgcgcaggtaaaataacagcacacagtcagccacagaggacctacactctgacaagtgtgggaatgcttagacaagatttctaagggaaggaaaaaggagggtgtcagcacaggcttgcaagaaaaactggcacccatgccaaggtgtaaacatcaccttggagccagctaaatgaagtgaagagtgttttctgtgaagggacagtatgtgcaaaggctcgcaggcacagagacctgctgtgttctgactgccagcacacagagtgctgcaaacttcattagacaggatgtagagctacagatagaacaataacccaaagcatggcatgtaggctagttctccctgagtgtgtatttatatgtgtgctacttcccttaaaataacatatgttattaaagattgcactcatattcaacagaacccaagaaaagagcatcaggagactagcctagagactgctctgtgtcagagtgcaaagttatttataaccagttcatacttgacctggagtaaaatacaaatgagttcccaggcattcaaccctgggaattatatgtgaattcccccccccctcactactctccccccaaacacacctctccctggattcgttcactcaaagttactggtgtggcatttggaatgatgatcctcttggggttgaagagtccaaccctccacttggtgtttgagccaggcaggttcagtgccacatttgtcaagttcttatatataacgaaattcatctctgatcccccttaccttagattctactctgtggcccactcccactcctgtaaatatatatgatgaactgtggtggtagctgagagttctgaattaagaacctggtatgtagtttgcctttgaaatggaaattcttactacccgtcttactagccagacctgaacatcaggatccacttatgtccccaggagggtaggagagatgtagcttagcctttgtgttagctactctctttccatggatttagctgaagaccactcctactttgggtcacacagctaactcaataaaatacctaagaaatgttctcaggtattgcctgctgtgtggtttagtacagaaaacagcaatctggatgtgagactagatggcatgtgtcaagtgtctgtcctggaaagtgactttggtaagttgaagatctgacagaaatagaatcacagggttcttctgcaaggttgtttggatccctagaaagaggaaactaaagctaaacatccttgtcaaactcaagcaagagagacctggagttagggagaaaatcaggaacgctgtggattgctcactgcctggaacttgggcctcactggatgagtccaggcagctttgaagaactgagtctgcaccctagcatggctttaattacagccttctggaaccccaaaggcccttacacaaagagtgggcactctggctgtggggttaggcagaatcaagtgcaaaacctaattctggcactgactggaaagttgcttcaccccttggaaccagcctcagctatgcaatggaaagaaaaatagaacgaacatagctcaggctggctgtagactttaatgagataatgcaaaacagctaggtaagtacaggtccttgcttagctttcagactgcagtggccgatccttccctatgtccccctggaaagaataagggggtggtagtggaactggttcatagcacacttagtttggtacaaagccaaactttcatgaacaagggttaaacacggagataggtaactagaacattctctgaatgacaagaagcaaggggacccaaagaaagtcttgccagatgttagctctggctaaatgtggaagagaccaccactgcagtgtcctcagcagcaacaagagacaacacttgtttggagaggcagttatattttaaatgagacaataccatggtctctacttagttcctggaaggacctgtacagggttacaactcagcaaaagcaccctgtaaacattgttaaaatttagtgacttttgcatatccaagtattgggttattcttcgcttccttccctggctaacatcgagcacacatttgtggactgtggagctaaattagtaatgatagaggttaagtgagcagtcctttggtctgcctctaatggtgagtagacatctggttgcatttacagttgcatcaagtgcttgttcttcattcagggaataggcttaggggctccacattctcctcagctcttaaggcagctcaatactgtttcattcctaagtccgggagtgatatctcaggccataatatcatgagtcacactgaggagagagctggcattttaggagactatcctgcagaacagtttagatcagtggttctcaacctgtgggtcacaagcgcacaggggttacatatcagatgtcctgcagattaaatatttacaattcacaacagtagcaacaacagtcatgaagtagcaatgaagtaatttaatgtttgtaggtggggttggggaggggatcaccacaacatgaagagctgcattaaggagtcaaagccttaggaaggccgagaaccactgctgtagacatttttaaaacgtgttctaggccacgcttcccatggactaccattttacttgagttagggtatgtactcacttttcatttatttttctaatgttcttcctgtgtatctctgactgtcctagccctcaccactctcttgcctctgccttctcagtgctggtatttctggaatgtcccaccatggtggacttgggtggaatccgcatcccacattgctctcaggacatacctcttgatgtttggacaggactcgttttgttcttgttctttgcaccaaagcatgttttgtttgtggtttatgtatgcagtgctagatgtcagtcccaggaccttatgagaactaggcgggtgttttaccactgagcaacacccccagcccagatccacttgttctgaaaggcctgattctaacccttcaaggcctgggcccacctatctcttctcatggctgcctactcaacaccaagcccatcccatagtaggcacacattaaattaagcaaggaagtcaaagagaaacaactctgcccttccttatttatgtagcattgtcaactcatgactgatatcactggctccatagtcctccctgagcctcagttaatttccacgctctctctgtgtgcatcctgggtgagtaacagctaggcagacaaacaggttagcacatttaaatagaatcaagtcaacctccaggctgggtgcagccttcattttcagtctttgggtctctgtcatcagactccttagataaataatttttcaacttttatttagcagctaactactcacaagcatttagaaatatgagcaggttggaccaggaacttgtgtctgttacaagctttctctggcttgctcaagttctaaaaatagcctgtactgtcagaatcacacatggaaccactgcactgaagggctgtgtataagattgtttctaaaatagcctctattgagtgagcctcacctcagcatctgtatttcctaacaggtaatcagtccccagaatggccgctaccaaatcgattcggatgttctccttgttccttggaagctgacatacaggaacatcggctctggtttcgttcctcggggggcctttggaaaagtatacttagcccaagacatgaagacaaagaaaagaatggcgtgcaaactggtgtgtgcagccacactgtgtgtctgactccctggcttagggttatttaccctcacattgggtcttacctaaggttcctaccccaaagtgtctgtcatttctggagtggcttgtggcttgggaccattcagctcctacatctctacttagttgtcttgtagcttgtaatctaattaaatgaatgttttggtgtgtttgacaaaggcttggatcacaccatctcccttaaatgggagtagtggagcttgcctgagttggaagatattggctactgttccctggggaggggtccatggcaggcaacagaggctagaaagacagggtgttccttaggactgcggaattatagggctgaactcagttgtacaagtttctgatatgaccctatctcttattaagcaatgtctgtttaaaattaatgcattggtacttcagaggactgctgggcagactggcagctgagaatatacaaatctggaatgtcactgcttaatgacacccagcagaggtctgcccgtttgtgggacaattctgggctgttcacttaagcacagttttctgaagtagcattctgagaacttcataggtgccagacaggtggatatttatgctctggaacactagaacacaaagagaatgaatggcttacagctaaagtagtgtgaatgcatctcagaacccttaagttcagagagctggacaccaaataagatctagtgtatgaggttttatttgtattaggaacaaaaacaaccacaaattcatctgctaaatgctgtgatcatggagtacccttgggacatagtgactggaaagagtcaggggattcctggtggagtctggtatttttgttttagttggaaatcacttctgtagtgacagtcaacagttaactgggtttgacattattttacagtgtgataaagttaaatgttattttctactctttgtggtgcttggaatcgagcccaggacctcacttatccacagcaagtactccatcactaggctgcatccctggcccgtgtccactcttgatttaacaaaaaagcaaaataatgaatatttgtcagatgccatgtttcagtctcccaaactacccacaagacagcaatgtatagtctttaatttgttctttcattatgattcactagatacgcctttaatcccagtacttgtggggcagaggcaggtggatcataataaattaaaggacaacctggtgttcatagtgagttccaggccagccaaggctacatagtgcaatccccatctcaaaacaataaaaattctgactaagtgatcttttattaataggaaaacaagacttatagtaagctatttgaagtatctatccagagtttccaaactgtaattatctggagaccttttataaaaaatggcaacccagtatcataatttttaaattttgatagttcatggggaaatggctttgtgggattgttgttcctttagtatttgttatagtcacatattttagggcagtgctttcttagaatcaaaatacaattaaaaatcccagacaggctcaaaaggatggaggcttatgaataaggtagccttccataatgtgacaactttcaagaacttcttattttcccagatgtgtgcacagcatcatttaaaaacaatattggaaattttacaatttttcttttgcccctagcacaatattaggagacattttagaatatctctgctctgccaatactacttatcacagttcttagtgatgaagacctgagctttcacgggatgtaaagattggtgagcacttttcttaaaggcttgagtctgaagtggtcaagggaccagtgacttcatcttatcacacagtgaggtgaaattttggaacacagtgttctaggagccatggacatgaagagtatcaatcataggaaattcttagctcagtcagtattttgaaaccttgttcggattcctaaactctaaatgaagtgaggttttccctaccctgtttttcattgtctaaaaaatgttcatatctaaagatgtcatgatgtagaagtgagtctgtggtaaacatttcttgacaccacggtgctctgttatacacatcaaggtgtccttgtgttgttttggcttcctgttttctggttgctctgtattgtctggcatttgttttattgtcctgaggtttttagactcttgcccctgttttgtgttgctagatccctatagatcagtttaagccatcggatgtggaaatccaggcctgtttccggcatgagaacattgctgagttatatggtgccgtcctatggggcgatactgtccatctctttatggaagccggcgagggagggtctgttctggagaaactggagagttgtgggcccatgagagaatttgaaattatttgggtgacgaagcacattctcaagggacttgattttctgcactccaagaaagtgatccaccatgatattaaacgtgagtagtggggtctgccttattgctgtgagatggggctagtgagatgctttagcccaaaggcactcagcggcaggcagctccctgcagacacagcatccttttctgtgctccataaggggctcatagcaggaatattagcagtcagaagggaggctgaggactggagatcaatacaaggatgatgaccacgtgtttgttggatgtgctgcctctgtccttgtattgtgatttaaaaacaatcagtactgagtgggtagctcaaggatagaactcctgtttagcctatacgaggccctgggtttgatccccagcacgcgcgcgcgcacacacactcacacacacacacacacacacacacacacacacacacacacacacacacacaggattaaataatgcaagcacataggcatatatttttgagtaacaaataacctcttaattttgagccatgatttggcaacaattcattaaacaatctctttttaaaaaacccaaattaatacctaatgttgaattgcactctgtagaccaggctggcctagaaatcagaaatctgcctgcctctgcctcccaagtgctgggattagaggcgtgtgccaccaccgcctggcggacaacacagatttaatcagaagaaatccctatacatatatatttttaacaacagtggctcaatagtagatgtgtatatcttagattttgaagccaaaaccgtgagctttcctgctggctgtagctcctagctgcccacactaggtgggttcctgacaggcctcaggtgttttcacctgactgctcccctacttctctcttctggggtgaaccacctgagtcattatcagaagcgtttccttctgctctgcttggaacttgctgttctagatgattttcctgttgggttaggatgcattaactcacattaaaaacccctctcgttgcagctagcaacattgtattcatgtctacaaaagctgttttggtagattttggcctgagtgttaagatgactgaagatgtctatcttcccaaggacctccggggaacagaggtaattgattgattgtattggtgatggtctggaaatgctgtgacaatcagcaatgaaggggacaaaatggcaacattggatgatcgttgtcaccagaacaaattcattttacattttaccttttttactatttctatgataagactttaaatatgcatggttatatttatagatattttttattactgtttatatatacaacacaaagcacttacagacaattcagtgccaaaacagaggaccagttgagcattcctaatccaaacgtctaaaaagctagacaagacctagagagaggttgccaagtaaagtgcttgctacacaagcccagggacctgagttcaaatcctgagaacccaaataaagccatgtatggtagacctagtgtgactatgggtagatctaagtagacaggagtcttccccaacgctcacaggagagtagcctggaatacaggactatgaataagagatcccgcctcaaggtgggaagtgtcatatgtgcagtgtcgtatatattacacagacagacagacaaggtgaaaagaaaagcccataaaaatatcaaatattccaaacatgagcttctaaatctgatttttgattctaagtttctcaagtaagggatactcagaattcatctttaaaactgttagagaacaatagtcaacttatagttcacttagtaccttaaatgaattatttcttccttaaaattattgtgtgtaaatactggtataacaggcagatgactgctattatcctattttataagaagacaacggacagattgtaacatggtgcctgatattacccagtcaccagcagagccagagtttgaattcttgaagaataagcatttagttttgtattttctgtgaattcaggctctaaattctgagtaacatttaaaacagaactaccacattactacatatcaaattatgactactgcaactcctggttcagtagttttctcagctctggctgttagcatttactgaggagtggccaccgatgcctgcctgcctgcctttcaccccaggacagcataagcttggagtcctgagcacagatgcaccctgttggaatttggagtaatagaatgtaactagtctgccaatcgaagctcactgagaaagccctccctggggagaagtaagcttcggtgattcctcggttttgatttctgtgagacaggcctcagtatctaaccctggctgacctggaacccataatccccctgcttcagcctccctggtgctgaggtcatactagttcataagcctcttttaagttaaagaatgtttgtttcctgcttaagagagctttgtcacagtagaaagtctgagcagacttaatgctcaggacgttgtctttggaaggcgtctccacttttaggcattagtcaggagtgcagttccaggacattccacccttttccctggaaccagtttgagaaacaaaactatttatggtattagagagaaaaaaataccttttatttcctggcagtgcagtcaagttgaagattttgcaatgttggggaaaatcttaggtctgggattctcaaccaggatggttgggtgtagagtcacagatcttgatcttcaatagcttttcttcttatttgagtttagaatagctcaggctggccttagttgcactatatagcctaggctggacttgtattcaatatcctcttgaccctgcctctgtgtacttattagaattatggggcatatagcatactcatctagctcctgagtagtatttagatgaagtattttcagccaatgttaatttgcaggtattcagtacaaaactgatccggttgtctttttttgttgttttgtttgttttgtttttttgagacagggtttctctgtatagccctggctgtcctggaactcactctagaccaggatggcctcaaattcagaaatctgcctgcctttgcctcccaaatgctgggattagaggcgtgcaccaccaccgcccggcctgggtgtcttcttataccctgcccccatcaattgtctcccttgtactgtctgcacagtgctcacaaatggaggcctgattgtgatcagtgtgcaaaggacaatgaagtgctaatgcacttcagcaagtctgcttttactccttatatgaaagagcaaattagatattactaaccaggcaagcaggcaggttcacttcctttaggatatgtgatcgctttgctgctgggaaggcaatgtctgtttcagatttctgcagtatatttcacaactacagactgcacctctagatagtgcttgctctctctctccctctctccctccctctccctccctctctctctccctcgctccctctacccctttctccattcataatcagagtgttagacagtaacttgagtgttacactgtaacatgccatatacccaaagttaatctggtgtatatttactggtttttatatatcagaaggggaaaataggaaatataaataacacactagaattactttgttgtgttttttgtttgtttttgatttttatagttcttactttcttctgagtctagcatcagcttctgtaagttaacatataatgatcatgggcacatgtgttcatgcaggcattccgtggcagcctcttttccttgctacaaaagccttagctctgacttcaagttcccctgcacattactcattcctgggggttgaggggttagacaactccggggccagtgctgtctgttttgtcctaagccttccaggcagccagcccaaagatagacctttctgtcctgcctgctctggttctttccggagcttgaggaggaagaaacactgagctggaagctcctggctgtgtgccagaagtctgcaccatggcagacggatactggcagctccaatcataggctgggcatgagggcatagagagctgggatcccacccatgtgtccatttgcttcgttcccactctgtgtgacagagggagaggaggcaggcatcccccactgacagtaagcacacatcatttctttcttcactgtattcgattacggtaagtttcaacaggaagtcccctcttcttggcaaactacacgcgtaacttcttgttgatcgtggggtacaaagttgactaatttgtaattctgtgaatgagattgtgcttatttaaaaagtgaagagacatctgcagtgcattgtctgcagggaaagtggatgagcatggagctcggctacagccggcttgctggggaagaagaagaagtgtgttttaggaaggagttgagcctgctaggaaggggaaactgggcaatttccccgtttttgtaagttgattttctacttatttactcagaaatgaattctgagaacaccaaccctttccccatgttcacacaacagcataaaacctttttaaacttcatacctgaagggatttgaatcccgagtggttcatacttgtgagtcttcctctcctgacctctttcctccccaccctgtctcctcttttttctcatctcttccttcattattctgttttctttcctcccccatcccttcatttactctttttttcttgtttggtcttggagcatttgtgttagtggtgaggtgtcccaaggatgggacccaagtagaggcacagggttcattaacctgaaggacacttagcaggctattctcagagtggctgtgtcttactgtgaccagtcatatgagggcagatgtggaattttccacatgtggcatcatccaactcaaaagctttcgattttggaaggctttgtacttttaaattagagttatgcagcctatagtgttaattagaacactagtgttctgtgtctgtgacagccctacaggatttgtctgtgacagccttacactctgagtctgtgacagccctacactctatgtctgtgacagacctaactacagattattggtggccaggtctttcttttaccttttcatcttaaatttagaaaagcaaaatttacagaaactatccttatttactcagcatcagcttgggaaatcaaatgcaaatgatgctgtattttgttattttttgtatctattctttgggggcagaaaggcctctgtctgtagcctaagctatccttgagctagtggcagtccttttgcttcaggctcagaatgtgcacactcttgctgtctcagacatttgctatttagttgctgggatacttggcagatataaatgacttcctgggccattttcccagctttaccctttatttgtctaggttcttcccttctaagccactgttgtaaaaatcctgcaggattccgccaccgtttggcaattaaatgataaatgggagaaatataggtgtagtcttggctaagtctaaaagaattgctgtaatagtcaatcatgtgtacctgatgagcatctacagaactcagaccagcgggagtcagcaggttcagaaacctaatcctttgctgttagatctgttgtgtgttcagtccagggacagagctgctcttgtcatactgcagtgacgactccatccaagttgtcctgactctagagaacgtgctgggattttccttggcttgagggatactgcagtagcattccctctgaaagccagggcatgcagcaaataccacagaggcaaaggagccagcttctagaactggacatggagaagagaggcagataaatgaaactttcctcatctttttcagatatacatgagcccagaggtgatcctatgtcggggccattccacaaaagccgacatctacagccttggagccacactcatccacatgcagacaggcaccccaccctgggtgaagcgctaccctcgatcagcctatccctcctacctatacattgtaagtgagtgtcagctgggctttcccaagtgcatcccaccacctcataccaagacgatagggtaatgggagaactgcgacctaggagacgtggctcccaattctgttattgacatgaaaggctgttcgaatgcaaactgactgaaatgaggggacagaatttacatgctatcccactgtgtgataagacacacttagaaacatcagattcggacaactctgtcagttctttttaaaataagaaaatatagtagttttgttctctgttcccctcaacctccctttgctttgctgaataacctagcatagaacagagcttgggaggaagaagatgcaggtatttctctgctgcagtacccactgttggacccccataagaagctgtcacagctactttaaacccagctttaaaccaaaggtggtttaaccaaccctaggaagttggagagtatttgctagatcatgcagtaggcaataggtctctcccctagcctttcctgcagaagatatacctctactccatccatgcttacagagctggtttgttggcagatccacaagcaggcacctcccctggaagacatcgctggtgactgcagtccaggcatgagggagctgatagaagctgccctggagaggaaccccaaccaccgccccaaagcagcagacctactgaaacatgaagccctgaatcccccaagagaggaccagccacgatgtcagagtctggactctgccctctttgaacggaagaggctgctgagcaggaaggaactacaacttcctgagaacattgctggtaggacaccatgctgggtgtgtgggtgtatgcctgtgggtgtggagccactggcctccctcctgctgtctacagcaaagctctgatgtgggtcaagaaagcttgtgtgtgtgtgtgtgtgtgtgtgtattattggggagcaggggtggagcagggggcggaggtgaaggtcagccatgatacatgacagcacatgtctgtaataccaccttttggataaggcagatagaagttcaaggtcagcatcaattacttgagactttgtcttaaaaagagaagaagctgggcatggtggcacaggtaggagggccataagagcaaggcctgcctggattactgagtttgagttcaaggctaccctgggcagcttaatgaaatgttttgaaataaactgtaaaacagatgctggagctgtaacttggaggcagaacacttgcctgtcatgtacaagatttgagttccatcacttgcaacacacacacacacacacacacacacacacacacacgcacgcacgcacgcacgcgcgcgcgtgctcgctcactcgctcatacacaccaaccaggcacatctctagaatttaagacagaaagattgcccagatgatagcacaacatagtgaccccttacctaaatgaaacagaaaggggtgacttcctaagcatcatgcaatatcatctgagagacagaagaaaacattcaggcaacactgtggatcagctcacccatcaccagaattctagccattttcagtgtgaactgaggtaacacagtcattggatggtgcctccgatctgcgttacttgaaacagagtatcccttgactttagaaacagagagtggggcctgccatggctgggcaggcttctaattcagccttggctccgagtgctgagaaagtgctcagtctgatgacaccttgcttttctgtcttctgcttgaagtcgccgtgttggctatgaatcgttcccacctaggagggctggtgtattccacccctaccctctgagcctggagaaggcttctattcactcacgtagatcaaaagtcagaggtcaagcctaaagtgcctgcattttttatccctgtctaatttcactatatctcgtggggagggggaaatgaggttctgatgaatatgctagagtttctacttcattccttgtcttcattgacccccatttgacccctgtgatctgtgtatgctattccataagtagcccaggacgttcttaaagccatctgtgccagagccacagctggggactgtctcttgagcccctcaggggtcttccttaacagaagggacatggagttgttacttgctgggccatccaatcacttatgttatttcctccttgtttccatgttgcctctgcagattcatcatgcacaggcagcaccgaagagtctgaagtgctcaggagacagcgttccctctacattgacctcggagctctggctggctacttcaatattgttcgtgggccaccaaccctggaatacggctgatggatggctttgttggcaacaaaacaggatatttctctcctgaatgttggttttgcagaccctacacagcggccctggatagtgaattttacccaggtttttaggggtcaaggaggcctctagtgacacaggaacagctgtggcccttttttgaagctactctgacatgtcccagagcccaaggttctcatttctcaggtggtgggactagacagagggagtggcaagctcagggaaggatcatttctggtgataattccattcactttgcactttgatgggcattaaaaaaaatagccctcacaagatagtaacctcaaattcctgttcttggttcttatttaagcatgggtcttcattcaactcagaaggcctgatctgtgtatattctggtgtgtattgtatggtagctctttgagccttggttggtcgactctagtgtaagtttaattaattgtatattgtgtgaatagaacaacttaaatattacagcaatacactgggctagtgtctcacaaataactgatttactcagagccacctgacagcaggccactagtgacagtttctgttatgttcctatggaaacactgtactgtacatactatgcttaaaacatttaaaacacaatgttttaaatgtggacagaactgtgtaaaccacataatttctgtacatcccaaaggatgagaagtgtgaccttcaagaaaatggaaatatttgtaaattcttggtaatgcctccgttgtaattaatgaaactattttctttaaagtgtttctatgttaaaatagcatactgtgtatgttttatccaaattcattcatgaatctttcatatatatatgcatatatatacatatattgtagagtgtgaatattcttatttaaagtatatttttacattatgcaaatgaactttaacattttagtccaatgtgactagtcaaataaaccaaataaactgagtattttgtcttaatttttgggattgtatatttctcagctgggtcacaggtttgggataagaaactttgtcactggctggctcctctgctgttgccatggaatgccttcatgctgaactggtaaatgctttatccttggttggctgcactgacacagaaaaatacctgtgacttggggaaagtattccagtctgtgttgtatcttgtgtttatacagttataccaccttgagtgcagacttgtaagctgtttacttgtgaatgctaacactagtaactaacttgcttataaatcaaatcacattcaccaaattccagtggagacagtttaatgggaaggcacatgagaccgctaagtgatagaatggagcctttccatatgtgctggatacagtgtaccgtgtctctgtatggtaatcagcatcccagcactgtaaaaaaatgcctgagataagcagctttcaggaaggaaaggtttagtgaactttggttcaaggtttcagcagcttctctccatggctgcttgactctgttgcctttgggcctataatgaggcagcgtatcacagtggtggtatgcagtggacaagatgctcattccatggctcctgggagagagatggagagagaaaagcaaaaccggaacccagtattctcttcaagaacaccagcccaaactttactcccctaggctgctccgtctaaatagtaccatgggctgggagtgtatacacacacacacacacacacacacacacacacacacacacacacacacacacacagagagagagacacacgacatgcattcttcttaggaaacattttgagttttgttttttttttctcaagagctcaaagcaagtgaagagtagagacatgtttgagactagacctttctgactgcacaactcaagcccttcttcagtctgctgctcagggagagaccatcatctgtaagggaaagaccaccttgtaggagaggctcggcacaaactggaatgcaatgcctaagtaagggcagaggtgagattatcacaaaactgatggaacttcaggttcagaactcttcacttgtgtgagcccaggtgaggcctgaaagacttagttctgccctttacttaaaggttcatattaagggcatttgaatacggaggttccatggtatctcctgaccttgtcctctgcctgagaaacacagtaacttgatcttccattgatgatgtattcctgtgttcaagggaaaagcctgtgtttctactggagggcctgaggagatattctgtaggtctgaggacagattcatgccaagtttcactggcaaccaggtagaatgcgcccagttagatggcagatttgttaatggagaattgaagtctcatgggggagagggggagagggctgctccatgagcaaagaactgtggggcacacaagaaaaaaggatcctactcatttcatgaattcattatttttaatagctgagtagtactccattgtgtaaattttctgtatccattcctctgttgagggacatctgggttctttccagtttctggatattataaataaggttgctatgaacatagtggagcatgtgtccttattacatattggagcatcttctgggtaaatgcccaagagtatagctgtgtccccagtactctgtccaattttctgaggaactgccagactgatctccagggtggttgtacaagcttgcaatcctgccagcaatggaggagtgttcctctttctccacatccttgccagcatcttctgtcacctgagtttttgatcatagccattctgactggtgtgaggaggaatctcaggggttgttttgatttgcatttccttgatgactaaggatgatgaacatttctttaggtgcttctcagccattcagtactcttcagttgagaattctttgtttagctctgtaccccatttttaatagggttacttcttgagttctttgtatatgttggatattttccctctatttgatgtaggattggtaaacatcttttcccaatctgttggttgttgttttgttctcttgacagtgtcctttgccttacagaagctttgtaattttatgaggtcccatttgtcaattcttgatcttagagcataagcttttggtgttctgttaaaggaaacccaccccccccctcgcccacaagcttgaggctcttccccactttcttttctattagtttcagtgtatctggatttatgtggaggttcttgatacacttggacttgaactttgtacaaggagataattcacgaaattcgtaggcaaatgggtggaactagaaaatatcatcctgagtgaggtaacccaatcacaaaagaacacacatgatatacactcactgataagtggatattagcccagaagctcagaatacccaagatacaactcacaaagcatataaaactcaagaagaaagaagaccaaagtgtggatactttggtccttcttagaagagggaacaaattatccatggaaggagttacagagacaaagtgtggagcagagactgaaggaatgaccattcagagactgccccacctggggatccatcccatatacaatcaacctacctagatacttttgtggatgggaacaagtacttgctgacagaagcctgttatatctgtctcctgagaggcctgccagtgcctgacaaatacagaggtggatgctcacagccaaacactggactgagcacagagtccccaatggaggagctagagaaaggacccaaggagctgaaggggtttgcagccccattggaggaacaacaatatgaaccaaccagactcagcctctccccagagctccctgggactaaaccatcaaccaaagaaaacacatggtgggactcatgcatatgtagttgcatatgtagcagaggatggcctagttggtcatcaatcgggttttcagagggaaatcaggaaaggggagaacatttaaaatgtaaataaagaaaatatccaatattaaaaaaaaaaaaaaaagaacaaaggatcctggtgctctgagctgtctaattccagcagaaatgaatcacattccattctggaattattagacgattctcattttcaatttataacatctattttaaaaaagacacttctagtcaagtgtttaattgccattttaatttttacctaagagccaatttttattattattatttttagtataagaaatggaatccagggcctcacatgtgctaaacaattgtctcaactatagaaagccacttttaaaagccagtttcagcagtgatgcctagaacatgcccattagcagtaataggatcaggcacctacaccagcctctcacaccttgttctgggccacacaggaacagcatcaagccacacccatctgacttgtgtacttgtacagcaacacagcagggtttgtacctgcaactggggaggggagacaggtagatcagaatgaaaaaggatcacagtgctcctactctataggacacaacctctgaccaggagcaacagcagtctcttcaagagctggctcctgatatacacatttctacttcctaggtcagaaataagctgagctgaggcagctcataactatttcctggaagaagagagcatgtccttcattaatttttcatactaggatcaactctgatgacttgaccaaatcggagacttctgctccaccacatatcagagaaccagaagtgtgcacaacaggagacctgtttacccagaagtcagtgagggactccagaagaaggctgtctgaacatagaaattgatcttcagttgactgtgagcaaaacaatctcaacaatctctcactacaactctgcatggagatgtcatgggttgattctaagtggatcatgtggggaaaaaccttaagatggtaagagtagggaattgatactatcatctttaatgcatcagctagtaacaccttttgattcattaatttaaccattcaatgaaacttcatcttcccatatgaatgtgaaatttcttttttgggttgtgtgtgtgtgtgtgtgtgtgtgtgtgtgtgtgtgagagagagagagagagagagagagagagagagagagagagagagagagagatgtatatagacaatggtcatattccctgctccctttcacactccaccctatttttttgacagagagtcttcactgaatctaccactcattcatttggccatactggctggccagtgatatctaggaatctgcttgtgtctacaatctcagcactgtggatacactgttgcatctggccttaggtcctcaggcttacacagaaagccctttattgacagagccatttcattaaccccacaaatctaaaatttcatcaagcattttatttgaatatgtctttgtagcggtccatgtattcacaaatattcttgacattttttgcctaattaacatacatttgagagatcaaggtagttgaaaagaaagaatattttcagcacaaagaagattaatggacagcactgaagccttggatctaggagtggatttcacttctggctatcctccttcttgaagataccttctctgaacccgtaagattgagggtggaagaagagtgccttcaaatagcaacaagatggtcttctgaatatttgaagtttgaatgaaaagaaaagagcacacacatgcatacacacatacatatacacatatgtacatacacacacacacacacacacacgtcctctcctctctctgattaggtatttacactgttggaaaatccaggtcttgcctaagtttttatctctagaggatagacacagtctgaggagtgctatagaactgcttaagacatctttcaccttctttgtgtgtaatttaactgcaatagccagaaagagagagaataaaagaaaaattcattccaattttcttactgaaacccaagaagtatctttgttaggtctgtccagaaagcaggagggagcagaacatttggcacttgcctatccagcttctccccactacagttacatcccctaaccatcctaaaagtaactataagtaaatagccctaaaagtaactgcaggttattccactatacacagtttggtgattctataccagcaaacatgcacacagtaacataatttatacacgcctgtgtgtccttttggcagaacattttccaaatattacagagagaagtatttcactaagcttggcccttagcatgagtcttactttgtaggagaactatcctagtcattccttcagtatagtggaaggctctaattttccttgttcatttcttatgtcttctgaaaactggtgttaaagttgcatctggcccctgattctttttttttttttaaacaaaattgaatggcgaacaacttaccaatatgcctcaggtccatacttacttgttcagagagcagggtgggaaccagagccacttaattctaaccacaggattttactagcaggatgtagtattgttttctgcttactgcttctttcctagtgtcttttgcctgggaatcccagagcagaagtaaggcattacattatactaatgctaacgtcagggtatggggagttgataatagctctctggataaactgaccaagtttctcttgtaaggacagtgaaagactaaacctgtcaccactcaatatcaccaggagtaattgagaattggctggaggaaggagctaagaaagacaggccaaatccaaatgatattacagaaatgatagtgtttagggatagaaaactaagtcatggcttccccactgaaattagtgaaaagagatgagaaacgatggataccctagggtctaagatgctgtgtgtgacactttatagtcacactccatgaactaactcagtggcactcaaggaccttgtcttagggttacttttgttattatgaaacaccataactaaagcaacttggggagggaagggattatttggcttactcttccattatcactattcatcatttaaagaagttacaacaggaactcaaacagggcagaaaactggagacaggaactgaggccatagaggggtattgcttactagcttgctcagccttctttattataaagcccaagaccaccagtccagaggtagcaccacccacatggactgaaccctcccacatcaatcactaattaaaaatacaccctacaggggcttgcctgcagcctgatcttaagaaggcattttctcaattgaggtttccttctctaagatgactctagcttgtgtcaagttgatgtaagactagacagcacatacctttttgtggtagccataataatggggtattctagttctatttaggagaaaatgaatctcagaactccatgaatttggcagtctgaggtcctaatattcctaataatggaggaaagttcttccaaacttgctttgcattagagttagcaggtgtgttaggagtattggttttcatcctaaattgccttgattaccaaagccagagtgggattctattgcagagcctaggcccaggcaggggtttacaaaagcccatgtttgggcattacagagttggttcagagttggagaaacagtcaaaacatgacttcttgttctgtgaagttttccttttgcaaatctgggaaacaccctcgtagaaagcagacaggttctttatcaagtgcattattattatccttagcctagtggaagactgaagctacaagaggctggagaagcaggtaagacacttgctagtgcatggtaaacctgaggttgaggctcaagtctacctggcttcaaaatttgaggcccttccactaaatagtacaactctgtgaaatttctgaagaaaaagggagaaagaaattttttaccaaaacttattaaaataggaattcaagttaggcaaagatgacttgatctataattccagaacttggggtgtaaaagcagtaagatcatgaatttaagcccagcatggactatttagtgagactgtctcaaaaacagccaaataatgaataaatgaatggatggatgaatggatggacaaatgtatgaaagaataaataaataatgaaataggactctaagtatggtgacatagtatttaaattttagaagcaaagttattaacatattaaaacaaaatagctgtagaaagtgttcttcattcctaagtatcattttgttggaaagtgattacaggaatggtgagaacagcaggagcaggtaatgagaagaccaaacctaaggataataggtatagacaagaaggaagattgccaatttaaagggccagtaaatatcttcaacaaaattatagaagaaaacttccctaacctaaagaaagagattcacatgaacatacaagaagcctacagaactctaaatagtttggaccagaaaagaaattcctcctgtcacataattatcaaaacaccaaatgcacaaaacaaagacgactaacagcagtaagggaagaagttcaagtaacaaataaaggcagacctatcaaaactacacctgacttctccccagagactatgaaagctagaagatcctgggcagatgtcatatagaccataagaggacacaaatgccacctcaggttactatacccagcaaaactatcaattaccatagatggagaaaccaagctattccatgacaaaaccaaatttacaaaatatctttccacaaatccagcccttcaaaggataataaagggaaaacttcaacacaaggaggaaatctatgccctagaacaagcaagaaagtaatctttcagcaagctaaaagaagatagccacatgaacagaattccaactataacaacaaaaataacaggaagcaacaatgacttttccttaatatctcttaatatcaatggactcaataataatacatagactaaaagactggttacataaacaggacccaaaattttgctgcatacaacccacctcagtgacaaagacagaagctaccccagagcaaaaggatggaaaacaattttccaagcaaatggtcccaagaaacaagctggagtagccattctaataaataataaaattgaatttcaacctaaagttatcaaaaaaagataaggagggaaacttcatactcaaagataaaatctaccaagatgaactcaaatatctgaacatctatactccaaatgcaagggaatccacattcattaaagaaagtttactaaagctcaaaacacacatagcactgcacacaataatagtggtagacttcaatagcccactctcatcaatggacagatcatagaatgagaaactgaacagagacacagtgaaactaacagaagttatgaaacaaatggatttaacagatatctatagaacattttatcctaaaacaaaagggtataactccttctcagcacctcagggtaccttttgcaaaactgaccatataataggtcacaaaacaggcctcaacagatataagattgaaataatcccatgcattctatcatatcaccaaggactaaggctgatctctctaacaacataattaatagaaagctcacatacatgtggaaggtgaacaaacactctactcaatgataaattggtcaaggaaaaaataaagaaaaaaattaaagattctctagagtttaatgaaaatgaagccacaatgtacccaaacttatgggacacaacaaaatcagatctaagaggaaaactcatagttctgagtgcctccaaaaagaaatggagagagcatacactagcagcttaacagcacacctgaaagctctagaatgaaaagaagcaaattcacccaagaggagtagatggcaggaaataatcaaactcagggctgaaatcaaccaagtggaaacagaaagaaccatataaagaatcaaacaaatcaggagctggttctttgacaaaattaacaaaatagataaacacttagccagactaaccagagggcacagacacagcatcctaattaacaaaatcagaaacaaaaagggagacaaaaacaacagaaactgaggaaatccaaaaaatcatcaggtcatactacaaaagcctatactcaacaaaactagaaaacctgaatgaaatggacaacttcctagacagataccaggtaccaacgttaaatcaggatcagattaacgatctaaacattcccatatcccctaaagaagtagaaacagtcattaaaagtctaccaaccaaaaaaaaaaaaaaaaagcccaggatctgatgggtttagtgcagagttctatcagaccttcaaaaaacacctaatacaaatgctcctcaaactattgcacaaaatagaaacagaaggtactctacccaatttgttggaagccagcctgcagctaacatgaaccgggtttcacctgggaggcaacctggggctgaaaagagaggggaaactaggtggtcaagagaaagaatggagctaagtcaagtttcctgatcaaagctcaaatgtttaataaaagtctgcgcttataaagaggggaacccatcccttgccacactaagtttcttgatgtcatgatgccaagttgtcagcacagacttttagcagtaagtcgccaaatttacaggttgcagttaactccagaaaatcttggagaaccggtttggcctcaaggcaggtggtaggcagtgtcacatcaaaggaaactagctgagttggaggagctgcacagcaggtagcataatctgaatcagcctgcctaggctggaggaggttacatttcccccctgttatcaatattaaaaaaaaaaaaaaacggactgaggcataaaatttatttatgctctatagtcctgcctgggaattatggtggctggtggtcgtgcctgtcttaggaaatcttagatcttcccaaaccatccaattctgtcattgaggctatgtgcagctagtttgtgttatatttcacacaaaacatggctctgtt

SEQ ID NO: 104 - DNA, 2507 bp, Mus musculus
agtgcaggcctgggctgtggcgcgggacgcgacgactggcgctcaccgcgcctcctgcgggggacactgcctggactgctgaactctgtttgctgagcctggactcccagcaggcactacagtgatggagtacatgagcactggaagtgacgagaaagaagaaattgatttattaattaagcatttaaacgtgtcagaagtcatagacataatggagaacctttatgcaagtgaagagccaggagtgtatgagcccagtctgatgaccatgtatccagacagcaatcaaaatgaggaacgttcggagtcactgcttcggagtggccaggaggttccctggctgtcatctgtcagatatgggaccgtggaggatctgcttgcatttgcaaaccatgtctccaatatgacaaagcatttttatggacgtcgaccacaagaatgtggaattttattaaatatggtaatcagtccccagaatggccgctaccaaatcgattcggatgttctccttgttccttggaagctgacatacaggaacatcggctctggtttcgttcctcggggggcctttggaaaagtatacttagcccaagacatgaagacaaagaaaagaatggcgtgcaaactgatccctatagatcagtttaagccatcggatgtggaaatccaggcctgtttccggcatgagaacattgctgagttatatggtgccgtcctatggggcgatactgtccatctctttatggaagccggcgagggagggtctgttctggagaaactggagagttgtgggcccatgagagaatttgaaattatttgggtgacgaagcacattctcaagggacttgattttctgcactccaagaaagtgatccaccatgatattaaacctagcaacattgtattcatgtctacaaaagctgttttggtagattttggcctgagtgttaagatgactgaagatgtctatcttcccaaggacctccggggaacagagatatacatgagcccagaggtgatcctatgtcggggccattccacaaaagccgacatctacagccttggagccacactcatccacatgcagacaggcaccccaccctgggtgaagcgctaccctcgatcagcctatccctcctacctatacattatccacaagcaggcacctcccctggaagacatcgctggtgactgcagtccaggcatgagggagctgatagaagctgccctggagaggaaccccaaccaccgccccaaagcagcagacctactgaaacatgaagccctgaatcccccaagagaggaccagccacgatgtcagagtctggactctgccctctttgaacggaagaggctgctgagcaggaaggaactacaacttcctgagaacattgctgattcatcatgcacaggcagcaccgaagagtctgaagtgctcaggagacagcgttccctctacattgacctcggagctctggctggctacttcaatattgttcgtgggccaccaaccctggaatacggctgatggatggctttgttggcaacaaaacaggatatttctctcctgaatgttggttttgcagaccctacacagcggccctggatagtgaattttacccaggtttttaggggtcaaggaggcctctagtgacacaggaacagctgtggcccttttttgaagctactctgacatgtcccagagcccaaggttctcatttctcaggtggtgggactagacagagggagtggcaagctcagggaaggatcatttctggtgataattccattcactttgcactttgatgggcattaaaaaaaatagccctcacaagatagtaacctcaaattcctgttcttggttcttatttaagcatgggtcttcattcaactcagaaggcctgatctgtgtatattctggtgtgtattgtatggtagctctttgagccttggttggtcgactctagtgtaagtttaattaattgtatattgtgtgaatagaacaacttaaatattacagcaatacactgggctagtgtctcacaaataactgatttactcagagccacctgacagcaggccactagtgacagtttctgttatgttcctatggaaacactgtactgtacatactatgcttaaaacatttaaaacacaatgttttaaatgtggacagaactgtgtaaaccacataatttctgtacatcccaaaggatgagaagtgtgaccttcaagaaaatggaaatatttgtaaattcttggtaatcgctccgtgtaattaatgaaactattttctttaaagtgtttctatgttaaaaatagcatactgtgtatgttttatccaaattcattcatgaatctttcatatatatatgcatatatatacatatattgtagagtgtgaatattcttatttaaagtatatttttacattatgcaaatgaactttaacattttagtccaatgtgactagtcaaataaaccaaataaactgagtattttgtctt

SEQ ID NO: 105 - DNA, 1404 bp, Mus musculus
atggagtacatgagcactggaagtgacgagaaagaagaaattgatttattaattaagcatttaaacgtgtcagaagtcatagacataatggagaacctttatgcaagtgaagagccaggagtgtatgagcccagtctgatgaccatgtatccagacagcaatcaaaatgaggaacgttcggagtcactgcttcggagtggccaggaggttccctggctgtcatctgtcagatatgggaccgtggaggatctgcttgcatttgcaaaccatgtctccaatatgacaaagcatttttatggacgtcgaccacaagaatgtggaattttattaaatatggtaatcagtccccagaatggccgctaccaaatcgattcggatgttctccttgttccttggaagctgacatacaggaacatcggctctggtttcgttcctcggggggcctttggaaaagtatacttagcccaagacatgaagacaaagaaaagaatggcgtgcaaactgatccctatagatcagtttaagccatcggatgtggaaatccaggcctgtttccggcatgagaacattgctgagttatatggtgccgtcctatggggcgatactgtccatctctttatggaagccggcgagggagggtctgttctggagaaactggagagttgtgggcccatgagagaatttgaaattatttgggtgacgaagcacattctcaagggacttgattttctgcactccaagaaagtgatccaccatgatattaaacctagcaacattgtattcatgtctacaaaagctgttttggtagattttggcctgagtgttaagatgactgaagatgtctatcttcccaaggacctccggggaacagagatatacatgagcccagaggtgatcctatgtcggggccattccacaaaagccgacatctacagccttggagccacactcatccacatgcagacaggcaccccaccctgggtgaagcgctaccctcgatcagcctatccctcctacctatacattatccacaagcaggcacctcccctggaagacatcgctggtgactgcagtccaggcatgagggagctgatagaagctgccctggagaggaaccccaaccaccgccccaaagcagcagacctactgaaacatgaagccctgaatcccccaagagaggaccagccacgatgtcagagtctggactctgccctctttgaacggaagaggctgctgagcaggaaggaactacaacttcctgagaacattgctgattcatcatgcacaggcagcaccgaagagtctgaagtgctcaggagacagcgttccctctacattgacctcggagctctggctggctacttcaatattgttcgtgggccaccaaccctggaatacggctga

SEQ ID NO: 106 - DNA, 47573 bp, Homo sapiens
  misc_feature (46686)..(46806): "n" at positions 46686 through 46806  can be any base.
atcaaagcatctaagtattaaggaaaaaatccttctgggctgagtgcgggtggctcatgcctgaaatctcagcattttgggaggccaagcaggaggattgccagaggctgggagttccagaccagcctagccaatataatgagacccctgtctttaaaaaaataataaaaatttaaaatattgttttaaaaaggaaaaaagttctgatgggcattactccatagatttaatttaaaaaggcaagcaatctcccctcaccacactaaagaaacttaatttgctggcaattgcttttagtactgcagcataactgctatggtttggatatgtcccctccaagattcaggtgttgccaatgtgatagtgttgctggaaagaggtcccagtccagaccccaaaagagggttgttggatctcatgcaagaaagaatttgggacaagttcatagagtaaagtgaaagcaagtttattaagaaagtaaaggggccggccatggtggctcacgtctgtaatcccagcactttgggaggtcgaggtggacggatcacctgaggtcaggagttcaagaccagcctggccaacatggtgaaacctgtctccactaaaaatacaaaaattagcctggcatggtgatgcatgcctgtaatcccagctactctggaggctgaggcatgagaatcgcttgaacctgggaggcagaggttgcagtgaattgagatcacgtcactgcaccccagcctggaggatgagactctgtctcaaaaaaaaaaaaaaaaagtaaaggaataaagaatggctactccataggcagggcaggggctcaacgaaggatacctatagttatttcttgattatatggtaaacaaggggtggattattcatgagttttcggggaaaggggtgggcaattccataactgagggtttctccgctttttagaccatataggataacttcctgccattgccatggcatctgtaaactgtcacggtgctggtcacatggtgctcttaacatgtgaatgcattgtaatttgcatataatgagcagtgaggacgactagaggtcacttttgtcaccatcttggttttggtggattttggtcagcttcattattgcaacctattttatcagcaaggtcttgtgccgacctcctatctcatcctggaacttagaatgcctaacctgtgaatgcagcccagtaggtctcagccttattttacccagctgtattcaagatggagtcactcttgttcaaaagcttctgacaacaggattaagaggtgggacctttaggaggtgatcaagccatgagggctcttcctttgggaataggattaaagcccttataaaagaggcttcagggagcagtggctccatagccctttgacaatccatcatgcaacaaggcatcatcgtggaaggggagagcagccctcaccagacaaccaaatatgcccaacctgccagtgccctgatcttgtacttccctgcctctagacctgttctttatacattctcctctttataaattacctaggctcaggtattttgttatagcagcacaaaaagggactaagaaaggaaaagtcaaggaacaaaatgtgtttagctcagcttaaaacaaagtctcacatgaagataagcacaccacatccttttaaatccgtttcccaaaccattgcatggggaaaacaccatttcaaaaagactaataaattatttttgaagggtataatattctagttttattttgttcatttttttttttttgatagagtcttattctgttgcccagactgaaatgcagtggtgtaatcttggctcactgcaacctctgcctcccaggttcaagcaattctcctgcctcagcctcccaagcagctgggattacaggtgcacgcccccacacccggctaatttttatattttcagtaaagacagggtttccatgttggccaggctggtctcaaactcctgacctcaagtgatctgcccgccccggtctcccaacgtgctgggattacaggtatgagccactgcacctggtcacgcatgttctttttttttttttaaagacagagtcctgctctgtcacccaagctggagtgcagtggcctgatcacagctcactgcagtctcgacctcctcagctcagtcgatcctctcacctcaacctcttgattagatgggagtacaggtacccccaccacataggctaattaaaaaacgaattttttttagagatggagtctcactatatcgcccaggctggtctcctgggctcaggtgattctcccagctcagcctcccaaactgtgggattacagggtgagccaccatgcccagcccttttttctgtttttatgcatttacacttgcatgtacaggatggggatcagattatatatatatatatttaaccaattcctccccctgcccaaacaatatgttgacagcagttccctcccttcacaggcagagccttcactgtgcagtattttcaggccctgcattgtactgaggggagacaggactgtgaggttaatatgtaaaggagtgagaggaggcacttaaggttgcatatgggaaatctccaccaactcaattggggctacaccatagcatttagccctaggcagtttaaggagatagggagttggagagagcatgattgctgagcctttctccccctttaaaagtttagcaagtgaggccgggtgttgtggctcatgcctgtaatcctaacactttgggaggccgaggcaggtggatcatttgaggtcaggagttcgagaccaacctggccaacttggtgaaaccctgtctctactaaaaatacaaaaaattagccaggcgtggtggcacaggcctgtaatctcagctactcgggaggctgaggcaggataatcgcttgaaccttgcaggggcagaggttgcagtgagctgagatcacaccactgcactccagcctgaatgacagagcaaggctccatctcaaaaaaaaaaaaaaaaaaagtgtggcaagtgaaagctactgcatgcgcatgaggacacagtcttgcacagttctgggtgctagcagtcctatgccatgtggtcatttcggaaggccatgatcaagaaaccctgcacaaggagtttccatttgggaggtggaacacaggagcacagaccaatagttctgtttttaaagtgcagttcgagaacctcaaatttggggaagccacaacactaagtaagtaataaaattcttaacatttagcatacagaataatgctatttaggccctttgagagacctacattttagttttctgcacatgagaacagatggtcttggttcatatacaggcccaatttacacccagccttcaagataaacaacagccacagctgagtgaatttaggaactccccttcccttcccagggttaccggggacttctctccccttcccccacgggaggacctcatctctgcctggggccccatttcccttgctcagttgctattttcactttacacaggaaaggcaaaagctggtgagctacctcccaaaggggaggagaaggaaaacggaaggaggaggatggagaagactgtccctttcaaccttgtctgcattcctcccccatagtcctaaggtggatgggaagggaagagggttgtaagagctgagggcatagtcttgcctattgctgtaccatgaatgcattatagatactcatctctattgcttaaggcaggcaggtgggcctgtggctctagggcctggtgtctttccaatctcacctgggttgtcttagagggctgctgggggacagcagaatctaatgaagcaccctgtggtccccacaggtctgatggatggctctgctccacctcaagatgctaagtgaggctgaacaggttctcatgactgcatggtcatgaatagagggcctagcctgtgttagaggaaggagtttatgttttaggtattggagcagatggccatagtccaaggagcagtcagtggcagaggtggggcatggggtggagctgttcgttcccacagtggaaaaggcaaccctaaatgtctacctccgttggatacttcattctttgggccgatgtgccttttcagtggtatccaaggtaactgctctaaggatgcatgcattttctgcatgttactttgtcattttgaaaatcccgcccctcttttttttttttttttttgagacagagtctcactctgtcacttaggctgcagcacagtgacatgatcatagctcactgcagcctcaacatcctgggctcaagaaactgaggaccagagagactgatatggagaacaggaggattgtttattttaggtatgcaccagctcagtggattcgcatccaaaaagctgagcattgaacaaagactgagtggggtttttataagcaaacctacaaaagccaaacaaaagcaattaatcatacagtaacaggtcacataatctatagcataactgttgacttagcataacttgtggccttgcctagctagtgaccttatagctgcgtcaaaagaaaaataagaactggctaaatacagagatttgtaaaacataatcatgcttaagaaaccagggaaaggagtaacagtaaaagaatttgtctttttcttctttttttttttttccttcaacctttctctggaggggggtgttgtctggagcccattcctttgtccttggctttctggacagcattatcttataactcttcttgaagtgagcttgctaggcagaggaaaacttgaaacttgttcttttctttttaacctttgccgtgcctgttacttttcttacagtgaatgaatgcatatttatttttaaatttctgcctcatctcagccttccgagtagcttggactacaggtgcgtgccaccatggccagttaatgttttaaatttttttttttttttttttgtagagagaggattttgccatgttgcccaacctggtcttgaactcctgggctcaagaaatcctcccctggcctccaaaagtgctgggattacaggtgtgagccaccatgtcctgcttgaaactcttaatataaaaaaaattgccagatgtggtggctcacacctgtaatctcagcactttgggaggctgacgtgggtggatcacatgaggtcaggagtttgagaccagcctggccaacacggcaaaaccccatctctactaaaaatacaaaaattagcctggcatggtggcatgcacccgtaatctcagctcctccggaggctgaggcaggagaatcgcttgaacccgggaggcagatcttgcagtgagctgagatcgtgccgctgcactccagcctgggcgacagagtgagactgtgtctggaaaaaaaaaaaaagaaagaaagaaaagggaaaaaaaaccagaaaaactttaattatttttattttattttttatttttgaaatggagtttcactcttgtcgcccaggctgaagtacaatgacacgatctcagctcactgcaacctctgtctcccaggttcaagtgagtctcctgcctcagcctcccaagtagctgggagtacaggcatgaggcaccacacccggctaatttttgtatttttagtagtgatggggtttcaccatgttggtcaggctggtctcaagctcccgacctcaggtgttcccacctgcctcgcctcccaaagtgttgggattacaggcatgagccaccacacccggccagaaaaacttcaattatatctgaaatccactcacattatcataagaaacttacacatatcaatgaaaaaaaaaagagatactgaatttttagaatccaatttcaaattgttcacaatttaagacaataataatagttgtaaatgtattacctacgtgtctgtacagcttctcagctgaaagttattatcaaaagtataaagaagttgttgttgaaactcttaatctgtatagctgtttcaacatgaaaccataaagaaaaagttatgatcatgaaatcaggctcaagttcctcttaactttaaaaatatctcatttaaagctttattcaaattatctactttcaatactttgtattttattgtttttttttaacaaaaaacaacatattttcgccaagtgacctatagctatgctcccaatttattgcagttattttattcacaaaattccatattttatgaatataaaaaactgagaaacaatgccccatatcatattaattagtctagagcacaattgtggttacatcggttaatgggccaacagggttacctacccattgttaataattttctttctgtgagtaaaataatttggatttccaaactacaaattacaaacccattaatgtcccaacctatgagatggagcaagcttcttcaggtaaactgcaatcggttacagccttatttgcaaatgcattttgcttgcttcaaacagcttctagagagctgtttcgtaatgtgctttaggatcacttccagaataaccccctatggttgtgtgcactgtggctcaagggacttctcattggtaggtttaaaactcacttagctcgcccctagaagagcaggattgtttttgtaagcctgcataaaaaacaaaaagccagaccagaaaaatgcaaggagtctaggcaaggtggctcacgcctgtaatcccagtactttgggaggctgaggcgggcagatcgcttgagctcagaaatttgagaccagcctgggcaacatggcaaaaccccgtctctaacgctacccaaaatacaaaaattagccgggtgtggtggcatgcgcctgtagttccagctatctgggaggctgaggtgggaggatcacttgagccagggaggtggaggttgcagtgagctgagatcgccccactgcagtccagccagggcgacagatccagaacctgtctcaaatacatcatacatacatacatacatacatacatacatacatacatacatacagggagtccacagactttttctttcttttcagttgctctctcccttttggcctccttgttaaaaactctacatacgttttcaagtaaaaccttctaatttaccccaacagatgaacctgctctggattaagccagaagcaagagagaaccctgctagaccagccatttcaccagctccctaaaatgcagctatatttgggagacttctgtgtaggaagtaaggctaataatgcagttcccagaagattaggtgtggttttaatgagctcacacaaggcgggtggggaggggagtggttccatggttctatttttaaaactcgtgtaaagatcatcctttgttgtctaaacacggcagtagagaaagagacgtctctgtttctcacgttacaatcagaggtaacaacctgtgctaacctggtttccagcgaaaaggccaaaagtgtactgataacttcggcttcagctgagactgggataacccgcttgagccagtgccaaattccacccatccggcgcgcaagcgagcggggcttctcctccccaaccccggcccaggctgcttctgccgggtcagtgctgccgggttggtggaagctgccttccctccctccaagatcagaaaggcggagggttcaggaaggggttctcctctaggtgcaagggactgcctggatatttggagggaatggcaaagccctgcttcatgaggtgaatgaatataaattaaatcgctctcgtatttaaaataacttgacggatgacagtgcccattcagtcaatcggccctcgacgttggatttgctacctgggcttgttgtctgcgagttaaggtcctgcaaaaagcccctggcttgtcacctcaactaacctatctcctccagcaattctctcaatacatcctcgggttgtattgtaattcattttccatagcagaaatgtggagggctctagagaaggtacaaggcaaattttttttttaaattttatttttggttggccgcggtggctcacgcctgtaatcccagccctttgggaggctgaggcggacgaatcacctgatatcgggagtttgagaccagcctgaccaacatggagaaaccccatctctactaaaaatacaaaattagccgggcgtggtggcgcatgcctgtaatcccagctactcgggaggctgaggcaggagaatcgcttgaaccagggaggcggaggttgtggtgagcccagatcgctccattgcaccccagcctgggcaacaagaacgaaactcagtctcaaaaatttttttgttttattttattttttaaatttgagacaaggcctcgctctgtcgcccaggctggagtgccatggcgcaatcatagctcacggcagactcgaactgctgggctcaagggatccccctacctcagcttccgaggagctaggatgacacgcgtgagccaccatgcctggctaatttttagattttttgtagagacggggtagctatgttgcccaggctggtctccaactcctgacctcaagtgatcctcccgcctcggcctccaaagcgctgggattacaggcgtgcgcaaccgcgcggaggcaatctagaaactgcagagggagcacggacctgggcactgggaagaatagggcgtggacttggagtgtgaccgcgtttgaatctgggttgtgcctgggacaccccacctcctgggccgtaggtggggggggagagagagagagagagagagagagagagaggatgtcgaccttacatggctcctagctctccgcgctctagccgaatgcctggttcctagtgggtgcttgatacgtgggaaatgtagggggagggggtggcggggcattgggaatgtcccgcagagtggatttcgggagagtggcgcttttctctagaactctcttccggttacacctggagtaaaagcttgacactctagaaggaaaaccccagatgagcagctaggactgagggttagcggtaggcgggagcggggagatagtacaagtacgcttcctaatgaggcggtgccgcaaaataaccaattttaataaagactgcagagaagaaaaccaggttctgctggcggagtgcacaggctcccagccgagcgcccaacaaccaggttccgggcccaccctgccgcagcctcttggaaatctctaagttggaatgtgtgcgtgcgcaccacgggtcactgccctctttgtgtgtgaatttgaagcgaaatctgggcgaggcggggccgtgctactagcaatcggacccacagtcgcggttccaagaagccccgaagcttccccggcttcccgcagcactgctgggagggcacacggcgcctctgtccccaccccagagcgtggggcgcgcggaaaaaggtctggtgactgccctccccgccgccccccgggagcgtgccctcccgccggaccctgggactccagagaagcgccgagggcgcgagtacactaagatatacgaccttccctggggaccgggaagggcacaaccacctcttgcaactccgccactaagacgccttgggtcaccaggcccgggggaaaactcgtccccgtcccaggctctcgattcgggccgcagctcacgtcccgcgctcctccctgcgcgccgctctgctcctccctagtcccgcctccagctccgcccgggcgcccagagggcaaatgaggggcggcggggtggcgggtgggggggagacgcggaatttcccagcgcgggggctctggcttaccctgcaaccgggcagtctctttctgtttacggagagaaaggggaaatggaaaagtcggggaggcggtggctggcgtccgctgcgccgcccctgggcaggctcagacgccgtgagtcaggggcagagcagggcggtctgagcgtgcgggcgacgcgggtctcactcgtccgctccgctctggactgcgcgccacgctctggggtccggcgccctggttcctgcttctgccgctgccgccgccggatcccagtggcccggcgtgctcggctcccacaggcctgcagccagcatcgcaccgaaccttcggggggccgcggctggagcgctcggccggcgtgggagcgccaaggccgcaggtaatccagggttgggggtctccggcgtgtctttcgggtcgcgtcccgcctgggtgccccggggattcccatgcagaaatggagggtgcccccagcagaggggaaaactctggcgtgggaagaggtgggggcgtgcccacagctgcgctcgcgggtcgccggctgcaccaggcacagctggaaagcaccttgcgcaagggtctcacggggtgcagactcgcgactcctcccccttcctcctccttcccgtatccgcagcgccagggcagtgctggtctgggcagtacgcggggaagcggggacccgctgtcactgcgcctcccgctgccgacgccgcctggacggccgcactctccctgcccgagacccggtgagtgcagctcggaggctggaggacccgatcctcccaaatgctgggtgctttgataatttataagccttttaggctcccttgacttagagaaccaggaggaaaggagtgggagtgtgggttggcggagcccagagacttgtgaatggctgggactaaattcaagtttgtaacccggactctatcccatgactaaagaggtcatagcagaacacgaaggctgggcttttggtctaagaaagaatactaggagaaaaaaaaagttattttcacggaagttgttttcgagcgatagtgcatgatcaggactctgaaatttttctagctctgggcggagaaggacgcctagggattgtctccatagttaacaggggaaggccaccggctgcctgtaagagagaaacgttgcgatgcttgtctatttcacttttgggaagacaagattaaaggctgctcttgataaaaaacagggacagaaaggctcttgcagttgctttacatacctgtggcctgagtcgtttgtgccaaggagagtgtaatccacttccagctgacgcccccagctctctgcgacggattgaggtttgtgtgcaggacgtctggcatacggcccatgaggactttgtcgtgtaaagcaaatgggaacgttgaggcatgtagaggttttgaagcagagtgtcggtccttccttccatacgcctgaaacgcataatccggggctttttgagagcaaaaacatagtcagaaatgtgccctgagggagaatgtactattttggcacacatatgtatatatgtatatataatttttaaattttttttgagagggggtttcactcttgtcgcccaggctggagcgcaatggcgcgatctcggctcactgcaacctccacctcccgggttcaagcgattctcttgcctcagcctcccgagtagctgggattacaggcgcccgccgccacgcccggctaatttttgtagagacagggtttcaccatgttggccaggctggtcttgaactcctgacctcaggtgatgcaccctccttggcctcccaaagtgctgagattacaggcatgagccactgtgcccggcctaaaaaaatattttaaatgagaaataacacaagtaatagtcattctttgttaggcagaagcatatgctgttatgctggccattttcattcacacttgccaggaaacactcacattttgtttctgtatatggaggcagccaagagtattatgttaatgtttaggaagagaatttcctcgtgattttattgctgatttctgaaataattcagtgtaactaattttgactgtatttgcacatctctccaattccaaaagctggcataattttctgtttggttaggaagtaggaattttatgaggacttttattgtaaactgtgtcaagggaaaaatcatcttatactaaacgtctttattgccaaactagaataccttcacaatctgaactttctctagatgggcacagatcatgaataactcagaaaccattagcatattgtgtgcttaattaaggctggaaagtgctgaggctttttgcaggcgcagttagcaggcgaactggtcagcagggtttctggggaacgtagatttgcgtgacaggggccctgtgttgctaaggaattaatgcaggcactgagaaaagtctcagcgtcagacactcctccacctcccgggtcctgcttccctccctctcccctttccaggcaactcacagtttaggggtgtggttgtgtgtgttcaagctcttgggttttacatataaatgcctgagacttttctgcagggtttaaaaactaacatcttgtcttacagctcttttaggatttgtcttttagaatctccagtcctcacaggaaaaccccccaattaaaaaaataaaagaataaagaataaaaagaataccactactactataaaaaaaaaaaaaatcctctaaaatttgtcttcccagatcagcagagtgaatttgaactgtgtggacttttttcctctttctttcttgagtcatgttagtactgagaacttttttttttttctgtcaaatcatctgtttgataaataagtccaggagacttggatcctttcaacccctgaggccctaaattaggctgttttttttttaacctctgtgtttccagtaaattcgacaagcagaaactgcaactaaacggctcagtaaaaccgaagtcaaatgttcctccattaatctaagaagttgctctcctaactcagcagactccaagaacctgaatcacaatctccctcgaagatgtacaagatctcaggaggggaagctgccccctcactctagatttcacggtggtgataacagccatgaaagcatttcataggtttctgccttttttttctctctctttatgtcttgttttagatgcaatcttcttaccgcgaagaagccaggggaataggtagccacatcttgtttgcagataagaaaggaagctaacgcagtatctgcaaagccaggagtctgactcagtacttttctcactcatgcatacaaagcagctaaaaatgacacagcttatttaccatgcccctgacactgcactgagcactttatgagcttgaactctgttaatcctcacgaccacctcatgaggtaggtgctgttattacttccattttacagatggggaaaattgaggtcgagagaggttacgttacttgctcaacgtcatgcaagcagtaaatgggagtgtggggggaggcaatgagatttgactccaagcagtctgagaccagaggaatgttggattgcaggatgctaaactgctttcctcagacacaattcatacgtcagaaaatgaccatcaagtaagtgaatgatgacactaaattgcatggttcttttgtcaaatgaaattcactgagaggcagatggctgggtcatgcgtgcaggtggctctgcagtggagcatttcctggagctttgaaatgaagctccagattgatcagacgtgcgtggctttagccctgagtgtcctgtgtgttaaaggcttgtgcttctcagaacttgaaatacctttcagaaagaggctatgcttttgggagtgcaatcggtgatttaagtaaaccaatgtgccttgaaattctcttagatctcttaggaccttttgtcttttctccttcagaacagagttgttctaaaatcctgagtaacaacgtcagtttttacccttgctttactttctttttctcatctacagatctccaagtgtggcagctgatttgtatataagagctgaaatgcaattttggttaatatagtcacttggacttgcttatgataaatttgactttcctggcttctttctactactcacagcttctagaaggccatttatttatatattaatcttctgggaccctcaagatgtttgctttgcactattaaagaattctggtcctaagggaggacagctgaatcataggttaaatgtatcatcatctttctcatactcatcactgggagaacaaggtttcctgtcatccttccaattagctgtttaactcatttgcataagaatcattcctgaaacttgacctattgccatcaaatttgtgtagattgaaatccatttttccagcttctggctttcagggcctgagttttatttgccaagttagctcctgcatttagtgaagaggttatttttctttaaagtcaccagaggcataaaaaagccatagcgattcttgcagggagggtgccacttcgggggaatagctgggttgtgtaaggttggaagccctaaagagccggtagcctaaggtcttcaaagatttctgagctgctcttgattcgtgtgtatgtttagtgaaagtttgttttcagtgcctgtagctgataccactgactctgtgagtaagagtaagctctctggatctcaggtttccctctgcaaagtgagctggactaaaggttatcttaggtccctttcaactctgcactgtcaacttgaattcatacacacagttgacacagaaccctcgttttctgaacaaaagcatataaaatcctgttgccaatccttgtatgtcagtttcccatgggtcttgaatgcaaatacaaatatcgtaaactaaatatttgtgttttctttcctagactctccagaaagagcaacagtaatggagtacatgagcactggaagtgacaataaagaagagattgatttattaattaaacatttaaatgtgtctgatgtaatagacattatggaaaatctttatgcaagtgaagagccagcagtttatgaacccagtctaatgaccatgtgtcaagacagtaatcaaaacgatgagcgttctaagtctctgctgcttagtggccaagaggtaccatggttgtcatcagtcagatatggaactgtggaggatttgcttgcttttgcaaaccatatatccaacactgcaaagcatttttatggacaacgaccacaggaatctggaattttattaaacatggtacgtttctttccgatcagttgggtgctatgtgctcagctttcctgctgcagcttcatttaatgcagagtggtgtttgaatttggcttagatgggctggcaggcatgattttaaaaaatgtaatcatcagtaagaagtacttccatgttaaagatgcaaaaaaaaaagtcttcattaaaatttctatttaaagattcttgatcatattttagtagtatttctacaaataggtaattaagaagaatgtattttggccgggtgcaggggctcacgcctgtaatccgtgcacttggagaggccgaggtgggtggatcacttgaggtcagcaattagagaccagtctggccaacatggtgaaaccccgtctctactaaaaatacaaaattagcctggcatggtggcgggcgcctgtaattccagctacctgggaggctgaggcacgagaatcccttgaacctgggaggtggaggttgtgatgagccgagatcacaccactgcactccagcctgtgtgactgagtgagactctgtctcaacaacaacaaagaagaatgtattttaatttaacagttcactaaaaagtttattcatcagttatgcagaaaagaaaggcttaatgagactccttcgtctgagaggggaataaacactttgtcactaattaatcttgaaggctgaattatttgttcctttcttgtcacatcttgaaatgttattaattcatttcttgcaaaaatgtagtatgtaggcagtaaatagctatccacagattcactctctttcattggcaaagtatgaatggcaagtgatatatttgcttaatcatcgcaagtatgcaaatcatgcaaaatattgtggcaacattttgttgccataatagtagatcaggtgatgtgtttaggtgtgcctgggattctgtcaggcttttagtatgtcagaggtgaacgtaggtgctggctaaaggtaacctaatatttttaaaaagaataatttgcaaaggagtaggtggtagcttgcaaaacatgcttattgatgaaagtgacgccctttcttttggtgtatctaaatggcaaaatggctaatgttgggggaaagtcggtgctgaatgagtgcggagtccagaaaaagtacttaattattttgtttttttgcataccacattcatttaattaaaaacaacagagtaatttaggtcaggtatgtagtgaattgttttgtcagaagccagtcatactcaaccatagctcacaatggagcaagataatattttgcattgttgtgtgactgctttggtctggctctatcaagctctatttaatagtcgactaagtactttaccttcagaatatttcttccttttataaatgagaaataatcatttgaactagaagccatatctgattttcccaaataaaggatagttggagaactcgggttcaaagttatatatatgtctataccgagaaatataattgtttgtgtatttctctcatttttaacgtatttatttgttaaaatgggaattaaattttttttaaaatcctgctccttctataaaaatgagtattttaaatgaaaatatgcagaaaaaaaaccaaagtattcttgcttgtaaatatgcaaagacttaggtatgtttgcttattccgtggcctatctgggaatgtacagaaagaaattcaggaaatttagaagaaatacaaagaaacaacattctgaagtcttttaggaatgggaccagaaaagttaatcctaaaaagaagagagactaagacattaagatgaggataaaattgtatcagcaaagggtttgagtaaaatgttgtcattacctgctgtgggtcctgtgctctttaaaagaacaagtacataattaaggagaattcttttttttttttttgagacagagtctcgctctgtcacccaggctggagtgccgtggcgcaatcttggctcactgcaatctccgcctcatgggttcaagcaattcctctgcctctgcctcccgagttgctgggattacaggcctctgccaccatacccggctaatttttgtatgtttagtagagatgggttttcaccatgttggccaggctggtttcgaactcctgacctcaggtgatccacctgccttggcctttcaaagtgtggggattataggcgtgagccaccgcacctggccaggaaaaattttaagaataaacaaatacataagtaaaggcagggatcttgaaaaactttaaaaagatttttattttaaaatgatcaagaatataacatataaaacaagaagactaaaaaacagaagagaataagaggaggaccttaaaatctattggatcttagatatggcctcgctaggcaaatcgacccagtggtcgatggctctggggggctgcggttgactttcctgccactcacattaaagatggactacattgctgtgcctgctaggtaacccatcagagctccatgcttcataaatgatagcctaggaattgggactgtcatctctgattgtagtcacttcaagacagtagtgagggaggcaaggcttgctttcggctccctttcatcctcacgtggaacattggaaccacccaatgttcaagatctttctattcccatcatcttccacccactaccctatcagaactttactcactgggcttcatttgctgctctctaactctcagctttaggaaaatagcagctgattggttcctaggtaaaatccatctatatgatgtatctacatagggatggggaaactttcattcaagtatttacctattcatttgctagacacagcttggacatctgcagtgcgtcgggtgctagagatagtatggaacagtctgtgcctctgggagcttgctgcctggtgcatgcaggatgcagttgaataggcagttatagcagagtatgctgcttcccagcacgtgtgcatgctgtttgctctggcagtgcacaggcaggatactttacatagccatgagtgtggtagaaggaaggagaatgtcagcacagccttccaagaaggatttatgcctaagccgaggtctgaagtgttgagttggagtcagctagatgaagtggacagggtccaggtggagaaaacagcatgtgcagaggtccagagacatggagacctgatgtattcaggcagccaacaaccacaacaccattgagttatttagacagggtagagaaccaggaattacaaaagcatcctgaagaacaggcatgttcagtgattgtgtgtgtgatttgactaaaaataatatctgttaaagatcccaccaacatccagcaagatctggggaagaagctttgggagactaacctgggaattgctttgggtaagagtgctgcatgttatttatcatctacgctgattcataacctggcccgggaacaaataatctaaaatgagttccaaacactcaactctttggtggttttatggggactgaaggaccccaaaaccttcaccccttttttacaactttatatctataagtgtgagagctgaagatgttccttagggcttagtcatggagtcatggcttctcagagttgaaaaagcctttaagatacttgagtccagccctccgtctagtactcaaatcaccctgttcatcatctccaataattggtagaacattttggtatgttcttgaaaatctcctgtgacaaggagctcattacacactgggacacaaagtttcctatttgtccagtcctgactgtaagaaagttctcttccttatatagaaccaaaattcatctctgaccgtttagtgcaagccctacttattggccattaaaaaaagtgcatatgatgagcagtggtgaagacgatgggtcctgaattaaagtacctgggttatgtagttcagctctgaaatggattggctgtgtgaccctgggctggtcatttcacctgtctgtgcctcagtttactcattcataaaatggataacatcatgacactccatagagttgatatttggagcaattaatgaatacatgtgacctggttacacatagtgagtgttaaatgaactcgaggcattgtgggagttactgttgtatacaattgttacaccccttccttatgacagtccttccaaaattttttaaattgcatgttccccagatcttgtctcttctttcacatgcatttccaactgtgtgcatgacttctcatgaattgtactattaactctctcatcatctgggcaggaccctgtgaactcaagcttgtattagtgtctatcttagagccatattttgaatgtgaggatccatttgttgtgatcagcagagtgggacagagctagcttggcctttgtgctagataatatgcctgcatgaatatagatcgataccatgtctgtttcatagtagcatatcacaccagtcacttgtggaatctattcttactataatacttaaagagttttctcaatatgctgcttcttggcccagtgttgtttcgtataaatgacagtgatctggatgaggagataggaagtgtgcttataatgcctgcccttacaggtgattttggtaagttgaagaactggcagagataagcagcatagagttccctaagatggtttgatagcgctgggtgtggtggctcatgcctgtaatcccagcactttgggaggctgaggccagaggatcacttgagcccgagtttgggaccagcctgggcaacatagtgagacccccatctccacaaaaaaataaaaaagtcagccaggtgaggtggcacacacgtgtagtcccagctacttgggaggccgagatgggaggatcacttgagtctgggaggttgaagctgcagtgagctgtgatggggccactgcactccagcctaggtgacagagcaagaccctgtcttaaaaaaaaaaaaaatttatacgggcccctagaaagaagaaaaatacccatctaaaatttaaatacagggttcgagaccagcctgaccaacatggagaaaccccatctctactaaaaatacaaaattagctgggcgtggtggcacatgcctgtaatcccagcaccttgggaggctgagacaggagaatcgcttgaactcaggaggcagaggttgcgatgagctgagatcgccccattgcactccagcctgggcaacaagaacgaaactccatcacaataaaataaaataaaattaaattaaattaaatacaggggatctggggctaggggaagaaccaggcatttgcagaactgcaaactggtcaggacttgcacgttacactagaaattcagggcccatcatgaaaagagcctaggagaactcataggcattgaaagctggtccccagaatctgggaagttataaaataggggtgaatgggggtgaaggaacttgcattatttgatctacagaggagaaggctaaggtatgctcagaaaatatgtaaacacataaataactgagttatttttataacccggcatttaataactgggttttcatcttagctcagctttaattatggccttctggaatatacaaggctcttacccagactaggaggtatgctttggagtcagacagatctgagttcaaatcctaatgccagcactaactagcatgttccttaacctcttgaagtcagtttcctcatctgtgaaatggagataaaaatagtagttaagctcagactattgtagacttcgatgagataatgtattgaagtactgagcacattgctgtacttagaactcaacaaatggctgaaattatcttttgtcctcttggacagaataagaggacactggttcgaggtgggttataggccaggcacaggtggctcacacctgtaatcccagcattttgggaggccgaggcgggtggatcacttgaggtcaggagtttcagaccagcctggccaacatggtgaaaccccatttctactaaaaatacaaaaattagctgggtgtggtagcacgtgcctgtaatcccagctacttgggaggctgaggcacaagaatggcttgagcctgggaggcagaggttgcagtgagccaagatctgccactccactccagccactgcactcaagcctgggtgacagggcgagactccgtctccaaataaaaacaaaaacaaacaaaaaaacctaaactgggttataacaaatttaggttggtaaaactttcatgaagatgagttaaacacagagatggttcactggagggtgaggtgaaatcaggcctgtaaatatttaatgacaagaaacggaaaatcagcaagtgctcttgagtgttgtgagtagggttctgtctaaatgtgaaaagggactaaatctatcatgttctcagcatgctgcaaaagaggcctccagcaaccagaggcgacatacaggttatctttcaaacaaggcaagaccgccatctgcacttattcatgttagctctagggccctgcacagggtctcacacagcagaaacactcagtaaatagtttctaaatttaatgacttcatatttctaagcattagagttagtctctgctttattccctgactaatagtgaacacatctgtttgtgggatgtgtagctaaaattagcagtggtggagctgactgaatggcccttacagttactagaactatttctgtagccgtgtccctagtaagaagtcccatgcatctgcagatgaatcaagagttcattctcttcccatgtggtagatctggggatttgtcacattcccttcagcagctgctgctgcctcttttaagttttaaacaaaatagaaatggagtctcactgtgtcacccagactggtcttgaactcctggcctcaagtagtcttcccaccttagcctcccaaagtgctgggattataggcgtgagccaccgcacctagttgttcagcttcttctgttacttgaaataagttaaggtcctttaatagtttcacaattcctgagccaggcgccgtggctcacgcctgtaatcccagaactataggaggctggggcaggtggctcacttgaggtcaggagtttgagaccagcctggccaacatggtaaaaccccatctctactaaaaatacaaaatttagccaggcgtggtggtgcgtacctataatcccagctactcaggaggctgagatgagagaatcccttgaacccaggaggcagaggttgcattgagccaagatcgtgccattgcactccagcctaggcaacagagcaagactccatctcaaaaaaaaaaaaaaaaagaagaagaagaagtttcataactcctgaattcagaatcagaagccataatattactgattacattgaggagaaactggtactgaggcgatttatcccttgaaagaacactctggacatgttacaggcacgcgttccagattgcatttcccatgaactaccatattattttgttttaattttaattattttctcttctaattttttcctctttaaaaattgaaatatattttatatatagtcaaatacacagatgttaaatgtccaattttacgagttttgacaaatgcatgtgcccttgaaacccacattgctgtcagaatagacctcttaattcttgttttattattttaaaatttatattgtgtttttatttttttctgtagaaatgaagtctcgctatgttgcctaggctggtcttgaactcctggcctcaagatatcctcctgcctcagtctcccagtatgctagtattacaggcgttatccactgctcccagctgtctctcaatttttgaatcaactagtttcaaaacttctagttctaagagttggcttgctcatgaaccctgggaggtcagggatcagccatctcgtttgtggctgcctccgcagcaccaaacacagtgcctagcacctattttgcaagcaatagataacaatgcatgcgatagatattaagtgagcaagtagatgcaaagtaattctgccctcacttaatttacatagcattgtcaactcatagctctgacatacgctgtggttttccaaaatcttccatgatcatcagttaattttgatgttctttctctgtatgcgtcatgtgtgagtaatagctatgtggactaacaggttcgcacattgtaatagaaacaagtcaacctgcaggcacggtttatatttacgcaatctttattttcagccttttggttgccgtagtcatgcttttttagataaataatttttaaagttctatttggcaattaattactcatgagtaggtggaaatatgaccaggtctgaccaggcacctgcatctgttacatgctctctctgacttcctcaagctctaaatatagtctctgtacagttggtaggattaagcacagtgacattaatttcataactgtgtatcagaatgctgctaaaataaccagcttcctaataggtgggtcttagaaaaagccagcttgactgaagttctcaccgtctcacatttttattttgttgtaggtcatcactccccaaaatggacgttaccaaatagattccgatgttctcctgatcccctggaagctgacttacaggaatattggttctgattttattcctcggggcgcctttggaaaggtatacttggcacaagatataaagacgaagaaaagaatggcgtgtaaactggtatgtgttttctacctagataacccacactgtgtgtttggcattctggcttttgtttttttgtccatttgcattaaccaaaggtttttatcgtttgattgggtcttatctgagggtgcactgcctcaaagcatttgtttttctgaatttattggctacttggggccattcagccctaaaatctctgtttaggtgcatagttgattttaatctagatgattaaaaggataagtgctggtttttaaagcactgatttggataaataacatcatcactcttggagagaagtagagaagagccatcctgcaaagtaggagcaattctctgtgcttctcctttcattccgcccactgcagagggggccaggcagaggcagaaactgggaaggaggtagccttttcaggaaggcagatttaaagggctgaatttaaatacatcaatgattgaaaagaccctatcccaaattttttattattattattattattattattattattattattatttgaaacagagtcttgctctgttgtccaggctggagtgcagtgtcggggtctcggctcactgcaacctctacctcctgggttcaaacgattctcctgcatcagcctcccaagtaactgggattacaggcacctgccaccatgcccagctaattttttgtattttcagtagagacgggtttcaccatgttggccaggctggtctcgaactcctgactacaagtgatccacctgcctagccttccaaagtgctgggattacaggcataagccaccgcgccctgcccttatcccttcttattaaacaataactgccaaggtgccactactttggaaaactgtatctacataaggtgagcattcacaccccctatgactcaacaattcctctcctgtaggtgcactcactccacagagacctgtccacgtggccaccaaaaactaaaagctatgtggtagcatgttcatatctgcactatttgtaagggtcccaaactagaaacttccaaaatgctgaaatgggatatatttacttagtgaaattctggatagtaaaaagaataaatgatttacaactataataatgtggattaatctcataaccattatgttgagcccaaatagccagacacgaaatgagatctactgtatgagattctatttatataaaggaccaaaacaggcaaaacaaaatctgtgctactggatgtcaggatggtgggtacccttggagagtagcgactggaaggggccaagaggggggcttcttgaatgctagtagacatctgtgtgttttttctggtttgtttttctttttgagacggagtctagctctgtcgcccaggctggagtgtagtggcgcaatcttggctcacctcaacctctgtctcccgggttcaagcgattcttctgcctcagcctcccaagtacctgggattacaggcactcacccccacgcctggcctgacatggtttttcattttgatttagatgggggttacatttgtacgttcagttgataattcattgagttggacccatcatttttacacttttttgtatgtctgttttactttaattaaattttcaaaagtataacaaaataaaatacactcacttttgatttaacaaaaaataaaataaataattgccaaatattatgtcttggtttctcttattgtaataagagagtagctgggattacaggcatgcacaaccaatgcctggcaaatttttgtattttttgtagtaacggggtttcgacatgttggccaggctggtctcgaactcctagcctcaagtgatctgcctgtgttggcctcccaaagtgttgggattacaggcatgagccaccgcccagcctcagtgcttattttaaatacattgctataatagagtatgaactgtggcaacaaacacttcatattatctcacaaccaactgaaatattgaaaatacaacctaaactcaaggtaccatagatactgttgtctaataggtgggaaattatctcttttttgattcattcataattttaaaactttggatagatttctgacttctaaatgaaaagagtaactcattattttgttttttattttcttgttctgaattttatacttaaagctgactaacatagttaaaggcagatctgaggtgaacattattgtaactgggcagtccattttcacacagggcagagtattcttgagggcatttatttgccttttgttttttgcattgacctatattttatatttttaagatgactttggggttatttagaatctcgcttgtatttttgtgttctagatcccagtagatcaatttaagccatctgatgtggaaatccaggcttgcttccggcacgagaacatcgcagagctgtatggcgcagtcctgtggggtgaaactgtccatctctttatggaagcaggcgagggagggtctgttctggagaaactggagagctgtggaccaatgagagaatttgaaattatttgggtgacaaagcatgttctcaagggacttgattttctacactcaaagaaagtgatccatcatgatattaaacgtaagtatctttggacatatacctttttggctcaaagagactagttattcaggagacaaacaagctccttcctgtaatctgaagaccctccatggagggtggaaagctccctcagagcaccgtccgtcttccttctccagagacatatcttagaatcatgcggggttactagagctttcaaagtcataaggaaagattactttcaacagttgttgaaaggttatagctacatacctattaggtactgctctgttaaaaaggcttttaaaattgcaatttaggctgggcacggtggctcacgcctgtaatctcagcactttgggatgctgtggcaagttgatcacctgaagtcaggaattggagaccagcctggccaatgtggtgaaaccccgtctctactaaaaatacaaaaaaaaaaaaaaaatagctgggcatggtggtgggtgctggtaatcccagctacttgggaggctgaggcaggggaatcatttgaatctgggaggcggaggttgcagtgagctgagatggcgccattgctctcccagcctgggtgacaagagcaaaactccgtctcaaaaaaaaaaaaaaaaagcaatttacttaaaaacatacaaacacagagacaagtatttttgagaaacaaatacctttttcattttttataccaatgtaacaataatccattaaacacacctttactaactgttttctaggagtctgatatgatgaggaaataggtaaacctttaatagccagtactaaattagagtggcacaactttcactgggaaaaaagatgggtattttacttttctgttttagaaaagtggcttgacaacagtatgcttatgtcttagagtttgaaattcaagttcttgaacattattaatggctacaatcattcatacccacattggctgtattcttgatggatccaaagtgattttcacctcaactctgaatttcattctcctcttttgaatataatacaaccatctcactagaggaagcatttcagtcttttctgattggagattcattattgttttagataatgttttcatttgacttatgggtatataaaaaattttatcttaaaaatatttcctctcattttagctagcaacattgttttcatgtccacaaaagctgttttggtggattttggcctaagtgttcaaatgaccgaagatgtctattttcctaaggacctccgaggaacagaggtaattatgttcacatgaaaagggttactattttattaagaataaaaaggaaaaaatgttctagaattattgtgggaacgaaggacaaagaaggggaagaaacccactgcattaaatcattattttccttggaacacatttaatgagcacttgctctgtgtcaagtactaagtttagcacttgattttttattgtattttttgctatgttatttataatacataatagtatttgtaatataatatacatgttgatatatataatatagaacatttgtacacaatgtcatgtcaaaatagatcacattggccaggtgtggtggctaatgcctgtaatcccagtgctttgggaggctggggtgggaggatcaattgagcccaggactttgagacaagcttaggcatcatagcaagaccccatctctataaaaaaaaactggtttaggctgggcacggtggctcaaacctgtcatcccagcactttgggaggctgagatgggcggatcacctgaggtcgggagtttgagacaagcctgaccaacatggagaaaccccgtctctactaaaaatacaaaattaaccaggcgtggtggcgggcacctgtaatcccagctactcgggaggctgagggaggagaatcatctgaactcaggaggcagaggttgaggtgagccgagatcgtgccattgcactccagcctgggcaacaagagtgaaactccatctcaaaaaaaaaaaaaattagctcagtgtggtggtacacgcctgtagtctcagctagttgggaggctgaggtaggaggattgcttgagcccaggagttcaaggctgcagtgagccatgggcattccagcctggatgacagaacgagatgttgcttcaaaaaaaaaaaaagccccccaaaatagatcatatccacagttcggctttattttgtgtgtttttgtttttgtttttgagacagagtcttgctccatcgcccaggctgtaggacagtggcgcatgatctcagctcactgtaatctccacctcctgggttcaagcgcttcttagtctcctgagtagttgagattacaggcatgtgccaccacatccagctaattttttttttttttcagtagagatgcaggtttcactatgttggccaggctggtcatgaactgttggcctcaagtgatcctcccacctcagcctcccaaagtgctgggactacaggtttgagcccccgtgtctggcccacagttcagctttaataataattatagaattagagttaactttataataagtttagcacttaaaaagcagtatgttatttaatccttacaacaacccagttgttgctattgttattcttattttacaatcaaggaaataagtttgcagagattaaaataaagtgtccagagtcactcagtgacagaccctggacttgaacccagttctttctaagtctaaccctaaggtctaactgctacataactttaaaaaattataatattacatacattattaaaatatattagtgatataactaatatcactgagttttggctcaatgacagtcttaactatggtcattaatatttatgaggactctaaaggcctctctttgagcctaggaattctataataaacctcaagtagtgagcataaatgtatcttatttaaagatgtaaaacagcactcatgtttaactcatctgtgaagcaaaaaatgacccagaaaagcctttctttcctgactctaaatgagattctgaaaaatgcgttcgcgggcttccaagtaatgtatttaacattcacatcattaggctgactgggtgattcaattagccagtgtccactgggcatctgctatgtggcaggttcttgtgagcaccaacgaggaagcatgacacaaggcagtgaggagcaagccttagtggtactccagcgatcctcactctttggtgggaggacttactttaaattacctgaattattaaaagagcaaccgtttagggatgggcgtggtgttctcacacctgtaatcccaaccgttcgaaaggccaaggaggtgggggtggtttgcttgagcctgggggttcgagaccagcctgagcaatagagtcagacctcatctcttttgaaaaaaaaaaagaaaaaaagaaggaagggagggagggagagagagaaggaaggaaggaaggaaggaaggaaggaaggaaggagaaagaaaaaggaaggaaggaaagaaaaagaaggaaagaaagaaagaaagcatgcacaacagtttagttcacagttgattgtgatgggcacaaggttggatgcaagcaggaaggtaaatgggtgtaaaagctgcctccttggcccctcaccactaccgggggaagctgcactgcctgagccactcagccccatgcccttctctttgctggaagtgcccataggaaatagagagagggtctttggctgcacctctatgtcaggattaccaggtcagtcttggtgttcaatcagatgacaacccttagtctaatctagctagtatacgtgttgcactgaactggattgcagccacaaaaaaattgtcttcctttcaaaccagattcttccagcctgggcaacatagtgagaccccatcgctacaaaaagtaaacaaacaaacaaaaactttactttttgtaaaaatggcatggtggtgcatgtctgtagtcccagctactcaagagactgaggtgggaggattgcttgagcccaggatgaggctgcagtgagctgtgattatgccactgcacccatagcctggaaaatagaacaagaccttgtcctaaaaaaaaaaaaacgccaagattctgtaagtcctttctcaactctctcaaagccagcactctcccgggcagcagaagaaatccttgcttttgtgaatattactgaagttattattgaaaatgctcgagcgaggattcttgacggttgtctttgagcagaacaatattcagaagggaagctgtaatttttttttttttttaagaatgcttagtccccagatcttaagaatactttaccaaagtgtgaggtctaataagacttaatgcttacgacatgttttctttggaaaatgtttcagcatatttggcattagtcaggagttcagatatgtaatattccaccaccctttttcctggaaccagtttgaaaaacaaactatttatggtattaaagatggaaaatacttttctcttcctggcaatgtggtgaagttgaacattttgcaacattggagaaagaagtgttctttctggggctgtctagcggaatgcatggatatgagataataacatattttactcctgagtagtatttggatcaggttttttttggcaaatgcaaattgctttttgtgaagtgcaaaactgagccttggtgtttataaatataaactctcttctaatcagcctgcatttaatatctgcctagtacacacgagttgaagtttgataatgaacaaagttgtgaagtgaccagtgaaacctttcaacaagcttgcttttacccttcctacttaaagagccaggagatctaattagtcaactgtgcagactggctgatgttagaatttgatcatgtggctactgcacagtcatagacaatttctgatttctgcagtatagctcccaaatgcaaaccctggttacccctgtttgattgctctctctaagcattggtattcagagcattctattgtaaccatgtaatacacatccagggttaatccagcatatacagaatagactgtttttgagttgcaaggtacagagagagaatacatagtgaatgcgaataacaaatcagaattacttttagaacttggtcctttttgaaaaatccttctaagtctgcttggttttacctttgtaagttaacatatagtcatcacatgcacatatacgcacacacacggtctctttccctttctaataaacatattgaaaggtgaagggttcgatcgctgacatcaaggttttctcttgctccagtgccctgccccgagggtgcagaactctcagagagccctgtgttggtcccaccagggctgtttcatgccttctaatcagccagagtgctcgaacattatgccctgctgctccctgatctaactggtagttggtagagcttgaggaacaagagctccgagccaggaagctctggggtttctacctgagtggcagcacccaggccaccaggcttacagatgttccatccccccaggctgcctaggcgtgcagtcacatagaacctgcagagccacctctgcacaacccctgtgggctacaccagcagtgggcactccgcccaatccttgctttattggcagggaggagggggtacaggagagaagataggcatcctctatggacagttaataatacccattgcatttctttttcttttttatttgattgtggtaagaacacttagcatgaactctaccctctcaacacatttttaagtatacaatacactattgttgactataggtacaatgttgtgcattaattttttaagtttgtgatatatttagtagcaaagtccttctggaaagtcctctggctctgctgcagggaaagcttgagaacgggagctcagtttcacctgtttgctgagagcaaaaggaagctggcccggaagtggcttgcaggaaggagttgagcagggttagggtggggagactgggcagtttctctggtttttgtaagctagttctctaattacttaccctgaaatgtgttccggaaacactgacctccattctcttattcacatggcagacagtgtacaagctgtttcaagcgaaatactgataatcaggatattaactactatatgtctgcaccagccatgaatacaaatcactggtcaccagtgtttgctctgttcctttttaaaaaaatgtttaattaaattaggtaactaattaatttgtaaagatggggggtctccatcttgtccagactagtctcaaactcctgggctcaagcaatcttcctgcctcggccttccaaagtgctgagattcagtggctcacgcctgtaatccccacactttgggaggccgaggcaggtggatcacgaggtcaggagttcgagaccagcctggccaacatggtgaaaccccatctctactaaaaatacaaaaattagccaggcgtggtagcacatgcctgtaatcccagctagttgggaggccgaagcaggagaatagcttgaacccgggaggcagaggttgcagtgaaccgagatcgcaccattgcattccagcctgggtgacagagggagaccccatctcgaaaaaaaaaaaaagccaaagtgctgagattatagacatgagccaccatgccccacctctctttgtttctttcttaagtttagaaataaatgctcgttagagaaactatttataaaaccagccctgtttattcagcatggactcatgagaccaaatataacttatacaatgttaatatggctgcatttaatatttagtcactgggctacatagtaggtaaaaataacagatagtttgtaaaaatgactctttagaatcacttctacaatattacactttattttttaagtttttccctttcaagaaatttgtgttaataccctatagacttctatcaccttttatcattgcagatatttagaaggttagcagtgtaatgacaaacagataaagaagtctgtttgtagttcatttaaatataaaaggaattggcgttttagttgaaaacttagctacacctgatcagtgtactgcagaactttgatgagtgggagtccctgatagattcctggttctaggctctttgccaccagatcaaccagaaaaaggtggtgttttgttttgttttgttttgttttttgagactgagtctcgctctgtctcccaggctggagtgcagtggtgcgatctcggctcacagcagcctccgccttccgagctcaagcgattctccttgcctcagcctcccaagtagatgggattacaggtgcccatcaccatgcccagctgatttttgtatttttagtagagaccaggctggttttgaactcctgatccgcccacctcagctgggattataggtgtgagccaccgcgcccggccaggtgttcttcatcagactgcagggacacctccagcaattgctgcatggttcctggggaatgcctgcattattctcctagtttaaggcaaatgagccaatttccagaactggattagggaaatggaaacccacacaaaggaggggaatgaagctgaatgtttcccacttctttttcagatttacatgagcccagaggtcatcctgtgcaggggccattcaaccaaagcagacatctacagcctgggggccacgctcatccacatgcagacgggcaccccaccctgggtgaagcgctaccctcgctcagcctatccctcctacctgtacatagtaagtggggttcaaccagggctgggggcggcgggggggggggcgttgagttatgcatcccgcaggcttgggagggactgctctgccttctataccacccccatctgaatgaggcaatggtgaaatgacaggtagctacaagttcttcccatgtagaagcaagctccattcttgcaaagaaaacatagctattttagtgggagcttactaaaatgtgcattgggcataatttatgctattccattgtatgtgtaataatgcaacactacttagtagcatcagagtagcataaatatttcagcaaaggaagttgtatgtgttctttgaacagttaaaacattttttattattaatgttcacaccagtgtggcttgtagtggaatatgcaattcccattttactgttgataaattcaggagcagacacttccctgttactgcacagtgacttttgggacactgatttgaagctgtcactgacattcaaacctatcacttatcttttgtaacattaaatcagaagatgggtttaacctggtatcctttagaaattaaagtgggccaagcacggtggctcacgcctgtaatctcagcactttagaaagccaaaacaaaaggatctcttgagcccagaaattcaagaccagcctgggcaacaaagcaagaccccatcgctacaaaaaattaaaaaaattagctaggtgtggtggtgtatgccctgtggtcccagttgcatgggaggctgaggtgagaggatcacttgagcccaggagttcgaggctacggtgagttgtgttggtgccactgtactccagcctggatgacagagcaaagaccctgtctcaaaaggaaaagaaaaaagaaattaaagggaagcttgcttgcttaagggctgaactgcattcgttgcagggcatgtggtggaaaacggattactttctaggtcctggtactagcatgcttttgctgttgagggtgtatcaccatacctttgatgctaagagagctggtttgttgatagatccacaagcaagcacctccactggaagacattgcagatgactgcagtccagggatgagagagctgatagaagcttccctggagagaaaccccaatcaccgcccaagagccgcagacctactaaaacatgaggccctgaacccgcccagagaggatcagccacgctgtcagagtctggactctgccctcttggagcgcaagaggctgctgagtaggaaggagctggaacttcctgagaacattgctggtagggacaccctgctgtgtgccgcacacttacttcccttctctttctgtccacatcaaacctctgatgtagttcatgaaagcacttggaaaaaaaggaaatgacttcttgagtaccataccttgcttgagaaatttcagcaagattagcagaagcatgtttttttttttaaattggctaatttagcaccaaattataacagattttcagtgcaagtgtaggtagcacagtcactggaaaatgcttctgacttgcttttttgcaacttgcttttttacaacttttgtctttgaaaacagattgagcatgacagctttgcagttggttcttcttaactcactttttttttctttttttttgagatggagtcttgctctgttgccgaggctggagtgcagtggcatgatcttgggtcactgcaacctctgcctcccggtttcaagtgattctcatgcctcagcctcctgagtagctgggattacaggtgcccaccaccacgtctggctaatttttgtatttttagtagagatggggtttcaccgtgttggccaggctggtctcgaactcctgacctcaggcaatccacctgccttggcctcccaaagtgtggggattacaggcgtgagcaaccatgcccagcctaactcatttatattaagccaccccagtccttggtgggggaacatcatggcactgccctgcacagataaaatactcagtttgaagtcaacttgcatttccatcttccttggcttaaaatcttgccagttgtaaatttttcccacttaggaaagtcagtatgctttccaggagcattgaatatgcataaagagggatttccatttttattaaaagtctgtggcattcttaatccatttaggtccaaaccgagatgtcaagcctggtgcgcttgtttatatttctttgctgcttgtctaacttttgtgtatttaaagagagcaatctggctgttggaaaaatatgccaggatttctaactaatttcttgtctccattgactcctgtttgaactttttgttctatgtcatattatgtgaacttagccatagtgttcaaagacccatctttcacgcttaagacactgttttattaggccccaaagatttatttcactgcagaaggaacaggtatttatcatttgacacgttttcttgttacttactttgtaatgttttccttttcagattcttcgtgcacaggaagcaccgaggaatctgagatgctcaagaggcaacgctctctctacatcgacctcggcgctctggctggctacttcaatcttgttcggggaccaccaacgcttgaatatggctgaaggatgccatgtttgctctaaattaagacagcattgatctcctggaggctggttctgctgcctctacacaggggccctgtacagtgaatggtgccattttcgaaggagcagtgtgacctcctgtgacccatgaatgtgcctccaagcggccctgtgtgtttgacatgtgaagctatttgatatgcaccaggtctcaaggttctcatttctcaggtgacgtgattctaaggcaggaatttgagagttcacagaaggatcgtgtctgctgactgtttcattcactgtgcactttgctcaaaattttaaaaataccaatcacaaggataatagagtagcctaaaattactattcttggttcttatttaagtatggaatattcattttactcagaatagctgttttgtgtatattggtgtatattatataactctttgagcctttattggtaaattctggtatacattgaattcattataatttgggtgactagaacaacttgaagattgtagcaataagctggactagtgtcctaaaaatggctaactgatgaattagaagccatctgacagcaggccactagtgacagtttcttttgtgttcctatggaaacattttatactgtacatgctatgctgaagacattcaaaacgtgatgttttgaatgtggataaaactgtgtaaaccacataatttttgtacatcccaaaggatgagaatgtgacctttaagaaaaatgaaaacttttgtaaattattgatgattttgtaattcttatgactaaattttcttttaagcatttgtatattaaaatagcatactgtgtatgttttatatcaaatgccttcatgaatctttcatacatatatatatttgtaacattgtaaagtatgtgagtagtcttatgtaaagtatgtttttacattatgcaaataaaacccaatacttttgtccaatgtggttggtcaaatcaactgaataaattcagtattttgccttagttgttgtgaagcctgtgattctcagctgggactgaggatgggctataggagttgagttatagattggaaggaaatgtgtatcataagaaggcaaaaaataccaggagctttgcaaattgtattaatacactccttttctattgctcttgtatgaagctattgtcagctggaatggtttgcatcccccggtacattgaggtagaaaaaacaattgtggttgtgcctgtaatcccagcactttgggatgctgaagcgggaaaactggttgagcccaagagttcaagaccagcctggccaacatgatgaaatcccatctctacaaaaaatacaaaaatttgccaggtgtgatggtgcatgcctgtagtcccagctactcaggtggctgagatgtgaggatcacttaagcctgggaggcgaaggttgcagtgagccaagatcatgccacactacactccagcctggataacagagggaggccttgtccctgctaaaaataaaataataattgtgtgccactggtttagggttatgtggttctattttgcaccctgtttttatatatttatactatccttgaatacacgcttgcatactctttgcccattgttatgtggcaagctaataactagccattgtagaaggtggctttaactcacatacatcaactctagtgaaaactgttgaatggaagtctgtcatctacatagcaaatagtattaaacacttttacatgtgttgtgtaaaacatgccatcccttgtaatccatgtaaacacacatgaaatatgcattgctacctcttttttctcagagaaggaaattgaggcatagtgagggtaagtaacgttatcctcaagaccgcaaagcaagtgaagaaacagctggtatttaaacccagtcctttctggctccagtacacatgttctccctcgtacgttgctgcttgtaagtgagagatcaacactgcagaggaaacaatttccttttctgcccctctggtaagggcagaggcagactgaccatgaagctaatgaagcttcagcctcagggctcctcacttgcatgggcccctccatagccctgtgcctgattttttttaatgtattttttatttcagtgacttttggagtagaaggggtttttggttacatgaatgagttatgtagtggtgaattataaaacttcaatggacccatcacctgagtagtgtatgttacactcaatgtgtagtttttcaccccacacacctccccccctttattttattttttttgagaaggagtctcactctgtcacccaggctagagtgcggtggcatgatcttggctcactgcaacctccgtctcccaggttcaagcaattatcatgcctcagcctcgataatcccagtagctgggattacaggcatgcaccaccatgcccagctaatttttgtacttttagtagagacggggtttcgccatgttggccaggctggtctggaactcctgacctcaaatgatctgcccaccttggcctcccaaagtgctgggattacaggtgtgagccactgtgctcagccccaccctcccccattatttcactctgtatgcctttgcgtattcatagcttagctgcctgtgcctaatttcatatcaccctagatcaggcccaacaaaacttggacctgctcttggttaaaggtatacagcttttgataattttcatgagatactcacatagtcaatatgaattgagttctagttaacaaattccatttggagaaaaccattctctcttttttttttttctttttcttttttttttttaagatagagcctcactctgtcgcccaggctgaagtgcagtggtgccgtctcggctcactgcaacttccgcctctggagttcaagcgattctcctgcctcagcctcccgagtagctgggactacaggcatccgccaccatgccaggctaatttttgtattttcagtagagatggggtttcaccatattggccaggctgggaaaaccattcttttgaaataaattggaactctaatggagagaaatggggatgattgctaagagctgatcaatagtgttggtggctgaggaagcggtcgtgagagagaactatgaggggaagttcggggctgagagctctgtgtgcactgaggacttgcagaactgttcacctgggaggccaaaagttgcaccctaggatgagtcaccagagaatcagctcaagaggagcaaggaagccccaagtgaattccaaaggaatgcactactcacccccttatgagaagatgggcagtggggctgtcaggcttgagtatagttagaatagaataatcatgtcctgaaagctcagcctgggcaacattgcaagacctcatctctaaaaacaaaaattagctggatgtgatgactcatgcctgcagtcccagctacttcaaagactgaggcaggtggattgcttgagcccaggattgcaagtctgcaatgagctatgatcatgtcattgcactccagcctgggcaacagagtgagaccctgtctctaaaacaaacaaacaaaaacaaagaaagcaacttccagccactttgataattcctgcttcgggaattggatggaagcactggaatgcactgcagaatgtatacagagcttttccagctcaagccttagagatgatcttatttaagcacctggcaagttagatgggtagatgaacgtgcttgctggaggtcccacaaccaatgctagtgcctcatcttctgattgtcaccacctcctttgtgttttccttgaggtctgtgaaatattcaaaagcagatgatggagatcgtaccaggaatttactggacctgatgggaatttgcctagccttggagagatgcttctcatctggggatcagccagtgccccttgagctaagtttctactgatgactgccatgtcaccgagcaccacagtgggacctggaagggattctgtcagtcccctgggttccttgctgatgcatgctcactgtctggcagacacaaggaatttggtcttttattgacagcaagtttctgtggtgtaactcaatatgaaagccagtgttttctggcgggcctgggggatatttttcataggtctgcaatgtgactagcagtaaagattgcttgatgccctgccccatgggcacccaggagggaatgtgcccagcaggagagcgggcctattaatggagagttgaagttttatgaggaccaactctgggcaagcaactgtgctgggccctgaaggagacataagtgagagaagattctagtctctcttacttatccactctctgctgaaaggaagcacgttccattttggaattgttagaaggttctttgatttaatgcatattcccatctgcctccaaaacggcttttttcatcaagtatttacttgcaattttaccttttgcctgtgagctggctttctaaatgtccattgaatcgccaatgcataagaagatgatgactaaaaggtttaggcatcagcatcaggtttcaaaagcttgctttgtgccgggcacagtggctcacacctgtaatcccagcactttgggaggccaaggcaggtgaatcacctgagatcaggggttcgagaccagcctggacaacattgtgaaaccccgtctctactaaaaatacaaaaaactagccaggcatggtggtgcacgcttgtaatcccagctacttgggaggctgaggcatgagaatcgtatcaacccgggaggtggaggttgcagtgagccgagatggcgccactgcagtcactgaacctgggcaacaagagcaaaactccatctcaagaaaaaaaaaaaaggtttgctttgggccagagagaggagaaatgcaaagcagtcatttaccaaacattttttttttatgtttttgttatatgttatatgtttttgtttttttatgcttttgtcaattttgtctaagatcagttggctatagatgtatagctttatttctgggttctcttttctgtgttccattaatctatgcaattgtttttataccagtaccatgctgttttggttactacagccttgtaatattatttgaggtcaggtaatatgatgccttcagctttgttctttttccttaggattgttttggctacttggtgatttcatatgaatattaggggtttttttttaattctgtgaaaaatgacattggcattttgaattgcactgaatctgtagattgcagattgcagattgttttgggcagtatggtcattttaacaatattgattcttccaatccattagcatgggatattttttcatttgtttgggtcatctctgatttctttcaggagtgttttgtagttttccttacagagatctttcacctctttggttaaatatatgcctaggtatttttttttttttggtagctattgtaaatgagattgttttcttaatttggttctcagcttgattgttactgatatgaataaatggtactgatttttgtatgtttattttgtatcctgaaactttcctgaattcatttatcaaatgtaggaatttttttggtggagtcttcagggttttctaggtataagaccttatcatcaagcatttttgtactcatctgtgaaacaccctcatccggatttgtgctcagctctctctaggcagggtgtgcagatacaagcgtggacaggagagagaatcacgttcctgttctgttggacaatggtcctcagccccgggagcaacagctgcattttcaacaactggaacttggagtatagattccttcccacattgcctatgtttaacccctttgtgggaaatctgttttgtcacacttcaaaatcacagtgagagatgaccagtcatagccagcacacctaagaacacagcatgcgctgcgtttattttcaaggctgggataaattctgagtacttaaccaatttcgagacatctgcttcaccacatattacagaaccaaaggtgataataattggctatctggctgcctggagcataattgctgattgaatgacatcttgttcatcctggtgactgtacaaggaggccaactggaaatacaaatcaatgcataatcagctaagagcatagcggtctctcattacggctctacaccaaggtaccctgagttggcctagcaattgtatcattatacaaataacattaaagattaggggagatatggaatttccctacaaatgttggctattattattgttttaattcattaatgctaaatgttctttctatgaagcttaatgaaattccgctttatctttcccatatgtatgtagaatttcagacagcatttcattggaacataccttcatactggtccatttataaatctgaataggcttgactcttttcagcctaattaacattcttccaaggcatcaagggagatgagaaggaagaagaatattttcagcaaaaagaggggtaataggcactactgaaagaaggcttggagcttgcagtggagttaacttttggttcattcttgctttttgcaaacgcaccagtgacggtgagcccatcggactgacgctaatggaaagagggctgagaatggtggctcttgcctataaccccagcactttggtaggctcaggcaggaggatcgcttgaggccgggagttcaagaccagcctgggcagcagaaagagaccctgtctctacagaaaataaaataaaaacttagccaggcatggtggcatgtgcctgtagtctgagctacttgggaggctgaggcagaagcttttagcacagaagttcaagggtgcagtgagacatgctcatgccactgcactccagcccgggcaacacagcaagatcctgtctcaaaaaaaaaaaaaaaaaaaaaaatggagagaggctacaggatggcaacagctggcactaggacagtcttttgtcaatgggcttgtgggaaaaggaaatggtgtcaacctcacatacacacacaactcacctcttgctgcctaggtctttcttcttattggaaatttgcatcttgctcaagttttgctcccaataggacagagggctgggagctgattccaagcctaggaggctcccagaatctctcacaacttccctatgtggattaatttgtgatcacttgccagggccagcgagcaataaggcaccaattgcttctatcttaattaagttacttagggaagaaagagaaagaacaaaggaattaattcagattttctcactgaaactgaaagttcttttttttggtctggccagtaagcaagagggaacagaaagatttggctcgtgccttcctcattcgcctcttcagcttgtccctcttcctctatacactcccccacattctatatgccccagttctgttctccagaagcaattgctgctagcaaagatagtctatgcatacacaaacatatgtgattatataatgattatataacactcttctttataagcaacaacaaatgtgcacatggtagcatactttatacatagctctctatattttttttgttttgttttgttttttgagatggagttttgctctttttgcccaggctggagtgcaacctccgccccccaggttaagtgattctcctgcctcagcctcccaagtagctgggattacaggtgcatgccaccatgcccagttaattttgtatttttcagtagagacaaggtttcacagtattggccaggctggtctcgaactcctgactttgtgatctgcctgcctgggcctcccaaagtgatgggattacaggcgtgagccagcatgcccagcccatcttgtttttttgacagactgtttcccaaaaattatgaggaagtatgtaatttaattagatgaattcattcattattatttttttctttttttctttgagacagagtcctgctctgtcgcccaagctggagtgcaatggcacgatctcggcttactgcaacctccacctcctggattcaagcaattctcctgcctcaccctcccaaatagctgggattacaggcgtgcaccaccatgcccagctaatttttgtaattttggtagagacggggtttcacggtgttggccaggctggtcttgaactcctgacctcaagtaatccgcctgccttggcctcccaaagtgctgtaattacaggcttgagccaccacgcctggcccagtttattgtttgagatagggtctcactctgtttcacaggttggcatgcagtgttgcaatcacggctcactgcagcctcaaactcctgggctcaagtgatcctcctgcctcagcttcctgagtagctgggactacaggcatgcacaaccatattcagctaactgttaatttttttgtaaagacagggtcagctgggtatggtggctcacgcttgtaatcccagcactttgggaggccgaggcaggctaatcatgaggccaggagtttgagaccagcctggcccatatggtgaagcctcgtctctactaaaaatacaaaaattagccgggcatggtggcatgctcctgtagtcccagttacccaggaggctgaggcagaagaatcgcttgaacctgggagatggaggttgcagtgagccgagtttgcaccactgcactctagcctaggcgacaaaatgagactctgtctcaaaaaaaaaaaaaaaaagagccttgctatgtggcccagggtggtctggtgtcaaactcctggcctcaagtgatcctcctgcctcggcctcccaaagtgttataaacatgagccaccatgactggcctggaactattttaataagagcaatcccctgatacaagtcttactttgtagacaaagccttttcccaatcatttctgccatgaggttggaagttttcgttaggcttccctcgtgcttcttctctttccttttctggaaaatgagacgtagaacaagatgacttttcaagttgcttccaatcattgattcatcttataggacaggaaattggatggcaacaaacttgttgatttcctgaaagtccaaatgtaattgtctgcagagcaagggtgggaaccaaagtccttgacttctaacctcagggttttgccaccagaccatactgccattgctgcttaccattcctcttctgatgcctacagcctgggaagtcccagagcaaaagtttatacttaggctagcttttgagtgtggggaagtggtaggaattattgggctggatggatcaaatttcctttctattgttaggaagaggctggatcctgtcttaagtcaatgtcatgagatctgatatgggtggatgagaataggctctggggtcaaggatggagggaagaagagactctaggccagatgcggtggctcacgcctgtaatcccagcactttgggaggccgaggcgggcagatcacgaggtcagcagttcgagaccagcctggccaacatggtgaaaccctgtctgtactaaaagtacaaaaattagccaggcgtggtggcagatgcctgtaatcccagctactcgggaagctgagccaggagaatcacttgaacccagaaggcagaggttgcagtgagccgagaccatgccattgcactccagcctgggcaacagagcgagacatcgtctcaaaaaaaaaaaaaaaaaaaaagaagaagaaactgtatgcatgaatgcaaaatcaaggtgatactaaaggagacgaatcaatgaggtttggcgcaagaaaataaagtcacgagctgctcattaaggttaacaatgacatagaatgttgccatacctgtaatgggctcaagaattgtgggatgcagccggacgtggtggctcactcctgtaatcccagcactttgggaggccaaggtgggtggatcacttgaggtcaggagttcaagaccagcctgaccaatatggtgaaaccccatttctactaaaaatacaatacttagctggtcgtggtgacacatgcctgtaattccatctactcaggaggctgaggcaggagaattgcttgaacctgggaggcagaggcttcagtgagccgagactctgccattgcactccggcctgggcgacagagtgagnnnnnnnnnnnnnnnnnnnnnnnnnnnnnnnnnnnnnnnnnnnnnnnnnnnnnnnnnnnnnnnnnnnnnnnnnnnnnnnnnnnnnnnnnnnnnnnnnnnnnnnnnnnnnnnnnnnnnnnnnatagctgggactacaggcgcccaccaccatgcctggctaattttttgtattttttgtagagatggggtttcaccatgttagcctggatggtctcaatctcgtgacctcgtgatccgcctgcctcggcctcccaaagtgctgggattacaggggtgagccaccgcgcccggcccaaactcctttttttttttttgagacgaagtctcactctgtcacccaggctggagtgcaatggcaaaatcttggcttactgcaacctctgcttcccaggttcaagcgattctccacctcaacctactgagtagctaggactacaggcgcgggccactacgcgcagctaatttttgtatttttagtggaaatggggtttcaccttgttggtcagactggtctcgaactcctgacctcgtggtccgcccacctcagcctttcaaagtgctgggattataggtgtgagccaccatgcccagcctcaaactctttttttttttttttttttttgagacggagtttcactatttttgtctaggctggagtgcaatggcgcgatcttggctcactgcaacctccacctcccgggttcaagcaattctcctgcctcagcctatcaagtagctgggattacagtcatgtgccaccatgcccggctaatttttgtatttttagtagagatggggtttcaccatgttggccaggctggtctcgaactcccaacctcaggtgatccacccacagcctcccaaaatgttggaattacaggcgtgtgc

SEQ ID NO: 107 - DNA, 2763 bp, Homo sapiens
ggatcccagtggcccggcgtgctcggctcccacaggcctgcagccagcatcgcaccgaaccttcggggggccgcggctggagcgctcggccggcgtgggagcgcaaggccgcagatgcaatcttcttaccgcgaagaagccaggggaataggtagccacatcttgtttgcagataagaaaggaagctaacgcagtatctgcaaagccaggagtctgactcagtacttttctcactcatgcatacaagcagctaaaaatgacacagcttatttaccatgcccctgacactgcactgagcactttatgagcttgaactctgttaatctcacgaccacctcatgagactctccagaaagagcaacagtaatggagtacatgagcactggaagtgacaataaagaagagattgatttattaattaaacatttaaatgtgtctgatgtaatagacattatggaaaatctttatgcaagtgaagagccagcagtttatgaacccagtctaatgaccatgtgtcaagacagtaatcaaaacgatgagcgttctaagtctctgctgcttagtggccaagaggtaccatggttgtcatcagtcagatatggaactgtggaggatttgcttgcttttgcaaaccatatatccaacactgcaaagcatttttatggacaacgaccacaggaatctggaattttattaaacatggtcatcactccccaaaatggacgttaccaaatagattccgatgttctcctgatcccctggaagctgacttacaggaatattggttctgattttattcctcggggcgcctttggaaaggtatacttggctcaagatataaagacgaagaaaagaatggcgtgtaaactgatcccagtagatcaatttaagccatctgatgtggaaattcaggcttgcttccggcacgagaacatcgcagagctgtatggcgcagtcctgtggggtgaaactgtccatctctttatggaagcaggcgagggagggtctgttctggagaaactggagagctgtggaccaatgagagaatttgaaattatttgggtgacaaagcatgttctcaagggacttgattttctacactcaaagaaagtgatccatcatgatattaaacctagcaacattgttttcatgtccacaaaagctgttttggtggattttggcctaagtgttcaaatgaccgaagatgtctattttcctaaggacctccgaggaacagagatttacatgagcccagaggtcatcctgtgcaggggccattcaaccaaagcagacatctacagcctgggggccacgctcatccacatgcagacgggcaccccaccctgggtgaagcgctaccctcgctcagcctatccctcctacctgtacataatccacaagcaagcacctccactggaagacattgcagatgactgcagtccagggatgagagagctgatagaagcttccctggagagaaaccccaatcaccgcccaagagccgcagacctactaaaacatgaggccctgaacccgcccagagaggatcagccacgctgtacgagtctggactctgccctcttggagcgcaagaggctgctgagtaggaaggagctggaacttcctgagaacattgctgattcttcgtgcacaggaagcaccgaggaatctgagatgctcaagaggcaacgctctctctacatcgacctcggcgctctggctggctacttcaatcttgttcggggaccaccaacgcttgaatatggctgaaggatgccatgtttgcctctaaattaagacagcattgatctcctggaggctggttctgctgcctctacacaggggcccgttacagtgaatggtgccattttcgaaggagcagtgtgacctcctgtgacccatgaatgtgcctccaagcggccctgtgtgtttgacatgtgaagctatttgatatgcaccaggtctcaaggttctcatttctcaggtgacgtgattctaaggcaggaatttgagagttcacagaaggatcgtgtctgctgactgtttcattcactgtgcactttgctcaaaattttaaaaataccaatcacaaggataatagagtagcctaaaattactattcttggttcttatttaagtatggaatattcattttactcagaatagcctgttttgtgtatattggtgtatattatataactctttgagcctttattggtaaattctggtatacattgaattcattataatttgggtgactagaacaacttgaagattgtagcaataagctggactagtgtcctaaaaatggctaactgatgaattagaagccatctgacagacggccactagtgacagtttcttttgtgttcctatggaaacattttatactgtacatgctatgctgaagacattcaaaacgtgatgttttgaatgtggataaaactgtgtaaaccacataattttgtacatccaaggatgaggtgtgacctttaagaaaaatgaaaacttttgtaaattattgatgattttgtaattcttatgactaaattttcttttaagcatttgtatattaaaatagcatactgtgtatgttttatatcaaatgccttcatgaatctttcatacatatatatatttgtaacatgtaaagtatgtgagtagtcttatgtaaagtatgtttttacattatgcaaataaaacccaatacttttgtccaatgtggttggtcaaatcaactgaataaattcagtattttgcctt

SEQ ID NO: 108 - DNA, 1404 bp, Homo sapiens
atggagtacatgagcactggaagtgacaataaagaagagattgatttattaattaaacatttaaatgtgtctgatgtaatagacattatggaaaatctttatgcaagtgaagagccagcagtttatgaacccagtctaatgaccatgtgtcaagacagtaatcaaaacgatgagcgttctaagtctctgctgcttagtggccaagaggtaccatggttgtcatcagtcagatatggaactgtggaggatttgcttgcttttgcaaaccatatatccaacactgcaaagcatttttatggacaacgaccacaggaatctggaattttattaaacatggtcatcactccccaaaatggacgttaccaaatagattccgatgttctcctgatcccctggaagctgacttacaggaatattggttctgattttattcctcggggcgcctttggaaaggtatacttggctcaagatataaagacgaagaaaagaatggcgtgtaaactgatcccagtagatcaatttaagccatctgatgtggaaattcaggcttgcttccggcacgagaacatcgcagagctgtatggcgcagtcctgtggggtgaaactgtccatctctttatggaagcaggcgagggagggtctgttctggagaaactggagagctgtggaccaatgagagaatttgaaattatttgggtgacaaagcatgttctcaagggacttgattttctacactcaaagaaagtgatccatcatgatattaaacctagcaacattgttttcatgtccacaaaagctgttttggtggattttggcctaagtgttcaaatgaccgaagatgtctattttcctaaggacctccgaggaacagagatttacatgagcccagaggtcatcctgtgcaggggccattcaaccaaagcagacatctacagcctgggggccacgctcatccacatgcagacgggcaccccaccctgggtgaagcgctaccctcgctcagcctatccctcctacctgtacataatccacaagcaagcacctccactggaagacattgcagatgactgcagtccagggatgagagagctgatagaagcttccctggagagaaaccccaatcaccgcccaagagccgcagacctactaaaacatgaggccctgaacccgcccagagaggatcagccacgctgtacgagtctggactctgccctcttggagcgcaagaggctgctgagtaggaaggagctggaacttcctgagaacattgctgattcttcgtgcacaggaagcaccgaggaatctgagatgctcaagaggcaacgctctctctacatcgacctcggcgctctggctggctacttcaatcttgttcggggaccaccaacgcttgaatatggctga

SEQ ID NO: 109 - DNA, 33991 bp, Mus musculus
tctctctttgtttctggccagaggttccagggctgagggtagcctgaaggtggatgattgtcattacaatgatccatctgatgacctcagaagtcttcagtcccttagccctctcctcatcctatggtatacacttacttttgtccacattttatttatttttaaaaaagatttatttatttactttacagtacactgtagctgtatagatggttgtgagctttcatgtggttgttgagaattgaatttttaggacttctgctcactccggtccatcctgcttgctccggtcggccccgctcgctcagtccctgcttgctttggtccaaagatttatttactattatacataagtatactgtagctgtcttcagacacaccagaagagggcatcagatctcattacaggtgattgtgggccaccatgtggtggctgggatttgaactcaggacctttgaagagcagtcagtgtgcttacccactgagtcatctcgccagcccccacattttataaattatacttcagaataaacctgcccaagacttctcatgagctgaggccccaggcctaaccaacattgtttaataatgggaagggtaatcaagtggttgtctgctggtggccaagactgaaagctagtagggaccctatcagagcttgtcatcctgcatattagagatgttcaggagcctcccataaggagctggagcatatgacattcagagagccagagtagaggcctgatggggaggggaccctgatggcagggcaggaggtctaacctcaacactgagcacagacgaggcaggtggagttgtcttcaccctccctttcagaacaggaggttcagggcaggcctggagaagctgaatagagaagccttggggagtggcacccatcgagtctccacctgcccaacctgctggtttctggcactaccagttatgtgagcccaacagtagcatgcagtagaatcctttaagcccttaacaaggagaacatggagtgtgtgtgtgtgtgtgtgtgtgtgtgtgtgtgtgtagggaggttgctactctgggatccttaggtctgtgttgcaaggtaacacagggacatgtcattgagagcagatgtggggggtcagagtgataaggagcctcacccctgggcaggtacagcccatgtgtgaatgaagcaagggtcctgggcagagtttctctgccttaggccgggggtgggtaggttcttctatcactgataggtgggtggatgggtgatcatggtttgggaactttccccctctaatgaattcagcaagggggactggggccaacttcatctggtgaggtgtgaagacaggcaggcttaggaaaaccaggtctctgtgaggccagagtgtatcgcagggaaaggagtaggtaatggggaagggtcttgataggggtagctgcaaccctgctccactgcatcctgccttctgtgagccaagccaagttgtcccttgtacaactagaatgaacattgggcaaagagggaaacccctgggtaagactggccccatagctgtgggatagcccttaccgaccctggcatcttctttagggttgccatgggtgaaatgggttttcctgggtgtcccgaaagtccttggatgggaggatatgctatcctaggaggatgtgggatagcttttcctagggcaggcagaaggggtaattcttgatttgctttatgccttggggtaggaggctggctgcccttttaaagactttagattctgcaccaactacttatcttcatctcaaagagctccaggggtgcagagtctcagcagggagttctctcctgagagcagtgatcacttatgctgcccattatattcagattccccaactttttttccaacccggaaagtggaataccctggtctgatcaggctacagctataccaggctacggtaggtaggcacatgtagggctggaggaagcctagagttctagctgaggctcttgtggcttccagatgatcgcacgtgatggcatacaggacagggccaggtgtgctcagatgagtatgggtcccaggttgctgagtgagagttcctgtcttgctgtaggcatgtgttctttctgctgggtgagatgaggcggtgctggcataggggcctgcccagccttgctctgacccagttttccaggcccagcccagttctctgcacccaggcaggcatggagcagtgggagctcacaggactttttttcaggaataccaatgtcctggcccacagtcactttcccgtctggggcatttgactggctggccgtcagtacagttagtcccccaaggacacaggcatccctaggacttgagttgccaatgatcctaccagatcctgctttggaatcatctgttctgtgcctctgcctccagatgaactgatgcattgcccagagatagaccctgtagccctctaactaaagatccagtagtgtttcctgccctcctagaagccagttatggccttcccaaagatggggtcccttaggtgacaggtagcttcagaacaggccacagagtcacaagagtgggtataaagactcaggaaaacattccagggaaggggaggatgggaaggtccttgtggacacggagactggggcagcaaaggctacatgaggcctgttgggaagtggggagggggagggagggtggatgtgactgtgggaatccagctctggtagctgctgggtaagccgctttgatccacattgaggcaacacagaccccagtttaagataacttgggcttgggaacctgggctctggccccaactgcccttctgggtttcatccctgctctgcaccagagagacactagtctgggtggtgactgactctctgggcaggctctcctggatgctggggcatcgttcttttctgttttttttttttttttttggtttgtttgtttgtttgttttgtttttccccaagacaggtttcactgtgtggccctggctatcctggagctcactctgtagagcagactggcctccaactcacagagatccacctgcctctgtcttctgagtgctgggactaaaggtatgtgccatactgtggagctggggcacggttcttaagctgtgctggcaggacaacttgaggcccatcagtttccaaggagaggggtgtggagtgcccacctcaggaacagataggcctccccttgaccctgctcctctgagttaaactttctgtatccctttctaatccgctgttagcatctttgacttgggcttgagaggtcatgggatcctctactccctagctggggccagaaggacagcctagtttgagcagaggtcagcatggacacatatgtggactgttgggggtgtgtacactgcctgggaaccccatatcagactcctaacctttgcctcagccatggtcagtgccttcccaccccagagggctgactcaactcaccctcagtccctatgcaggccaggccagtggacaataaagctgtcagcagccagggcgaggggcaggcaatgggcgtggctaggaggagagggcctccagaagcacagacatctctattaggggatgtagaccctgcctgtccatcctactcaatgctgggaccttggaggctgggagcaagtggtggctcagagagaagaggatgaccagaatagttagcaaggtcaacaaggacttgggagtcatgtggagacaggtgtctaaggagcaactgcctgcccactcctcaggtctattaatgtacctgcaggacatgtgccctctgggtagaaacattccaggtgaacactctgtttagcctataaaaagaccctaagaaaagggtttctcagagaaaagagatagtcacagaacatgccttagctttcccgcctgtgatggggtagagacagacaccactgtgtacctaagcatcagtcagcctccagtggagtccagcagacagtagaagcactttcagatgtggaccgaagagactgaagagggaagtggcctctacctctgtcttcccccgcattcaactctcaggtccactatgcctgctttgtgaactggggcagagacccaggtgataggcacggctcgattctgctggagacttaggagctgagatttaggcctatgacccttagatcttagctgggacactcctggaaagtgaggctcctgaagtggctatgggtcgtgagttggcagcctctatctggtaagttcactgcaaacagctacctcttccaatcagctgtaagcagcctatgtgtttgcatctcctgcatcctccagggtcccccagcatccccagagtcttaccaggctttgtgggtgggctggtccctttcctcaggctaatgaggcacctagctcagggctgctgaggtctccactgctctgagagctccctaaccattgcactcttcccaagctcagttcaaacatctctggaagccatgtggtcacctctggtgactgagtaactgggacagtgcctccttattccccatctgtcaaatggagcttctgtgagggttctttcaggaaccaacaagactaccaacttcacgttctgaacacacaaggacctggattacccaacccaagtcatctgcgggaggactcagaacttaacagcatatgtgcaggtgtttgcgcgcgcacacacatgccgccccagctggctgctctaaacttagagaatagagctgaatgcttggctgaaggtcgcacagggatgatgagtgagagggccaaccagtagagggggacagagcaagactgccataggtgatgccaggaggggccagtgactgagaagggtgcagtgtaatagagagccactggggtggaggaagagggtgtggcaaaggctgctgggccctggggcctagattcctagttctgctggagcctgcagagttagaacttgtttattcttggcaggaaggctagtcctggggggtgggaggggggcaaggccttttcaaaaaaaaataaataaaacattcatttagaaggctcccaaggcatgctgaactgcaaaagggtcctggaaaaaatgccgagagggtttaagtgtaaatggacccaaaacaccataattaaatttcccttaaatttaccagagtttggggtcaaagaaaaaataaaacgtaaggaaaatacacttgaggtttcaggccaagagcttaggaaaatagattttctgaacggctcagcagctaccggcctggccctgccagtccctcgggttgtcgctgcctcacctcctctctgctaggcagtgccctgtgcacatgctgttcctaggggctttcgaggcaccctgattgtccctttgtcagctcttccagctttctgctgtgtagctcgtctttgtcagcttggtagccttgcccttaccccgcatctctccacagctctggtctctgatctttacttgtccaggcacattttccagaccaaaaaaagttaggacctgaggtctagtggtctgaatgaacccaggggcaaaaaggccagcaagtgtggtctggaatatcacagcacacccaggctcccaatgcatgattcatcttattgcccttctcactcaacctgccaggaaggtcacagctaaaattaaggatcttacatagtagctagtattggctgaaggcttttggaatattttctcttcttgttcatgttcttaaaaaatccagccaggcatggtggcgcatgcctttaatcccagcacttgggaggcagaggcaggtggatttctgagttcgaggccagcctggtctacaaagtgagctccaggacagccagggctatacagagaaaccctgtctcgaaaaaccaaaaaaaaaaaaaaaaaaaaaaaaaaaaaaagaatctttgggctggtgagatggctcagcggttaaaagcgctgactgctcttccaaaggtcctgagttcaaatcccagcaaccacatggtggctcacaaccatcgtaacgaaatctgatgccctcttctggagtgtagtgacagctacagtgtacttacatataaaataaataaatattaaaataaataaataaaaatccatttttttggttatattataatgggcaaatcaaatgtacttttattttaatcctcaaattatgagaatgaaattgaaaggcacaaattacccacacactttcacagttgcatcaccattcaaacctgctccctgtttcttctttggggaaagccggtcaggccggtcctctaagacagagttctgagccccttccccatggtgctgcactggctcctgagcctgtgggcacatagtaatggtgtttctcagtagctgaaggaatggggactcctaggaagagacagagcagctctagtctctgaaagtctttggcccttcaagtcaggccatggagtccattggtgctcagtttccctttatccctgcactcagcctcatgggcagctgcccctgttgaaccaggcactctccccgagtgtaaccttagcaggctcccatggctccctctgcctgggttccaggcccactgtggcctatagtagctgccacctgccagaaatcccgtgggtaagaggtaagttgtgatttcaggtctgaccaggagaaccacccccagctcctctctgctgacagtttctcacaaccatctcacagcctcagccctggtctggctgcggaggtcagggaagggcaaatctcagactacctactgccagcctgagggattccattccaggacaggcgcagctggtgcctcaccgcagtctctttccttgttgcttagcagcataggccccagaaagcggaagctactgagctctgagtccctgagctatctatccctagtacgcctgacttggcctctgctctcaactcatgttcactgaagaaggctccatttatgtgagccttggaaagctggtgggtcccctagcagtgggcaggaggtataggcatggaaggggacttgatcattaggaaatgcccagtcatcagcactagctgttggcaggctccaactcttgtcccctggaactctgtcatgggccaaagagaaccacctcctcagatcctcattataacaatagcctggagttcaactgaggggcttgggattaaatagtggccaagtgagaggcagcatcatggagatttaagggctggcaccatcctgcactgatgacagaatggtgggtgggctcagcctcatcttctgtaggtctcagagaagcaggtgaactcctgctgaacctactgacttgggaagaatcacttcatataagaaaatcccactgaaaacagaccatccttccaggaattacatcccggtatcaagggcaaggcaagtgagctgcggctactcgggctgaacacagggatcatgttgacattagctcctgcagaatcagtggagtcttagaaatgctatgcccctttgatgtaagggccaccagacagtggcagccatgttggaaagtctattaacacccaggccatatcaggatgtacatgatgtcaagggaccaggaactgccaggtgtgtagtgggcagaaggtagctcccccaaaggcaggtctctgtgctatctcccggatccacaaatgtgaccttatttggaaaaagagtcttgcaagcataacgatgggaagaggcttgaggtgagaccatcttcactttatgaacaactctaaatccaaccacaagtgtccttatgcaggacaggagacgtggggaggatagaaaaggcacagaagccatgggaagggagaggcagagactagactgagatgaccgtaagccatggatgcctgcaggccccagagttataacaggcaggaagaagcctactcagggcccacagccagcccaacttgacctcagacttctgttgtcctgaattgaaaaagtaaatttaagacaaccagattttaatctggaagtcggctcaatacaggaatacaagttgtagccgggcgtggtagcccacgcctttaatcccagcactcgggaggcagaggcaggcggatttctgagttcaaggtctgcctggtctacaaagtgagtttcaggacagccagggctacagagaaaccctgtctcgaaaaaccaaaaaaaaaaaaaaaaaaaaaaaaggaatacaagttgtgaatagttgtgaacaccacacagctcatttttaatgaagggggctgatttccccccccccccactgctgcagttgagcaggggtctacaagagctggccagtgtaaggccacagggttgggggaggatcagaggagtgggagtaccctgcttagagtcctctttcctgcatgtgtagcccattggaaaacaaggtagcttgaaagagatggtctgttgggccatggggttcaaagaacaaccaacactggcctgagattcctgactgggtatttctaacaaggaggtcatctcagaaataaagaagtattgctgtttggatggatgctcagctcccagttacagagtgtggagggttctggtaaatcctccagacgaagggcgtggaaataggggtcagagctcacattctggttcatttactgataactaatctgccaatagattaggggagaatgtctgctatgaccccctggggtggcatcctgggagaggacctgtgggcagctgcctgggggtgccatgggaacccaggactggattctagccagtctgcagggaggggtccttggccagagcaggagtaacagtaggcagagctgcccagctctagggtggacacacagggatgagagcatgagggttctggggccagggctttccctgctcagctatctgggaaagataagggtgatgagtaagccagtgaaaggtgttcgtaacccacgagccattcccccccccaccccccccatgagcagttttaagttcttcaagccacatacagccagactgggcagaagcactgagccaggtccccatgtatctggctcccataggcttcatcagaccttgtggaacttgtctgaaagtgagacaaggttccctgccttgtgagggtagagaggccatcagtcacagggtggttgctgttacagaagttctgccaggcaggacctacagcttgccagcatgatggggtgaccaggctgatcctccagggaccagctgtcattgtgacactccccagatggaatgtgtcccacatgatgggcgtgctgtgctaggacatccataggttggagttcaggcagccttagggtagggcaggctcccctgctttgtatccccagctcttctcgctattccgagaggctgggtaagtttcttccaaaacctgtgtgttcttggggaagtgtggacatcgttcctgagcaggatgcaggcagctggttagtttgataaatacagcagcgtgtccgtcttttctagggtgcaatccctgggtctttcatcatgtaaactctgctccatccttcactggaagacctgttcacacgtatttgtatttgtcttcctggaactgtcaggctttgtacctgaggatttagtgctctttgcacagggttcattcagctcagggggccagttcactgtgaagacgccctaacacctagacccccaccgaagtcaaccttctgagcccttgagcacagctttattggagggagaagcgtgctggtagacagtcctgagctcggcattgcttcaaggggtcgagcgtgcgacccttgcctcgcctgctccgccccagctgggctcccacgccctctgggaccgcccggcgcccccgcctgaccacgcctcttcggatctcccgccccctggccgccggggaaggggagtgttcggggcgtggcgggagcaccccccaacccccgcccgggctgctgcgcgccgggcagccccagttcagtgcactgtggcagcgggggtggcgggagcagctggcgccgtgcgatccactccggcggggggactcagtggtgggcggccggccactgggacagaggagaccctggaaaagcgggccgagagacggagccgcgcgtggtgagttgggctctagcggccgccaggttagtgtgaaggactcggctggcactcggaggttccgggcgggctcagaagcagtcagggggtgagatatgcgggaagtggagcggttcgtaagtgcggcgaggccggggcaaggcgcgggcttcccgctctggaaagtttgcggctactgcctccgtcctgggagggctctgcggcaaccagggagggaaggaggagggaggaaccgcggctgggaggaggcggccggcgccaggcagcccgggagagagctaggagtcggcgggcggggcggccgggggtcggggttcaggagcgaggccgcgcttccccgctgccctccggagtaactcagtgctctcctcctgtagtctccacagaggcgttctcccaccggcgccggagccgggcgtggggggttgcagcatgcccgcgcgcgctgcttgaggacgccgcggcccccgctctggagccatggtagtcccggcctgcgtgctagtgttctgcgtggcggtcgtggctggagctacttccgagcctcctggtccagagcagcgagttgtgcggagagcggcaggtaaggactgacccaaggtgttcttctgggggccggccctgaatcacaggggctttggcaatggtgaacagcccttgggtgaggaaggggcgtcgggttgattagcaccacaggggctagtgcgccgaggtttgtcccctgccccgcagatcgctgtcagctcggacgcggcagtttataggggtgtctgtaggctgggagccaccacccaagtgcgaggcgtcacgtggaccggtgcccgtgacggtggtcccaggcagaggggcgttgggaaggcgcgcgagctgacttcccacgattcctattgttgcttctcgaatttgagaggaggaaaaatgcctgttattgattcagccgttctcccggaacagttcttcctctgcttcagctaaaggaaggctggacgttgcggggtggatagtagtatcccagccaaagctcagcttcagggtttcgcatgacaaggtgacagcttcagtgcggctgctcccctcttatcctgtaggcggcctgaggggtcggttcccaggggcgcgcacagactgcccttcaggccgcacgctgggagatgaggggcggttgtcccaggatcttggcgccgcctaggtagtcccgctggccaccaaagtccgatgggacacttgaatgccctcaaacggggcccggaggccaaggatgcgaaagggagccacggtccgctctgcgtcccttggttgcccggaggtgcgacgcgcgcggcccccggctgtgcccggtggcagcgtggcaaagcagagcagcggtctggcgggaggccgcgcgaagggaggctttcgctcggtaagttgtcgccccacccgagctgaggcccgaacagccgctcctttgtacctcggcggccacaaaccgcgcattgatggcggcgcggcctctcggggaggtgcgagtgcggcgggcgcagcgggaggaggcagatggcggtgtgcccctcccggcgcccccgcgcccctctctccagcggctgcagcctcctggaacaatgtcattttctttctttctttctttctttctttttttttatgaatgaaagtgggccgggaacttgaatgtgcgtgtctttcagcggcgtgacagaggcggtcgggaggtcagcgcgcgcttttagcgcctgctaggactgccctgcttcccgggtgccgaatggcccgcgaggagaccacattagcatgtgtattcagatgaagatattacttcttgcgtcgggtgtcagtgagctcgggtaggggcggcggggcggagcgcacaccctctctgtgcctcaggcagtgacggtggcctcctggcacgaccctgctgcgggaaccgaagctgagccgggccgcccgggatcggtgggatcgcccgcccctcgcttctgcgtttgagcttgtgagacaggtagggaattgataggccaataaacttaatccggttccttaacgagatgggccgggctgtaaaaatacaaagacctggtgaagtttacagaggtccgggctggcgctttccctaggaacataaattaccaagcaggagctggctggggtcaagggctgtgcggcggggctaggtaccggcctaacctggccacccttggtgaggcaagccctgctggtgtgcttagtgtgggagacagtaacccttaggggatccagaagttgacccccaggccggcttgcagaagcagggccttccaccttccttgtctccccccaaccctaccttgcttgcaaggctggactttgagccctgctggccctcccagtggttcattaacctgggctgatcttagaccctgaagctttggctcctatgctgagcctagaatccccttgtcctccaggtctcaggttttacttgggacctggaactctccccccacccccttttgtagttgggcctagaaggaaaactagttacccagggtgtgttagggggtagatgatgtattggatagaggtggcctgcccggttgagaaattactgagctgtgaacaaagccacttggggttggggcctgcctcggcttgggtcctctcctagaacctaagtctcctcacctgtcctgctacagaggactggtaatggcagggttgttggggggattaaaccagataatccccggtaagccctcattagcccgcccagcctctggagttttctttcattcttcctttcttgacttttataataaactgtggaaactggaatgtctcaaggtgggatggtggggaatggggaggaggaaggcaggcaagagacccttggcttcaaggccccttggggcaggcaccctcctttctcttgggttattttcctcatacacctggccatacctcccacaccagctgtgttcactatcaaagcaggtgtcactcagatctgtgtcctggttttgctccaaagtccaagtcgagttctttagggtgaccaacctcagaccagggttggatttgatgctggttttgtagtgcgcacgtacgtctcaacaacagaacctaggctgtcagctcctccaggcagtggatgcagcccttcctccagctgggcagctgtggtctcactccattgtttgactcagggggcttctgcataggcacccctcattcctacaccccttttacagactttagacacttaaccagggctttctggaccttaggtctgcaagttgggatttgcactttgtgctgtagtggatgaaaccgagacaatctaggaggctctacgcccagcacaacttgattgggatacagtgtcccttagcctgcaacagtgagcctacagtacctaggtccatgttagtaccatatagcaatggggataggtgctatgggatccatgtggtagggacattgtcctcttaaagggcacaacagaagtaccagtgcttgcgtgctgcgtttggctcctttgttgatggggcctagggagttactggtgcacacctggaggctgatggtgtgggagttcctctgaccagggcattgcttctactgcctcagaatacaatattacatattctgcattgtctcaagcactgtccttcccttatccctacctgactcaggtcataatttcctctacgccctgtgaccctagaatggtggttgttggtagatgttgttacccaaggcccccaaagtccaggtgtctggtttcgcctagctcctaatggacaagatggatgggtggatcaaaggttagctctttgagctgactgaacatttcccctccagccatctgcttctccaagggtctggtttgggagctgccatgttcttttccagtccctctttggattcggttaaagcaaatacttgtgtgcatggcttgagcggttgtcttgcccagaccaaattggaaccaactggctgttgcctttgggccaaggcctggactgaggctcttgaccagcctgtccttgcccttctgtggagggagaactcaagtggcttccagcactgggtggtccccataggacatggtagcaggattggagaactggaagtcaagacagttaggcccctggctatgggacctccatagggcagcttaatactgtggggctctgaaggacatgagctttggggatattttagggatattccctctgtctgtcagaatcctggtggactttgagcctgtgggttgtctctgggatggacagaattgggcctaaggactggtgtggccagagtggacagctgggccttgaatctaggccatgcgtcggcggaatgacaagtgacattatagccagtccagctggatctgaggaaggaggtctgcttagcaggaccacccactcctgtcctgggccccaagcccagccgccctgtgatgggcattgtcaggttctggcagggaggcctggaggagatagcccagctggtggtacgtccctgagggtgaagtctttgagccaccgcatgagctgggcagcacctgggcaaggcagaggtgtattatctgtgtccgcctagtggaggagctatgttgcttcagttccttagccctcagggtgggtggctggctctacttggctcacatgcccactcagacagtccccctccccccagtcctcatttgtgaaatgggggtcccatgtcctcagccaacctgtgaactcaggagtctcatagcccactgactagaggcctaagagaccagaatggtgtccatgttttcctagctggctcatctgtgaaatgggtgttgcaaggcgtggactgtccaagcatcccctagctggtatactttggtctcaagaggtgcacaactcctatgaacagcagccctaggggtgtatgccagcaagggctgctcacccatgttcttgtatgacctcatgttgtcttctctctttccatttattttgattttgtttttaagacagtagccaggctggccttgagcttgtagcaattctcctgcttcagacttctgagtgcatgagccaccatacctagctttctcttcctgtttaaagtatgttctgttccctggctctctatccaaactggtttagaagccaagatgagggttgggtgcaaagagggttctgaaagggctccctattctttctctgagctttgagccaaagtccagggaaggacagcctgtctccaacctgcttttgtgcctccctgtgagcttagggctgattttacatttccaaatggtggaaggatcagaggaaggagaattggtgactttttcgtggtgtggggctgagctcagggcttcaggcattctgggtaggtgctgtaccacagagttgtctgaaacccttcttggcactttaaagatgattcaggtatcaggagggctgtgcctctttcagatcatcttgggaagacagcttcctcctgtagggcagagccagaagccttagcccatgattgacagagctgagatgctggggcccactggctcttacgaaaacagttttccacccctggtttgaacattgtctggcaggcccccaggctccaggagcacatccctcacctgcctacatacagcccttgcttgtgtgtttgcaaagtgaagtgctgggtctccagcatgcttctctggagaccctgtttcatagtgtcccatttactccacagaggttccagggcctgaacctagccagcaggagcaggtggccttcggcagtggggacaccgtggagctgagctgccatcctcctggaggtgcccccacagggcccacggtctgggctaaggatggtacaggtctggtggcctcccaccgcatcctggtggggcctcagaggctgcaagtgctaaatgcctcccacgaagatgcaggggtctacagctgccagcaccggctcactcggcgtgtgctgtgccacttcagtgtgcgtgtaacaggtaagtgcttggtgggtggtgctgcaacgtgtgtgaaacagctgtatagccaaggagatcaggacactcctgggctgggtggctgcagcatccctggcctaagatgttgatagctgttgatagaaaggagggggtacccctaagtaggtgccatctgaatgaatggccttgtaaaggcaggatcctaaaggtatgagagtggtggacctcagatatgggaagcagcaggtctttggatataggggtatcacagaacccccacttggaacttgcagatgctccatcctcaggagatgacgaagatggggaggacgtggctgaagacacaggtgagattagagtctatggccactgagctggtcagggccgggatgcctctctggtggttagaagggaacactgctacaggtgggtagaccagaggacagtgctccaggagcagggaggaggcagggctggtctgcagggacattgctattgactctagtaggacggggcaccacaggggtgaggatagccagggatgcagctcagattgttgctgaggaacaatagatccagggatgaagggcactggtggttgttggttcaggccggcaggaggggacagtgcttgtgtgtgctgaggtgtacattgtgaagaggacgtgtgtgtgtgtgtgtgtgtgtgtgtgtgtgtgtctatgcagactgagtacttgggccatttggagacttctggggaagagtggacaaggtgtcctccagtggaataaaaaaaaaattggtgggaaaacaggactgagtctctggtgtgtgggggcaaggagagtgggtacaggggcttgtgtgagattttagagtggaatcgacacaggaacctagcactgacgccaacagaggctcctgtcctggggagtcatttggcttctcatttccctttcccctttggctaccaggttgttgagagcaaaatttctaagccagttttcccctcccctggctcctgcaccagccatgttaccagtggccttgccctgagtttgtgtccacttctgcctccctggttttcccaggctgcatctagtgcttacacaccccacgtgggcttcggctctgaggtgactaaagggtcatcttctggaccttgcctgggcatgggaagcattggctcactgccgtcgctgagtgtgccaagctaatggccgccctgggagcctgggagggcagctcagcatggagggttccctcaccagcgtatgcagacggttctctccccctgtgctgtggctcctccacccacagatgcacatggtcctatggtagagtgtagtgaggtcactgcagaaggggcctgcctccctagtctgtcctggatccttgctctgtccctcagctgtttcaggagtcccagcagggtggcttcctccacccagcccagaggaaccagagcgctcagtggggggaaagcgcgacctaaaggaagcaggccaggccctgggtactgcagaggctggcttggggtttgcagactggtgggatgacctggcctaggccttctaggatctgcatcctactgggatctggggacctccacttgtgggcctgcacccaagggtgaggaggagataaattcagatctgagagtagggcaactggtaatgcagtgtccaggctcaggcaaagcaaaggactctgaatccagaagggtaaacaggctagaggcaggcaggggaggttctggaaggcactggttacagctgttatgggtacttctgccatcaggggctccttattggactcgcccggagcgaatggataagaaactgctggctgtgccagccgcaaacactgtccgcttccgctgcccagctgctggcaaccctaccccctccatctcctggctgaagaatggcaaagaattccgaggggagcatcgcattgggggcatcaaggtaggtctgggaaagaaaggggcctgggggcaggggctggagacaagggatagtctgcatctactcacagactaactacctgcagctccggcaccagcagtggagcttggtcatggaaagtgtggtaccctccgatcgtggcaactatacctgtgtagttgagaacaagtttggcagcatccggcagacatacacactggatgtgctgggtgagggccaggccgggtggctaaggcaaggggcatctctgggtcccttggccctactggccctgacctgactgcctcttgcagagcgctccccacaccggcccatcctgcaggctgggctgccggccaaccagacagccattctaggcagtgacgtggagttccactgcaaggtgtacagcgatgcacagccacacatccagtggctgaagcacgtggaagtgaacggcagcaaggtgggccctgacggcacgccctacgtcactgtactcaaggtaggctctatccccggctggtggctggcagggtgggtggatcagctgggtcagccctggccttggcccatatgtccctcttggctgaaggatatgttgggatttaccaaggtattggaacttctgagaaggggcagcttagttccagtgcatgtcacctgctctgagctctaggcaggctctgtgttacttgtgccctgctgtgggacttgtctgctccgaggactgagcctgcagaagttttctcttgggtaacagttatggtggctcagggcaggaggatgactgctgagttagtaccctctggaccccaggggactggctagacactctccagctggcccggattggctggtgtcatctgcttgcatttagcactggctctgtcctgcccctccctctgcctgtagcaagttccatacccgagttcaggactttgcgatactggaagcccaaagaaaacagctgttgagagacaaggaggtctggttggggaaaggaatagggattgtttggaacaggaaccctggctgttgagaaagaggccactggggtcctgtctgatgcgtctcacactgtgggcgtggatgttcacgagaataagctagttgccctaaaaagatccctggggtgagagtttagaggctgtgggttacaggttttctctctctctcttccccttcccccaacccccgcctcctccgttctctgtgtgtgcgtgtatgtaagcgtgtatgtgtacctgtggtgacagacatggagagaaggcctctttctgaaaccacgcccaccactgccatgacgtgcctcctctccaggcggctttccaggctttgctgcccagcccatctttgggaatctcccttgccctgcctcatcctcacatccttccgtccttccggagctggctcggggtgtgcctgagcccagtctcttgtccccgcagtcctggatcagtgagaatgtggaggcagacgcacgcctccgcctggccaatgtgtcggagcgggacgggggcgagtacctctgtcgagccaccaatttcataggcgtggctgagaaggccttttggctgcgtgttcacgggccccaagcaggtaacgactctgtcccatgcctgcctggcacgctgagctccagcttcaatgcccccagccgtgcacctgcctgcatgccctgcacgaactgccctgcttgaccctgcctgtgactccaactctacttgtgatgcctcaacaatactggtagcccccagttaccactgactgactgtttgcttcagcgccccctccccaaaggcctgtgctgttctcttgcatcccccacttgcatactcagaagatctgtagagcctattaggggccacgtcctgcgttgtgtgtgagcatcgaccttacacccatctccagctggctgatgccttctggcttcctgtccatccatctgtctggcccatcttttcgtctgcatctctcctgtttctgcactaattctgcatgctgcctttgtgtggcaccgtgctgcccacctgcctgttgctcaccttgggacagaggactcgccactggtggagggactggcttcaggctcggttgcctcagtgcaggaggcagagggccctgggcctctgtggctgtggcagggccatggtggtggccgaagatgtggtggtggcggcggcgttttccttgcagcctggctggatcatctccatgtgaactgctatggtacccaaagggaggtgctggcactcgcctatcgcgctctgttctctctttgtagactgcaggcgctaacaccaccgacaaggagctagaggttctgtccttgcacaatgtcacctttgaggacgcgggggagtacacctgcctggcgggcaattctattgggttttcccatcactctgcgtggctggtggtgctgccaggtactggcttctgctgctgctcatgccgcacctgtcctcttagggtgctgtctcaggacatgccaaagctgccagggacttcagggggcccatcctgtgaaactcacccaggctttgtgcttggtgtggaaacatgaatctgccctgcctgtcttggtcctgcaagggcctcttctctagcagggccccccatagtcctgatctgaggctctggcatttcctgggtgcctgggtagcggtgtgggtgcttctggctctgctgggtttctctcctgggcgtgtcccctgctggctctcagatgtgttttgattatactacaaggcgagtgggggggccatcagcccctcttctccaagtatcccaggtcccttccctcccccactggggcctgtggttccggccgggccgggggaaagcttgaaaaggctggatgaggccccaaaatttgtatctttgcagctgaggaggagctgatggaaactgatgaggctggcagcgtgtacgcaggcgtcctcagctacggggtggtcttcttcctcttcatcctggtggtggcagctgtgatactctgccgcctgcgcagtcccccaaagaagggcttgggctcgcccaccgtgcacaaggtctctcgcttcccgcttaagcgacaggtaacagaaagtagataccaggttttgagctccctgtcctgcctcgtgtctcctagagtcccagcagggcctggggcctgcccgggacatagtttctgtggttgggtgggctgatgcctccttatctccatatggagctcaggttttctctgaggtgcaaaacatttttaggagtcttaagtcaccactgtatagaagtccgagcagctagcccttttcttggctccacaccttgcctcataggcttgaccttgccatcctggaggctctaccaccccaccccttttacaatgcccagcccacccacgttgtatggtaccaatttgtcctgatgacccaagcaggtgtccttggaatctaactcctctatgaactccaacacaccccttgtccggattgcccggctgtcctcaggagaaggtcctgttctggccaatgtttctgaacttgagctgcctgctgaccccaagtgggagctatccaggacccggtcagtggtggtgagggacagtatgtacttggtggggtttagtatatacctggtgggggttctgcggttgggggctaggtagctactaggcagggccttgttggaggtatccccgagatactccagggtgaggtttgaggggtcattctttgtcttcatgagcaaatgcccctagggtttctgagatacagtggtacatgacccatgagggctgggggtgctgggcacacactcactgcctctgtttccatggtcaggctgacacttggtaagcctcttggagaaggctgctttggacaggtggtcatggcagaagctattggcatcgacaaggaccgtactgccaagcctgtcaccgtggccgtgaagatgctgaaaggtgaggagggagggaagtagaggggcctttgagggctgtggggctgtcagctgacacctctgttcccggcacagatgatgcgactgacaaggacctgtcggacctggtatctgagatggagatgatgaaaatgattggcaagcacaagaacatcattaacctgctgggggcgtgcacacagggtggtaggtcaggtggttggtgggcccactggtggatggcgctctggagattgacagcatctctaaggtgcctgtgcttccagggcccctgtatgtgctggtggagtacgcagccaagggcaatctccgggagttccttcgggcgcggcggcctccaggcatggactactcctttgatgcctgcaggctgccagaggaacagctcacctgcaaggatctagtgtcctgtgcctaccaggtggcacggggcatggaatacttggcttctcagaaggtgggcagagacagggaccaggccaggtggagcctctctgagtggaagaccgggtgatcgtttgcctgagctagggaatggtcatctcaggttccttttgtctcttcagtgtattcacagagacttggctgccagaaacgtcctggtgaccgaggacaatgtgatgaagattgcggactttggcctggctcgagatgtgcacaacctggactactacaagaagaccacaaatgtgagccctggtcctgcatggtgggggtgaagggtccctccaggaggccccacccgagagccaacacctctccctctgcccagggccggctacctgtgaagtggatggcaccagaggccctttttgaccgagtctacacccaccagagtgatgtgtatgtgtccctacataggatgggggtagggagatctgaagagagaagagatacaaattgcacttttgcagtcttcagggtcctggtccgctcattgggccaccagcacagccctggcttctctttatcctagtgccctgctttgcccatcagtggtatgtcctggtacagggctgctgcagtaacaggccaggggtaacaggccttctatcctcaattccctgcagttggtcttttggtgtcctcctctgggagatctttacgctggggggctcaccgtatcctggcatcccagtggaagagcttttcaagctgttgaaagagggccaccgcatggacaagccagccagctgcacacatgacctgtgagccttgttcattcctctacagtccagtccctggggtggcaggattcctaccagggcccttggaatgtgtaggagactggtggcctggagggaggttggggtgggcaggaggccagggagccatagctatacttgccgcaggtacatgatcatgcgggaatgttggcatgcggtgccttcacagaggcccaccttcaagcagttggtagaggatttagaccgcatcctcactgtgacatcaaccgacgtaagtgtccctcagtcctgccccctctgtggctgccttgcttattttaagtgttgctctttggagctccagtggcggggctggcctttagggggcatagcctgaacacagatggcgtgggataaaagggggtgaatgcaaagggacagtcctgacaaccatgtccaccaaacaggagtacttggacctctccgtgccgtttgagcagtactcgccaggtggccaggacacgcctagctccagctcgtccggagatgactcggtgttcacccatgacctgctacccccaggtccacccagtaacgggggacctcggacgtgaagggccaacagtcccacagaccaagccccaggcaatgtttacgcggaccctagcccgccctgctactgctggtgtgcagtggaccctagccagcccagtgcaatgggccaacagtagacaagacttcctgcgtgtttatccttggctcctgggtgcagaggccccttgggaacatgcactgctgtagagtaatctcctgactggccagggccaggagcaccaaacaagaatgtaagaggcccaccctgtgcaaccctggggttctggccctctcatttcccactgctaccttccagggaccattgtggagagggctagactccatgtccagagtgggccttggccttcttggtgccccaagctgagcctacagggaggctctgctctgtgtggcaaacctctctcctacatggcaccttgtgcctgggggtgtcatagctcgacatctccaggctgcctgctttccaccctgcccctcagagacaaattacgggtacctgaagggggggcataatgtctatcagaaaggtttattccagaggaaaatgtacatttatataaatagatgttgtgtatgatataaatatatacatacatatatataagaatatctatatggaaaaaggcaaagttgaggcccaagggagcaagatactccatgggtctcactaggaaactggcaagagcaggctgagaagcaaggggcttttctggcacggcagttttgtttgtactggacctgtatatttgtaaagctatttatcaacccccagagcgccagtccccgaccccaggttcatagcgtttagtcccagggtattgcagccatcttaagttgtaacttattaacagcggaagaggttcatgctggatttagggaattgctgagaacgtgcgtctggcctccaccaggctggccgtggccccttggcgcttgaatggctctcctagtcagagctggctccagggagcattttctgttgcctttggccctcttttgtgggggattagatttatataggaactttctttaggagatgtttaaaaattttaaggtgaactggtatttttcatacagattattctaattgctatgtattccaggcaggagcctgtgcccagggaagggctggccctgcaagaaggttcagatgttaatagttatctgttacaagtttatctatctataatttattgagtttttacaagttgttttgctgtaggcttaacacttcctatgcagtgcttctagacttttatagcctagactgctacctttcaaagcttgggagacagtggtgaatgcaattttgttacttttgtactgtcactgggccctaggcttgggtggctgtcccttgcctgtcaaccagcagggtcaggacagtggctcagggtgactttcttggggcctagcacatggtttgtcagcccacactggcagatgtggttttgttaacacaaccaacttactttccaaaaaataaagagataactggttccatgagtgcctcgatttctgttctgagacgggtacagctgtgtccttgttgcctgtggggacaggtggggaggtgggataatagcacctggggaatgagcagcctctggctggtccctggaagaaggtactggtcccaggctccaagggaccttgcttttctttctcagggcaaggacagctggactgcggggtgcctttctgtggcctaaagtggcagattggtccgggttatcagagtctagaggtgccaaggacaggattcaagcaagttgtgtccataggaggggactgtggatatgtatgtggaggaagtgttttgggtctcttcggtcccctggctgtcctgacagggaagggatctcatgaggacagaaggtgcttaattatatttgaaagttctctggggaaaaggcaggtagccaaaccccctggtttaagcaatctgcattgggccaggcaatctctgagtttaaggcaaagctggtctacacaatgagtcccaggacaacatagaacttagggtttctttcctatatccattttgtctgtcatactttctaaccttgggagatgacctggggactgaataaatgtccattctaggttcccttcttaggatcaggcccaccttataggtgagggcatttttttttttttttttagtaagtcaagatggctggagtcttggttctagactgaaataggagcttgaggatcttcaggtgaggtgtactgggttttaggggaaactataggccttggcactgttggctactcacaggaacttcttgaagggcaccagatagtttcagggactcagagccacacagacacatgatgatagtgaccaggcagaaggcagctaaaggatctgactaaagcctacagaacagcgtgtgtgcatatacgagcacgtgtgtgcaagtatgtgtaggggcgtggcaccaggaggatatattcttttttttaggaggatgcatttttatccctgaaacaagctcaattacccaagagagctgtgtgccagcctgtagcgccctctagtgccatgctgagcatagctttgtatggtaatctggacgcccttttcaagtccagggctcttgttagatctagggaaagctagcaccaaggggttggtccacagggacaggagtggtcctgagagagtcaggggccaggtcaggctgctgcaccaccagggtttcctgggcggccactgcatagggaggatatagtatgtgtggctctatgtcatcaaacacctgctgctgtctagtcttctctggaggactctgctccactgccttgccttttcaacatggttggtaatgatggtggatggtttcttggcctgctttggctagtaccaggaacaggctggctcccaggacactcctgtttactgccactggcctgtggctggctattattctgggttggggtagatcctagtgttcagaggaccagcaacaagaattatcttctgagtaggagagatgactcagtgatctatttagagtacttgctgcttttggagaggacctggctttattcccagcacccacataatggtcacaactatccataactccagttttaggggctatcaccttctggactgtgggcactggacatacacatgttacacatgcatactttcaggccaaacagataaaaaagagaattatcttcccaagaagggaagaaaccagttgtgtgtcaagtgtcctgttttttcagtgaaactcgggcacacaaagctttcctcaagagtgacttagggacagggcttgagtttattgtgtaagtctacctcatccgaacattagctttgttctcaatacagcaagtgggcgtgctgtgctcttttttttttttttttttttaagatttatttatttattatatgtaagtacactgtagctgtcttcagacgcaccagaagagggcatcagatctcattacaagtggttgtgagccaccatgtggttgctgggatttgaacttcggaccttcggaagagcagtcgggtgctcttacccactgagccatctcaccagcccccgtgctgtgccctttaaatggctgtccttcctcaccaacaagcagttcctacccttgccctgagacttgtacttcttgagcctggggacgaatgtgacctcaatcaagcattctagaaggcaccaagaatggctccaggaggccacacactacattctggtgtcctgggctgggcagcagtcactgatgagctcagaaggggatactgtgactttatcctaacacccagacccccctcccagctaaggtcccaaagcaagtaccatggcgggacctggggaattgctcccaccaggcacactgtcctcctcaagtcccatggctggatcctgtctctggactgaatagtagatgttgtgtgggcatagaccacatttccctgggattcctcagccaaggtcctagctcctgtccaccccgcacagctcctaaggaaaggttcggccctgaggtgatgttctgtggttgtctgagcgctggcaggccaagagagcctggttaggtgtgggaacacccaacctggacacaccactgtacagcagacaagtcatcagtggcactttattcagtcagttcttacatcaaggtgtttagaaaacatcatgctgcctgctagccccgcagggccctgggttagcctagggtctaagaagtccttccttgtcagcttctataaaacagggctgtagcacaggatgggggtacatgggcttcctcagataggtcccacaggtcatgagcctggaaccaaggcttgagcccccaaatgcgagctggcactcacctaggggctgaggggagagtcaagacccactaaaatccgaaaacacacctggtgaccacagcacaatcattagagctcaaggtggtctgagtttccactcaatgtcttgaatagattgctcagggctcagaagtatcactttgcgctgttacatgaacatgggagatgtctacacatgatctagctggaggcactgggacccctggaagacagaagagggtatagaacttgctcccctaccatggtactaggaggcgcagcctaagaccatgagaatggcttttaagaactgtatggtacccttcacatttgagatgttaataggccaaaaggagcctggaatttaggtgccagctctccagatcctggtgggaaggtggttcagagtggagagaggaaacgccaggctcctgggttgaacccttaatttaacaggtgcagacatgtcagctcctgaacgtacaccctgggcaagtgctgaggtacaggacagaatgacagttgaaatacagccagctttcaaatgctcagtctgagtacaggtctcagtcctggatcctccatttcttttttttaagggggtggtggtggtggtagtggtttgagacagggtttctctgtgtagccctgcttgtccacctgcctttgccttccaagtgctgggattaaaggcgcacactgctatcactgcctggtggatctgctatttctaaccctgacccaggtcagttaagcaaacagatgtgaggacaactccaaaaaccaagggaagcatccactggcagacctagcacgtgtgtttgctaaggtcctgcagtgaggtgatggcgtgacctgcaaggacagagtccagagtggagggtagaggtacagtagggaattcctgaggcagcagcagacagtacaggccactgacagtacccagtaatacactaaaggatgaagacgatgggcagacacaggacagctccagactgctggtcataggagataccctctactgtggggacacacctggcaaccataatcttgtcctcgtagggacaccaggattcagatttaaccacggagccactaggctccttctgctgttactatgcacaggtttacatgcaagaatcaccttattcctgcttagcataatgtttcctttaacagttaagaaagaagtttcaagaaactgagaatgtcccattctgctcactgcttctctgtacatgttccagatcctgtctggagtcaaggattttttttcccctggacagggacttgctaagtagcctaagctgaacttaagatcttcctcccgttgcgctccaaggatggggttacaatgtgaaggtggtggtgaggccacaggacacccagccctggcctgtccatggagccatttccaaatgagaaaggcaaagagctctagactgtccacttagaggggtgccagtgaactgttggcgggcagggaacaccattctgaaagctttgtggcatcacagtacaacttcctcacttcttggtggctggagcacagccatgaacatttgtgctaaagaagctggagccttgagcctacaacatacagagattcccttgtgaagccccatcttgcacattgccctgtgggttaggacttgaattttctgttacaagccacacaaagcctcaggtatattcaagttgcagatgtcagttctatccccaaggcctgctcagcaatgtgaatgcccaacagaaaagatttcattttcaaaggcttcttcaatgtatgtcacccactatttaggaattactcatgaattaggcagacggtcatgtatgaaaagtcagtactagtcagttaaagaattattaagtggtgaccaatggtgaactcaagagagcgctagtcaacatgtctcggaatccatacaggatacagacactgctgtcagggacctgcagttatgacaactgtgaaggcgtgagcagacacatctatgtacatgggcaatcgggaatctcaatcccttggactgacggcagtgtcctcagagcagagtggcctgcatctgtgttatctaactcctagcccaaggcctatgaggacacatagcagacacatgctctgggctccacacaggtgctgaggtccagctggttctccctcgcctctcacaggctggaggctcgctcagatcctgatccaggaaggacacatacagagaaatgccttcctactgagcctggccagagccatgtctgaagctagggatcagtgtagggctatgatcctattggcagctgtaccttaacccaaggcttagggccgttcagtaccacaccagagcatgagtccacagagccaccctctccggctccagccagactgaatcttcgtggaatgatgaaaattaaaaattgcttcattatggaagtttctgatttattccagacaaaatattagatttgccactaagaatcacctcaaagcaatcactcttgtgtgtcatgcccctgtggctggcacggcatgatgaaggcagacctgtgggccagaagctggcagctctaattcttcacttctgcggcctctttctcagccttctccttggccttctctttctcttctatcttttcttctttctctagtgtggccacaatttcagctacctgggtggtagagatctgaacatcttctttgttcaccaagtcgattacctacacacagaggagggagacttaggaggggctccaccaccgcagtcacctgctgtccctcaacagctccgggagactccccctctgagccatcctctaggttggacacttgccattttactgcatgctatgggtatctggttctttctgctgctcagacctccaagagttatagacttcacagcgagggtgcggcaccagttcccatagcacatgcatgtttgatagtgcctgttttaaaatggaactaaaggaaattaacctatagttctggctatataaagaaaaatcacaagctggccaggtgtactgagaaccaagatgacagtggcaaacttttttccctcaagaccataacatataatttcagtaggttcatgacagtttgcaggctggagcccaggcttcccttagaggctggatctggactcaggtcttctcggctgacatccctggagcttagctactattcctactaactctacctactcagtatctttcaggcagccccaaagggatcctggcagaggtgttgaccctgttcctcagatccaatagggatgcaaggtcccacagtacatgtggaaagattccaaggcggcatgcaggggcattttcttatctcaccggtatgtctggaactttagtaacttaattccagcgtgatttcaaatgagagcaaagggctaagacacttgggcttgcaaacttgacttcccaacagtcttccttttgaaaggatttgttgatttttactatgtacattgttgttttgccccttggcgtgtctgtgaaggtgtcagatcctctgcacctatagttacagactgttgtgagctgctctgtgggggtaggaattgaaccttattcctttggaagagcagctagtacctgtaaccaatgactaagccatttccccaggcccttcctgatcgccgtacagctctgaataagcagcccccccacaaacccctgggccctagaacaggaaagcagccgggctggcctggcgcagccgcactgactcaccttgacaaggtcatcgatgttgatattgccgtccttattatcatccagggctgaggtcaaactgatgagcttgtgctctggaatgtgcttgatttgcttcatggcgctgatgagctcagtgatgctgatgacactctccctggggagtgcaatctgcatgtgacattggccaggtacctgctctcatgccttacccacagctctttccataaggtctgacactggagccatgcatgaactggaaatatcagcatgacttctcccacagtgagatcctaagccgctttcccttcaagatgcaaggctagcatgggcgcttacagaaagcatccttggatgctggggaggttgcttagtggctgtcagtgttctactatgtgaggacctgagttcaaatcctcagaacccatgtaaaaacctggtagtgatcacacatgtgtctattaccacagtgctattgggtgggggcaggcataggaagatcatgggcttgaaggctgacggcctccatgtacacataagcatgtataccagcacacacacacacttataacatagcacatatgcaaataccacactcacacacatgctcatgcataccacacacacacacacacacacacacacacacacacacacctgaaaaaagttttgaggctggagaaatggctcaatcgtaaaaagcaattattgcacctgcagaggcttgagttcagttcccagaacccatgttgggtggctcacagttgtctataattccagctctaggggatctgacactttcttttggcctccatgggcaccacacacatgtgcatctccccacagtggggagcaccacgtcttccagtctgtcagcaaccaattccaggacttagagtagaagccacgctgtagccatctgcctcactgtggagtctatggtcaggacactgtttgctggtgtctgctcaggaaggcagactgtccacaatggtgttataccagggttagaaaagtggggaagcagctgggcagtggtggccagcacttgggaggcagaggcaagcagatttctgaattcgaggccagcctggtctacagagtgagttccaggacagccagggccacacagagaaaagtgatgaatcaggagaaggcctgacagtttgaagaaccaggaaccaagttcaaaaagctcaaaaggatgggaattcagggaagaggcaggtctgatctacctaggtaaaacaagcatggagatacagaaactgagctgtgaagggaggaaaaatgagagcagagatctcttgtaatcctggctgcccctggccctaagtgaggtgggcaggtagaggtcaaggagatacactttgggactagaggcccactcaccctgttggagtgctctggctggggcccagcttgccatcctgttgagtggtctccagctgtgtgatcaggccatcgatctgcccgatcatctgctgcactcgctttgacagcctcttgctcgctgcagattcttctatgtacttctcctcacccgtctttgaaagttccttcttgatctcctgtaagtcctaatttaaaaagtttaccccccaaaagagggagggctctacattaatttgaacttaaacattaagtcgttaatttgaactgggacggggctcagtggtacaaggtactatgcaccaggtcctgtgcttgacccccagctccacaaaacagaaagcaaccaaacagaagaattaaattcagcctcaggaactgcagagtcttatttctctcatgcaaacttattcttttttgttgttgtttgtttgtttgtttttcgagacagggtttctctgtgtagccctggctgtcctggaactcactttgtagatcaggctggcctccaactcagaaatccgcctgcctctgcctcccgagtgctgggattaaaggagtgtgccaccactgcccggcacaaacttattcttattaatttatttttgtaagttcaaacttttaaaatctattctgaatttcaacttcctttgtagttagcaatgaataaatacaaaggctcaaggatgcctaagcactgccttctttatatgggtcagaggtcacagggctaaaagcagggtgaggagcagagggaataaggcactgccttgtctggtgaaaaatgtggtttctggtggacaagtcacataacccag

SEQ ID NO: 110 - DNA, 2887 bp, Mus musculus
ccggcggggggactcagtggtgggcggccggcactgggacagaggagaccctggaaaagcgggccgagagacggagccgcgcgtggtgagttgggctctagcggccgccagtctccacagaggcgttctcccaccggcgccggagccgcgtggggggttgcagcatgcccgcgcgcgctgcttgaggacgccgcggcccccgctctggagccatggtagtcccggcctgcgtgctagtgttctgcgtggcggtcgtggctggagctacttccgagcctcctggtccagagcagcgagttgtgcggagagcggcagaggttccagggcctgaacctagccagcaggagcaggtggccttcggcagtggggacaccgtggagctgagctgccatcctcctggaggtgcccccacagggcccacggtctgggctaaggatggtacaggtctggtggcctcccaccgcatcctggtggggcctcagaggctgcaagtgctaaatgcctcccacgaagatgcaggggtctacagctgccagcaccggctcactcggcgtgtgctgtgccacttcagtgtgcgtgtaacagatgctccatcctcaggagatgacgaagatggggaggacgtggctgaagacacaggggctccttattggactcgcccggagcgaatggataagaaactgctggctgtgccagccgcaaacactgtccgcttccgctgcccagctgctggcaaccctaccccctccatctcctggctgaagaatggcaaagaattccgagggcagcatcgcattgggggcatcaagctccggcaccagcagtggagcttggtcatggaaagtgtggtaccctccgatcgtggcaactatacctgtgtagttgagaacaagtttggcagcatccggcagacatacacactggatgtgctggagcgctccccacaccggcccatcctgcaggctgggctgccggccaaccagacagccattctaggcagtgacgtggagttccactgcaaggtgtacagcgatgcacagccacacatccagtggctgaagcacgtggaagtgaacggcagcaaggtgggccctgacggcacgccctacgacactgtactcaagactgcaggcgctaacaccaccgacaaggagctagaggttctgtccttgcacaatgtcacctttgaggacgcgggggagtacacctgcctggcgggcaattctattgggttttcccatcactctgcgtggctggtggtgctgccagctgaggaggagctgatggaaactgatgaggctggcagcgtgtacgcaggcgtcctcagctacggggtggtcttcttcctcttcatcctggtggtggcagctgtgatactctgccgcctgcgcagtcccccaaagaagggcttgggctcgcccaccgtgcacaaggtctctcgcttcccgcttaagcgacaggtgtccttggaatctaactcctctatgaactccaacacaccccttgtccggattgcccggctgtcctcaggagaaggtcctgttctggccaatgtttctgaacttgagctgcctgctgaccccaagtgggagctatccaggacccggctgacacttggtaagcctcttggagaaggctgctttggacaggtggtcatggcagaagctattggcatcgacaaggaccgtactgccaagcctgtcaccgtggccgtgaagatgctgaaagatgatgcgactgacaaggacctgtcggacctggtatctgagatggagatgatgaaaatgattggcaagcacaagaacatcattaacctgctgggggcgtgcacacagggtgggcccctgtatgtgctggtggagtacgcagccaagggcaatctccgggagttccttcgggcgcggcggcctccaggcatggactactcctttgatgcctgcaggctgccagaggaacagctcacctgcaaggatctagtgtcctgtgcctaccaggtggcacggggcatggaatacttggcttctcagaagtgtattcacagagacttggctgccagaaacgtcctggtgaccgaggacaatgtgatgaagattgcggactttggcctggctcgagatgtgcacaacctggactactacaagaagaccacaaatggccggctacctgtgaagtggatggcaccagaggccctttttgaccgagtctacacccaccagagtgatgtttggtcttttggtgtcctcctctgggagatctttacgctggggggctcaccgtaccctggcatcccagtggaagagcttttcaagctgttgaaagagggccaccgcatggacaagccagccagctgcacacatgacctgtacatgatcatgcgggaatgttggcatgcggtgccttcacagaggcccaccttcaagcagttggtagaggatttagaccgcatcctcactgtgacatcaaccgacgagtacttggacctctccgtgccgtttgagcagtactcgccaggtggccaggacacgcctagctccagctcgtccggagatgactcggtgttcacccatgacctgctacccccaggtccacccagtaacgggggacctcggacgtgaagggccaacagtcccacagaccaagccccaggcaatgtttaccggaccctagcccgccctgctactgctggtgtgcagtggaccctagccagcccagtgcaatgggccaacagtagacaagacttcctgcgtgtttatccttggctcctgggtgcagaggcccttgggaacatgcactgctgtagagtaatctcctgactggccagggccaggagcaccaaacaagaatgtaagaggcccaccctgtgcaaccctggggttctggcccctct

SEQ ID NO: 111 - DNA, 2403 bp, Mus musculus
atggtagtcccggcctgcgtgctagtgttctgcgtggcggtcgtggctggagctacttccgagcctcctggtccagagcagcgagttgtgcggagagcggcagaggttccagggcctgaacctagccagcaggagcaggtggccttcggcagtggggacaccgtggagctgagctgccatcctcctggaggtgcccccacagggcccacggtctgggctaaggatggtacaggtctggtggcctcccaccgcatcctggtggggcctcagaggctgcaagtgctaaatgcctcccacgaagatgcaggggtctacagctgccagcaccggctcactcggcgtgtgctgtgccacttcagtgtgcgtgtaacagatgctccatcctcaggagatgacgaagatggggaggacgtggctgaagacacaggggctccttattggactcgcccggagcgaatggataagaaactgctggctgtgccagccgcaaacactgtccgcttccgctgcccagctgctggcaaccctaccccctccatctcctggctgaagaatggcaaagaattccgagggcagcatcgcattgggggcatcaagctccggcaccagcagtggagcttggtcatggaaagtgtggtaccctccgatcgtggcaactatacctgtgtagttgagaacaagtttggcagcatccggcagacatacacactggatgtgctggagcgctccccacaccggcccatcctgcaggctgggctgccggccaaccagacagccattctaggcagtgacgtggagttccactgcaaggtgtacagcgatgcacagccacacatccagtggctgaagcacgtggaagtgaacggcagcaaggtgggccctgacggcacgccctacgacactgtactcaagactgcaggcgctaacaccaccgacaaggagctagaggttctgtccttgcacaatgtcacctttgaggacgcgggggagtacacctgcctggcgggcaattctattgggttttcccatcactctgcgtggctggtggtgctgccagctgaggaggagctgatggaaactgatgaggctggcagcgtgtacgcaggcgtcctcagctacggggtggtcttcttcctcttcatcctggtggtggcagctgtgatactctgccgcctgcgcagtcccccaaagaagggcttgggctcgcccaccgtgcacaaggtctctcgcttcccgcttaagcgacaggtgtccttggaatctaactcctctatgaactccaacacaccccttgtccggattgcccggctgtcctcaggagaaggtcctgttctggccaatgtttctgaacttgagctgcctgctgaccccaagtgggagctatccaggacccggctgacacttggtaagcctcttggagaaggctgctttggacaggtggtcatggcagaagctattggcatcgacaaggaccgtactgccaagcctgtcaccgtggccgtgaagatgctgaaagatgatgcgactgacaaggacctgtcggacctggtatctgagatggagatgatgaaaatgattggcaagcacaagaacatcattaacctgctgggggcgtgcacacagggtgggcccctgtatgtgctggtggagtacgcagccaagggcaatctccgggagttccttcgggcgcggcggcctccaggcatggactactcctttgatgcctgcaggctgccagaggaacagctcacctgcaaggatctagtgtcctgtgcctaccaggtggcacggggcatggaatacttggcttctcagaagtgtattcacagagacttggctgccagaaacgtcctggtgaccgaggacaatgtgatgaagattgcggactttggcctggctcgagatgtgcacaacctggactactacaagaagaccacaaatggccggctacctgtgaagtggatggcaccagaggccctttttgaccgagtctacacccaccagagtgatgtttggtcttttggtgtcctcctctgggagatctttacgctggggggctcaccgtaccctggcatcccagtggaagagcttttcaagctgttgaaagagggccaccgcatggacaagccagccagctgcacacatgacctgtacatgatcatgcgggaatgttggcatgcggtgccttcacagaggcccaccttcaagcagttggtagaggatttagaccgcatcctcactgtgacatcaaccgacgagtacttggacctctccgtgccgtttgagcagtactcgccaggtggccaggacacgcctagctccagctcgtccggagatgactcggtgttcacccatgacctgctacccccaggtccacccagtaacgggggacctcggacgtga

SEQ ID NO: 112 - DNA, 33352 bp, Homo sapiens
  misc_feature (8632)..(9859): "n" at positions 8632 through 9859 can be any base.
ccgaagctgagcttcttcacctgtcttctgactcacttatctccccgagccccggagatacaaggatcacaggcaggggccttctcctgagctggccagagctgggcaggacacttggggcacgcagcttttgtgggctagcctggaaactcggctatcctggacaccacactggcaacaggttgtctggagccaggtcggggcatgtggggcctgagccaaggctgtcagctgaagcctctgacattacttgtgtccctaggacaatcacacgtgagagcacatgcacacgtgaccatgtgagcacacaggcacgggttcgggccccaggctgtgctgccacctgaagcccctgccctggctgtggatgcccatttggctgggcacagcaaggcggcggccttggcacagggagcctgcccagccttgctctgacccagttttccatgcccaggcaggcgggtggcactggtgtagtggctcccagagcttctctttggcaacaccaatcccctgggcccaaagcagctccacaggggcacctggatggctccatgtgccctgggcatgtcctctgagagggtgggtgcccccctgggatgtggccacccagccccagcggtttcacaccctagaaccagtgccttctgcctgtggtccctaggcacacagctgccgctgcctgaatgcgctctgcctgccctgccttctgcctccagatgaacggacctgtcatccagggagcgatccctgtggccctccactctagacctgcaggctgcttccttgcccactcctgggggtcagtcatggcctggctgtagaccagatccttgaggggtgaatctggggataagcctcagagccacagggcctgggcaggcctcagaaggcatcccagagaagggagggtggaaggtccccatgggcagggaggcgcagggagcaaaggctgctgggagcagggaggggagctgggcgggcggaagggcggccgtgggaagccagccctggcctggctggcctgataagctgcccctttgatccacactgaggcaacacagacccccatcctgagataaccccgggcctgggacccaaggctctggtcaacccgccctcccgagtgtgcgctgccctgcccctccggccctgacagtgaccggtccttgctcagctgcaagctgggtgggtgcagtctgagcccaggcctggcgggcactccatgtgcccccaccccaggacctgctggtcctcaccctgccttcaaagcctccccagccccagcctctgtgtccagctctctgtcccctttggttgggaaggggcacctcccccgccccccagttcccatccccttcactgtgcccctgggaggcccctgaggccctcactccccagctggggctcagcaggtttgaggccctttgggcagccctgtctgaccagggctatagtgtggcacaggtgtgggcacaggtgtggcataggcgtgggcaccagctatgtgtggcttgggtgcacactgcgtaggcaccttctcccgggcgcctgcctctgcctggcgccggtcagcacccccatgccctcggtccctcccctgcccaggtcagtggacaatgaagctgtcagcagactggggccgggggaggcaggcaggcgtggcggggaagggaggcctcaggaggcgaagatgtctctattaggggctgcagaccttgcttccactgtcctgcccagccctggggactccgagagctggaggcagaggtggccccaagcttggggcagaaagggtcgtcttgtccatcagggccccagtcagccttgggactgggtccctggaaaggcaggcccatagatggaggagcccagagcgtggggctggccacaggtggtcagggagggtggaagcgtggctgggagctgcacagggatgaggtgtcgacggcgctgacatcccagccctgccagcctcctaaggcacccacggcccacatctccctgctgagcggaagcactgggggacgctctacccagtgcctcagcagaccctcagccaacggctgttagaatatacctcgtgtgaggtgcgtcacgatacccagctgtaaaatggggcaaccctgtggcttcaacagactccccttcccagtgcctgcggctgagctggagtggcaggagggcttctgtgggagcaggtggcaggaagcataagggctgggggacctgcagaagctccgtacccccgggaggctggggccagagcaggcttcttgcaggggcgctggtttcggccctcaccctgactgccctgccggatccgggcagacgaggccccacgcacaccgcagcaaggggcccaagacgccagccaggccctcaccttggcaagaggtggcttctgtttctgacaggtcaacagctgggctaggggaggtctccagggaccagccacgccccacttcctgagggctggagagggctggggagggtggcccaggtctgcgatcatcagggcctggccagggccttctttcccagattcccccagagctggagtccccagagccacgccccttccctggcatgccctggcgcccgggccatctcctcctgggcacttgcggaggttgcccctgctctccccactgccctctcagcaggcgtgaatagagtccctcatagcttgggagactgaggcccccagcaggtgcctcttacccaagaccttggaactgggtgaggtcctccgggcccaccaggacccgcctcagacatcaggctttgcacttgcagcccggagcctcccgaccccactcccaggccaagggcctctggccgcagcctccgccatcatctgccggcttctggggccgagcatcagggccctgtgcccctgctgagcgtgccgggtgggggccgggctgaaggctgcacctggaggcagggctcccgaggaagccgcccagggggtcagagccaaacagctgcctcctctagtcagccccatgcagccttacgggggcagcgccctgcagtggctgcgggtggggccgggtggggcagggctgccctccctcatgccgctgggcacctggcctggggcagggggctctggcccactctcgggtctccctaaatactgtggcgaacaccccacccttcccaagctcagctgaaacctccctggggcagggctgtcagatcaggccactgagcgcctcctgctgcctgtggctctgtgcctcagtttccccacctgtcaagtgggtgttggtgatgtggctggcatgaagtttctgtcaggagccaccagcactccgcaccttgccatccacaggttctcagccacacagggtgtggggttgccccaagccaacccatttgtgggggtggggccgccccacaccccggctgggctggacgggatctccatcctctcgtgggcagctgcctgctgggcccagttggccactctggactcttgggccctggccggaagcacgactgaggttgtccatggtttggggacgggcaggcagagggtggccaggcgaggccctgagaaggggctctggccgaggctggccaggtgacacccggagtggcgggcagggctgagaggaaggggcatcctgaagagggcggaggccgcggagggaggagggtgtgacgtggggttggaccggcggccccgaggcctggattcctaattcagccggagcctgtggagtcggggcttgtttattcttggcaggaaggctggtgctgggggggcagaagtggggagtgaagccttttcaaaaaataataataataaaaacgctcatttagaaggctcccaaggcgtgctgaactccaaaagggtcttggaaaaaatgctgagagggtttaagtgtaaatggacccaaaacaccataattaaatttcctttaaatttaccagagtttggggtcaaagaaaaaataaaacttagggaaaatacacttgaggtttcaggcaaatgccaagtgcttaggaaaatagattctgagctgctcagcggctaccggcctggcccccgccatcctgggagctgcccagccttaacccctccctggccagccctccactgcccgccccacccacccctgtgggggaccccaccaccacctcctgctgcttccgcacggttcgagccgccctcctgtgccagactccaggcagggagctgggcctcccccactcccaggctggggcaggagcccagggggagcctgaacattcacccccgcccccatctctacagctctctcttgtgtctgcagacagctctggtttcctttctttgctcatctgggagcagccacattttccaaaccaaagtcagaacttgaggtctagtggtctgagtgaaccaaacggtaaaaaggccagaatgtttgaactgggactgtcctgccatatccaagacgacaggctcccagcagctcatgactcacggtgttaccctttttcctcagcctgccaggaagctcagagctaaaattaagggtcttgctagctgcgttggcttagggattttggaatattttttcttcttcttcacgttctttaaaatttcatttctgttataatgagcaaatcaaggtttgtttttttattttaatacttttcaaattttgtgagaataaatttaaaaggcaaagtcaggcatggtggcacatgcctgtatttgggaggctgagacgggaagattgtttgagcccaggagttcaagaccagcctggacagcatagtaagaccctgtctcaaaaataaaatagaaggcagaaactacccataaactataatagctatagccccactaacagcccagtccagttcagcagggctacccaggggcccttcttcctccatcccatggtggcctgccctgatccctggcacccaaccctgtgccctgacagtgtggaagggcactagtggttcctggggaaggtggtaggagatggggagctccgaggggagatcgcatggctcccagggggtcccatgggcagaagggacttgatacccactccggacctccgtgtcccctgtccttccactcagcctcatggcagggccgagggaagctccccgcagcagccccagccctaggccaggttctgatcccagaggggagctgggcaggaggctctctctggcagctcgcctgccctgggttccaggtctccaagcctcggcctccctgcccacctccctgtcgggaaaggcggcagctgcctgcccggagtgctgtggggaacaggcggtgtggatctgagactgtgctgggaatgtcctctctgccgaaggcgcctctgccattttccgagtacctgcaagggagacgcaggagacgcgggtgtgagcggggccatgggcaacctgcggaggccctgcacccaggatgggcctccctcccaggcaccctctgccactcacccacacaggccccagcaagccaggctgcccagctctgagtcaccgccagggctgggctgggccgggccgtcagccgcacgcgccgcttgtctcggcccctgcctcccatactcaccttcaggggggacccctgggtatgggcctcaggaggtgggtgggggtgcagggggagtgggtagggaggtgtaaaccggagtccagcagatgggaagttcctgtccggccggcacctgcttggagcctcctgcacatgcggaccctcaacaggctccccgagtcctcgcctgccctccctgcctcaaaggccccagaagggcctacttcatcaggtgccacgaggatgaagccaggtaatattgcaaagggtctgtggaaacgcttgagcaagggcactgtgatgaaattgtggctactgacagctaatgtgcagagtcaccgaaattcaggagtcaagcagccggcctggcctcacctcagtgtcgggggaatgccatctgcacctgtgggcttggaagtgatccatttgaacaatacaattattcagacaatactaaaccgagctttcaggcaagacctcccgtggccctgacagtcctggggcagagtgggcagcaactccttgctggtggccgtggcggcactaggacccttttgaaaccaatttggcaaaattagcggcaccacggaaatgctcctgccctttgacctaactgctcccagacagtgccactggagaagccattcagaatgtggagggcgccagaggaggcagctgccacgcagtgcgtagtgggcagaacggcggcctccaaaagacatagtcatgtcctcaccccttgcagcctgtgaacgtgaccgtatttggaaaaggatctttgcaaatgtaattaaggtgagaatcttgagatgggggatcctcttggattatccaagtgggccctatatccaacgacaagtgtctgtataagagatggaagagaagatggcagagtgggaagcagaggctggagcaatgaggctgcgagccaagggacttggagccctgggacacttggagcccccaggagctggaaaaggcaggaaagatcttccctggagccttcagaggcagtgcagccctgcctacaccttgattccagacatctgctcttccagactatgagaaagtaaatttaagtcaattagtgtgcagtaatttgtgagggcaacctagaaatacaagatgctactgaactaaggaatccccggctgctactggagggagaggtggtgggcctgggccagggctgcggggacaaagggagggagtgggttgtgaaagtgcctggtccccagtccctcctcctgccagcactgcccactggtcaaacccacccagaagctggagagcaagggaccctcagagatagggtctgtaggatcaggctttcaaggacaaatgggagaggggctggggaagggacacatggggaccagacccctactgggcatttctgccaaggagaggatcctggtgaggaagaaagcagaaagctatgtgttcacagatgcacggatgctcccctcccagagacccgtggccgtgggtgcagagggagtcagtccttcttggaggtactgggaaaggagcctacagctccactgagcccttctgcctacaggaggggccccactcagcagctgttccctgagggagacctgtccacgcgtgagctccttcccacagtcccatccagtcccccaggggaaggggcaagacggtcaggtcaggacccacacgcatgctggtgctttcagaacctgatgacttagttggttaagagagctcacacctgcaatcccagcactttgggaggctgaggcaggtggatcagttgaggtcaggagttcaagaccagcctggccaacatggtgaagccccgtctctactaacaatacaaaaattagccgagtgtggtggtgcacacctgtaatcctagctacttgggaggctgagacaggagaatcacttcaatcagggaggcagagattgcttgagctgagactgtgccactgcactccagcctgggtgacagagcgagactccctctcaaaaaaaaaaaaaaaaaaaaaaaaagagcagggccaatgtgctgctgtgccttggggaacggtgtcctgggagcggacctggctggcagtgacctggggctgtgcactggagggggctggacagtgcacttggaggtgggtgagcctgggccccaagacggtctggggacatgggcttggccagagcaggaaatgagggtggccaaggacaggtgctgagccaccgagtcggcacagaggggtgggcatgagggcttcctgggagcagggcccttccaagtccctgaggtcagcccagggacaccctggcctctgggagattcatggtggagctgtgcatgggctgggtggggtcagcaggcagccagtcactgaggggctttcagcgcccattttcctgatgagcacctccagtcctggaagccacaagccaggcacgcagcccacccggccggccctcccggccagctcactggctcccatgggccccggacctccttgggctttgcctgaaggtgggagcagatggccttttccttgtgagggtggacacagaagccaacagtcatgtggggtgaggggacccaggcacctccagcgtcccccgcagggcagcaccttcccctcctgggaacccacccctcttcagctggactctgagcccaccccgtggagcccagaacctcgggccagctcaggctctgccaccagctctctgtcatcctccctcagagccgggctgtgctccccaagccaggggtatccagcccccgctcttcatcctaggccgggcaggcagccagccccaggcctgtgtcctccttggggggcggggggtagggacccctcgcgcggggctctcaggcggcttagctgcgtgcggccccaggtcagtcaacgcagcctctgcacctcgccggtcaggtacgcaggccgcgccgggctgccccagacctgcggcgcacacgggaggctcagcctggaatgccgtcctgccctcctccacctgaggaattgccgctcacaccacagggttcagctccgcggcatctcggcgaagcctcctgannnnnnnnnnnnnnnnnnnnnnnnnnnnnnnnnnnnnnnnnnnnnnnnnnnnnnnnnnnnnnnnnnnnnnnnnnnnnnnnnnnnnnnnnnnnnnnnnnnnnnnnnnnnnnnnnnnnnnnnnnnnnnnnnnnnnnnnnnnnnnnnnnnnnnnnnnnnnnnnnnnnnnnnnnnnnnnnnnnnnnnnnnnnnnnnnnnnnnnnnnnnnnnnnnnnnnnnnnnnnnnnnnnnnnnnnnnnnnnnnnnnnnnnnnnnnnnnnnnnnnnnnnnnnnnnnnnnnnnnnnnnnnnnnnnnnnnnnnnnnnnnnnnnnnnnnnnnnnnnnnnnnnnnnnnnnnnnnnnnnnnnnnnnnnnnnnnnnnnnnnnnnnnnnnnnnnnnnnnnnnnnnnnnnnnnnnnnnnnnnnnnnnnnnnnnnnnnnnnnnnnnnnnnnnnnnnnnnnnnnnnnnnnnnnnnnnnnnnnnnnnnnnnnnnnnnnnnnnnnnnnnnnnnnnnnnnnnnnnnnnnnnnnnnnnnnnnnnnnnnnnnnnnnnnnnnnnnnnnnnnnnnnnnnnnnnnnnnnnnnnnnnnnnnnnnnnnnnnnnnnnnnnnnnnnnnnnnnnnnnnnnnnnnnnnnnnnnnnnnnnnnnnnnnnnnnnnnnnnnnnnnnnnnnnnnnnnnnnnnnnnnnnnnnnnnnnnnnnnnnnnnnnnnnnnnnnnnnnnnnnnnnnnnnnnnnnnnnnnnnnnnnnnnnnnnnnnnnnnnnnnnnnnnnnnnnnnnnnnnnnnnnnnnnnnnnnnnnnnnnnnnnnnnnnnnnnnnnnnnnnnnnnnnnnnnnnnnnnnnnnnnnnnnnnnnnnnnnnnnnnnnnnnnnnnnnnnnnnnnnnnnnnnnnnnnnnnnnnnnnnnnnnnnnnnnnnnnnnnnnnnnnnnnnnnnnnnnnnnnnnnnnnnnnnnnnnnnnnnnnnnnnnnnnnnnnnnnnnnnnnnnnnnnnnnnnnnnnnnnnnnnnnnnnnnnnnnnnnnnnnnnnnnnnnnnnnnnnnnnnnnnnnnnnnnnnnnnnnnnnnnnnnnnnnnnnnnnnnnnnnnnnnnnnnnnnnnnnnnnnnnnnnnnnnnnnnnnnnnnnnnnnnnnnnnnnnnnnnnnnnnnnnnnnnnnnnnnnnnnnnnnnnnnnnnnnnnnnnnnnnnnnnnnnnnnnnnnnnnnnnnnnnnnnnnnnnnnnnnnnnnnnnnnnnnnnnnnnnnnnnnnnnnntcctgcagtctcccgacggcgcccgcctcccgccggtgcccgcgccgggccgtggggggcagcatgcccgcgcgcgctgcctgaggacgccgcggcccccgcccccgccatgggcgcccctgcctgcgccctcgcgctctgcgtggccgtggccatcgtggccggcgcctcctcggagtccttggggacggagcagcgcgtcgtggggcgagcggcaggtaagaagggacccactaggcacgggagaggccggcccgtgcgggcagaggcgttggggacgggaaccggccccgggtcggaggggccgccgggtgtgagtgacgccccggggttagagcccggattccgctgcctccttgccggagagcgcggccagagctagcgcggcgacttgtggtgcgcccggagccgcagctaccctccaagtgcgaggccaccacggggagccaggctgggggttggcgtccgcagccccgatcccctgcgactccctagccctggcctgtcgggagggcgcggggggccccatttccacgattcccgctgttgttattcgggttctgcgcagacggaaagttcccattgttggcgtccccctcccccgggccccagtttgtggccagcttcagccaaggcgagagaccggacttctaagggtgggtgtgcgcgtcagcgaagcccggcccctgcccgcccgaagaggcagcagcctccagcgtccccgctgccgaccctgcccctgcctgggggccgagggcgcttccccgtgggtgcgcgccgagctccaggcaagcgaggggcgcgtgtcccagcgtcgcgggccctagactgggctggcggtccaggtcccgcgggacgtcgagggtctgaagggaggtcccaaggggcgaggggaggggaaggggcgcccggccggacctgcacacgcgccgcggttcctcgtgggccgggccgagagctccggtgccgccgccgcgtacacccgctgccggctccggacgggcgaggggggcgcgcacagctcagcccggcggccgcgcggagggaggccttggcccggtgagctcgcgccccacccgggcccaggcccgaacagccgcttctttgtacctcgacgcggccacagaccgcgcattgatggcggctcggcggctcgcggggaggtgtgagcgaccgcgggcgcggcgggccggggagggcgcctggagggccgaggcagatggcgtccgccccgcccgcgcccccgcgcccctttctccgtcggcggctgcagcctcccggaacaatgtcattttttttatgaatgaaagtggcccggcgcttgaatgtgcgtgtcattcagcggcgtgacaggggccgtcgggaggtcagcgcgcgcttttagcgtctgctcgggcggccccgcttccaggggtgccggaggggcggccgcggggggagcttggctttcgcattctcattcagataaagatattactccctacggcccgggaatgtcagccagccccggggaagggcggcggccaggctgcggagcctctcctggaccccctgcgggcgcgcggggcctcccccagtcgctcctggaacgccccgcccacccctcccccggggcggcgcccccgcccgcactggagctggtgaaacaggtagtgagttgatcggtcaataaacttaatccggttccttaacaagatgggccgggcagtaaaaatacaaagacctcgtgaaatggactgaggtctaggctggcgcttgcccgggaacataaattatggagccttggctcgcaggggtcaagggcggtgggaaaggttttggccactggactgccctggccaccccaggccctgccaggacagcccccatctccccagggggccgtattcctggttgggacctggagtgaccccccagggtgcagggaggtacacaaggtcggctctcccacagtcccaccccacccagcaggggtctgggggtgcagggcctttcccgaaggtgctggctgcaacctcccccactcctcctctgcagggctggactttgagccgcgtgggcctctgggtggttcattaacctgggctgagcctggcctccaggtccttgtgtgagcctaggaaccccttgttacccaccccccagctccccagccctcaggtctcacttggggctagatctggggctgtggcaccccttgttacagctgagcttgagtgggagcccaggggcttggggtctcctggaggacggggatctaaagtcacctcatctagggaggcatgcagccctcacctgagtgattcaggagtgaatgagccaggagtggagccacctttggtggggtaggggtcagcctggacctctaggctgccagctcaggctcgggtgccctcttcgaacctcagtttccttacctgtccaagagaaccgataatggcaggctgtttgaaggattaggccagataaccctggcaagccctctttagcctgcccagcctccagatcccttttttccggactttattgtgaaactccaggtggggagacagggaggctggacttttgggggccccctcctcttaggctattttatagctcctacctggcaatacctcctgtaccccagagagctgcagagaacttcatgtgcatccgaaaccagaatgtgttgtttcctgaccccaggccctcatctcaccccaaaacccaaataaacccctggggcagccagctccggaagcgagtctggatttgatccttgttctctggggtcaacccgaggggcttatgatggagcaaggctcccccatcctctcagccatgctccctcacatgcactgggcctccactgcagagacccagagcctggagaaaggttccccaggccagagtttggccgtccccagcaccctgcctaatggacatcagtcttggggccagagacccagggcagggagcgcctctcacccctaccctcactcctgcagccatttcagggcctggtgccctccctgagctcctgggcctgtggggtgggatttttactttgtgccacagtgggggaaactgaggtacaggaccagtgagtggcagagttgtggagactctgggacacagcagagggctgtcgttggcatgtggagcccaagttgaggtcggcactgtgtggggttggggcgccggcaggagcacgtgttgtgggatccatagaagggtgggaggtgggacgcgttgcctcctaccccgccttgggtacagcaggagttttgtctccaacgtgtttgggcaccagtgtctgtgtggtgtcagtggggcctcccttttgtggatcaagaaagaaagaacccttcctagggctgctggggggctatagctctccccatgcctggcagctgggtggggtatgggggctccacccaactgctgacttcccagtgggagtcagaccctgaacttatagcacccactcatgccccgtgtcacactgtccttcacctggtgctcgccacccagcccctgctggggtaccctggcctctgctggcacctagcaggcaggcagtggggggggcagtcagggctgcaccctccccaccacacacgggcagatggccactggtgtggctggcctggggctgctgtgtcccccgtccccccgtgctggaccaggctgaagcaaatacttgtgtggatggcttgacctgttgtcgccactcagaccaaaccggaaccaaccggctgttgcccttgggccagggcctgcagctgaggctgccataaccagcctgttctcggccttctggggggcctcgagcagctcccagctctgggtggtccccacaagacactggccaggaccggagggctggaggtcaggccaggagcccccctgactgcggggtccctacaggggcagtccttgagctgtgggtcccggtggggcgagggctccttcggatgcttcaggggatgagtgtgggcccttctggctggcagggtcaccctgggcactaggcgtgtgtggctggatcaggtgggttgggcagaagagggcctggccgggcagccagggactggtgtggccagagtgggcagctgggcccccgaatctaggccacgcgtctgcagaatgacaagtgatggcgcaacccgcccagctgggtctgaagaaggaggctgcctgggggaccacccacccccgtcccggccccaagcccgggacgcctgcctgcatgcattgtctggccctggcagggaagcctaggggcgattgtccccccagccctgcccatggtgtgtccttgggtcacaggctttggtggctctggggagctgggcagctactggggagggacccaggggccacctgcacatctgcccctgtgggtgggcccccaccccagcttctcagcccccagggaggggccagggctgctgacctgccctggctctcacagcttcctgcccccagcctggtcgtcctctgtgagggggccccagtccccctgcaggcagcaggactccaccccccggcccccttgagggcccgcctgggcctccccactccccggcctgtgagacccacttggccggacccagcgccgtgtttgtactttgctcttctcggtatgttttccgtcatgaccgccgtgtggagcttccataggagctgcaggatacagaaccttgcccaccccaaggagcccccacccccgccccggccccctcgcgctgctccggcctgtgctctgaccggtgaacccgcgcatcgccccccagaccgtccacacggccacgtgaccctgcacctccttccttctcgcctgttctgttccctggctgtccatctgaactgcttttcaggctcatatggggtgcgggggctactgaggacggacccctcctggggtgaatctgcaccacgagggggctggctggccaaccctggcaccccctctgagctccatttcagtcagaggccagcaaagggcagcctgtcccctttgcccgcagcacctgcccgtcgtggtgccgcctgtgagacaagcatggattttatgtttccaagcaattgaacaaattaaaagaacgaagagtcacattttgtgacactttgagatttgaattctccgtgtccatgagtgaagcatcatggggccactgctgtggggttggctgcaggttgtgtggggaaggcggctgtcacaccgaggcagaccggagtccttgggacagactggttggcaaagctgaagatagagacctttggcccttttgggacacagtttccagcccctggtctggtgggaccctggatctgggtcagagccttcctcactcagggccgccgaggcttccactgctgtgtctgtaaacggtgccgggtttgggggtgcctgcctcatggttgcccatcttccccacagaagtcccgggcccagagcccggccagcaggagcagttggtcttcggcagcggggatgctgtggagctgagctgtcccccgcccgggggtggtcccatggggcccactgtctgggtcaaggatggcacagggctggtgccctcggagcgtgtcctggtggggccccagcggctgcaggtgctgaatgcctcccacgaggactccggggcctacagctgccggcagcggctcacgcagcgcgtactgtgccacttcagtgtgcgggtgacaggtgagctctggggccacgccagctacagaaaggagccgagtgccgggctccctgagtccctgcgtgggtcaggagcggctgggggtctctctggtcattggtggagaggagggcaccccagaagtgctgcccaaatgggggaccctgctccatctgggaggggcacctgggggctcctggggcaggttgggcattggttgcggccatctctgccttgcagacgctccatcctcgggagatgacgaagacggggaggacgaggctgaggacacaggtgtggacacaggtaggagcagggtccagggttcaggccagccggggtggggcccgctgccaccgccaagccctgcccttcacaggcagctgagggactaaggccccggaacaacctccctggggtcaccccgaaggtctggtcccctcaggatacaggaggggctgggtcactgacatggctctagatgccccaccctggtggcagggctggggtgcaaggggacaccgtgttgctgatggggagactgaggcacagggccctgggggttccaggagcaggaggaggccagggctggcctgtggggctctggtgttggctataggtgaggtggaccccgcagacattagcgcagcagggcagggcactcaggtggctgccgtggggtggatggacccggggtgagggcgccggggcacctgccacaaccagtggcgggcagggtggctggcaggagggtggctggtgggtgggctgcggctgtgagagagcagtcggggacgatgcctggcgtcccggcctggaacggtggcaggtggactttgccaagttgtagggtggggaggtggggcttctggttttggagggagctctgaggggagtgcgtgcaggtgagggtcatcgtggcacagacatggggggcagttacgacttgcggactgatggtgtgtgcgctgggtccctgggccagtggggtaagcaggtgaggaagggaggctgagtccatgagagaaacagctgggggaactcaccctgggggtctccaggaggcctgggagggagctcagcaccgtggggtgcctctttccagcctgtgtccacactgctgcttgctgggcctcagtgcccctgatgggcgtgtgcctggagggggctggcagtgagctcactgaggggagggctgcttccctcctggggaatgccagcccatccttgcctggagtcccggcaggaaggcagcaccagccctgaggaaggagaaaaaccagttgggctgtgagaggggtggtgggagccctggacatcgagatgggaggaggcagggcctccagggtgccaccgtctctgggtgcccgccagacttggagctctgcagagggtggtgtagggtcttgatttccgtgggcccatgctgcccagctgcctccaaggctcctggctctgcaggcgactgggctcctctcctggtaaactgctcccaggtcctggcttgtccactagatgggcctgccccctgggtcttcagtctccccgttggtgggcctggccctggcacgcctctctgggcaggtgggctcccctggacaatgccctgtgccctgtgacttcacaggtccgggcagagcaccctggaggggaggggaggggacacacggcccagctctgagaaagccccggggaggggacaagatgtggaggctcctgggaacctcatcccgccctcttcctacacaggacgggaaactgaggctggggatgggcaggggcagctctgggaagggggttgttcagaggggcctctgctcccactcgggtcatggccttcacacgcacctcggcccgcaggggccccttactggacacggcccgagcggatggacaagaagctgctggccgtgccggccgccaacaccgtccgcttccgctgcccagccgctggcaaccccactccctccatctcctggctgaagaacggcagggagttccgcggcgagcaccgcattggaggcatcaaggtgggcgcggcggggtggctctgggcctggcaggcgcggtggttgctgcctccgctcactcacccgcccgcgtcccggtgcagctgcggcatcagcagtggagcctggtcatggaaagcgtggtgccctcggaccgcggcaactacacctgcgtcgtggagaacaagtttggcagcatccggcagacgtacacgctggacgtgctgggtgagggccctggggcggcgcgggggtgggggcggcagtggcggtggtggtgagggagggggtggcccctgagcgtcatctgcccccacagagcgctccccgcaccggcccatcctgcaggcggggctgccggccaaccagacggcggtgctgggcagcgacgtggagttccactgcaaggtgtacagtgacgcacagccccacatccagtggctcaagcacgtggaggtgaatggcagcaaggtgggcccggacggcacaccctacgttaccgtgctcaaggtgggccaccgtgtgcacgtgggtgccgccgctggggctcctgggctggccccaagggtgccccttggctgcgggttgcgtgaggatttgggtctaggggttggagcttcgggggcagaagctgtgggggtgcttgtggggccaagtctcagccaccccacacctcagggccataggcagctgcgttgggacccgtttccgtgtctgcagagggccagcctcagccactgaagtccctgacatggagctgcccacgggcttcttgggggtgggtgcggcttgggcagcagtggtgccccaggacaggagggcagtgtggccaagccctccaggccccctctgggcctcagaggcggtggctgagccccgacctggccgattggctctcgtcagctgtgtgcagtggggcccgagctcactgtctgcccgcctcctgaagcccttagctttgttcccatggctgccgggtgggggccactgaattgggacggttgcgacactcaaagcccaaagagaaacatctattcagagagaagacggtctcttgggggcggggagcaggcgcagggcgagggtggagtccagaccccgcccagagaggccgcctcgggccctgtccagggtgcaggttctgcaagagcccgggggagggcaggccagtgaccagaggttgtctgagggtctgggctgggttgttggggtggaggcagagacgtgcatcctgtgaaaccacagccaccgtgaagtgcctccacgcctcctccaggcagcctttggggctgacgcagcccagcctcgatctgtaccttgggggtctcccacatcctgcctcgtgcccggcggggctgcctcgggggcgtgcctgagccgggtctcttgtccccgcagtcctggatcagtgagagtgtggaggccgacgtgcgcctccgcctggccaatgtgtcggagcgggacgggggcgagtacctctgtcgagccaccaatttcataggcgtggccgagaagccttttggctgagcgttcacgggccccgagcaggtaacgactctgtcccatgccggccggcacaagagctccagctccaaggccctggccgcgcgccctgcacgccccgcacgcccagccctgctcgctcccgccccggctcgcgctccactcggggccgcctcggcaaggctggcagctccagcctccacggtgaccgcccgcttcgagccctgtggcctgcgccgacccttcccgcacgcctgcgacccccacaggaggtgcccggtgcccaccgggccggctccgtgccgtctgtgagcacccctttgcgcctctctccacccctgcccgctgcctgctcgcttccgcagcctgtgtgtccctgtgtccatcctccacctgcacccgcccggctctgcgctaacccgcatgctgcctgcccgcctgccgctcacctgggacagaggactcgccggtggaggggcctggcttcgggctcagtaccggtgtaccaggcggagggccctcagccgcgtggcggtgaccaagttggcgatggctgaggagttggtggtggcggcgttttccttgcagcggctggatcctgccgtgtggactctgtgcggtgcccgcagggcggtgctggcgctcgcctatcgctctgctctctctttgtagacggcgggcgctaacaccaccgacaaggagctagaggttctctccttgcacaacgtcacctttgaggacgccggggagtacacctgcctggcgggcaattctattgggttttctcatcactctgcgtggctggtggtgctgccaggtaccggcttctgctgctgctgctgctccgcactgtctgggggacgctggctcgggacacgccaaagctgccaggacggacgggaatcctgtgacttacggccgtcccgcttcttgagccctcactcctggccctgtgcccagtgtggggacaaagttggcctggcccggtcctggtcccagaggggccccctcagccccctcgagcccacttcccatctgggtccccaaaggcctctcctgtggctctggtgtctcccgggcgcctggtggcggtgtgggactggctggctctgctgggctccttctctccagggtctggccctctagactcactggcgttactgactgcgagaccctccagacaaggcgcgtgctgaggttctgagcccccttccgctcccagtggtgcctgcggctctgggccaggggcatccatgggagccccgtgggggggggggccaggccaggcctcaacgcccatgtctttgcagccgaggaggagctggtggaggctgacgaggcgggcagtgtgtatgcaggcatcctcagctacggggtgggcttcttcctgttcatcctggtggtggcggctgtgacgctctgccgcctgcgcagcccccccaagaaaggcctgggctcccccaccgtgcacaagatctcccgcttcccgctcaagcgacaggtaacagaaagtagataccaggttctgagctgcctgcccgccaggcctcctggagccccacctcggcccacgctggtcctgggctgtgtgagccctctctgcagccaggcgggctcccctctcctcgtctctgctcaccatgtagagcctagggtactttggggcacgaaacattctaaaaatcttcattcaatgctggtggaagtcagaacgcccccccttctggcccagcactgacccccggctgtacctccacgccctgtcgcccacgcggcgccaacctgcccctgctgacccaagcaggtgtccctggagtccaacgcgtccatgagctccaacacaccactggtgcgcatcgcaaggctgtcctcaggggagggccccacgctggccaatgtctccgagctcgagctgcctgccgaccccaaatgggagctgtctcgggcccggtcagtggtgctgagggccagcgttggctgtagggggcttggtggtgggggtgaaacagccaccagtcagaggcccggctgggtttaggggccgtcagggatgtggcggatgttgggtgtggctggggttctgtggacatgctcctgggacgggtgtatggcagggactgcccctctcaaggtgccctgtctggaggggcagcaagggcgggaggctgtgggtgacactcttcgtccttacgagcaggctgtagggggagcatggagggcttcctggaggtggtggctctgggcctcaagggctgggccaggctggggtggggaccgtggtgggctgagagtgggcgagtttgcacactcatggtccctctgcctccactgccaggctgaccctgggcaagccccttggggagggctgcttcggccaggtggtcatggcggaggccatcggcattgacaaggaccgggccgccaagcctgtcaccgtagccgtgaagatgctgaaaggtgaggagggggcggccaggggtgcagagcagggctgggggcgccgccgccgcctgacacaggccccccgctccgtgcacagacgatgccactgacaaggacctgtcggacctggtgtctgagatggagatgatgaagatgatcgggaaacacaaaaacatcatcaacctgctgggcgcctgcacgcagggcggtaggtgcggtagcggcggtggtgccggctgggcggccctcctgggcctggcagcccgtctgaggagcccgtgtccccagggcccctgtacgtgctggtggagtacgcggccaagggtaacctgcgggagtttctgcgggcgcggcggcccccgggcctggactactccttcgacacctgcaagccgcccgaggagcagctcaccttcaaggacctggtgtcctgtgcctaccaggtggcccggggcatggagtacttggcctcccagaaggtgggcagggcggcaggtgtgggtggagtaggctgggccctgccctgagatgctgggagcagcggggagaggtggagaggcttcagccctgcctcccaccccttccccagtgcatccacagggacctggctgcccgcaatgtgctggtgaccgaggacaacgtgatgaagatcgcagacttcgggctggcccgggacgtgcacaacctcgactactacaagaagacaaccaacgtgagcccggccctggggtgcgggggtgggggtcatgccagtaggacgcctggcgccaacaccgccttcccacaccctcccagggccggctgcccgtgaagtggatggcgcctgaggccttgtttgaccgagtctacactcaccagagtgacgtgtacgtgtcctgcagagctcaggcttcaggggtggaggcgggaactgggcagagccaggaccccagctgcagtccccaggcctgtgccctggagctcctgggtgtggtttctacccctccctgggggcagcagcgcagccctggcctattcccctggtgcccgcccaggtgtctgtcctgggagtctcaggacagcctgacctcaccttcccctgcagctggtcctttggggtcctgctctgggagatcttcacgctggggggctccccgtaccccggcatccctgtggaggagctcttcaagctgctgaaggagggccaccgcatggacaagcccgccaactgcacacacgacctgtgagtggcatccctggccctccactgggtcctcaggggtgggggtccctccggggctgggcgggggagggactggcagcccttcaggctgttcccgaataaggcgggaagcggcggggctcactcctgagcgccctgcccgcaggtacatgatcatgcgggagtgctggcatgccgcgccctcccagaggcccaccttcaagcagctggtggaggacctggaccgtgtccttaccgtgacgtccaccgacgtgagtgctggctctggcctggtgccacccgcctatgcccctccccctgccgtccccggccatcctgccccccagagtgctgaggtgtggggcgggccttctggggcacagcctgggcacagaggtggctgtgcgaagaggggctcggtggcacagcgctcaccccgcctcccgccagcaggagtacctggacctgtcggcgcctttcgagcagtactccccgggtggccaggacacccccagctccagctcctcaggggacgactccgtgtttgcccacgacctgctgcccccggccccacccagcagtgggggctcgcggacgtgaagggccactggtccccaacaatgtgaggggtccctagcagcccaccctgctgctggtgcacagccactccccggcatgagactcagtgcagatggagagacagctacacagagctttggtctgtgtgtgtgtgtgtgcgtgtgtgtgtgtgtgtgcacatccgcgtgtgcctgtgtgcgtgcgcatcttgcctccaggtgcagaggtaccctgggtgtccccgctgctgtgcaacggtctcctgactggtgctgcagcaccgaggggcctttgttctggggggacccagtgcagaatgtaagtgggcccacccggtgggacccccgtggggcagggagctgggcccgacatggctccggcctctgcctttgcaccacgggacatcacagggtgggcctcggcccctcccacacccaaagctgagcctgcagggaagccccacatgtccagcaccttgtgcctggggtgttagtggcaccgcctccccacctccaggctttcccacttcccaccctgcccctcagagactgaaattacgggtacctgaagatgggagcctttaccttttatgcaaaaggtttattccggaaactagtgtacatttctataaatagatgctgtgtatatggtatatatacatatatatatataacatatatggaagaggaaaaggctggtacaacggaggcctgcgaccctgggggcacaggaggcaggcatggccctgggcggggcgtgggggggcgtggagggaggccccagggggtctcacccatgcaagcagaggaccagggctttttctggcaccgcagttttgttttaaaactggacctgtatatttgtaaagctatttatgggcccctggcactcttgttcccacaccccaacacttccagcatttagctggccacatggcggagagttttaatttttaacttattgacaaccgagaaggtttatcccgccgatagagggacggccaagaatgtacgtccagcctgccccggagctggaggatcccctccaagcctaaaaggttgttaatagttggaggtgattccagtgaagatattttatttcctttgtcctttttcaggagaattagatttctataggatttttctttaggagatttattttttggacttcaaagcaagctggtattttcatacaaattcttctaattgctgtgtgtcccaggcagggagacggtttccagggaggggccggccctgtgtgcaggttccgatgttattagatgttacaagtttatatatatctatatatataatttattgagtttttacaagatgtatttgttgtagacttaacacttcttacgcaatgcttctagagttttatagcctggactgctacctttcaaagcttggagggaagccgtgaattcagttggttcgttctgtactgttactgggccctgagtctgggcagctgtcccttgcttgcctgcagggccatggctcagggtggtctcttcttggggcccagtgcatggtggccagaggtgtcacccaaaccggcaggtgcgattttgttaacccagcgacgaactttccgaaaaataaagacacctggttgctaacctggccctgtgctttctgtctccagttctgggataggggagggaggggtcactttgccaggtggtcccagttgcgcgggatggatgctggcagcagcaccgaaagtcactggtgggctgggagccccaagagcaaggaatgtttatgggaggggcctggcggaagggagcagggtgcctgggggtgcactgccctggctgctcccagcttgtgggttcctgaggtggtggtggtggtggggagggtcctttctcactagctctgaggcagaccttctctcatcaccccactcctggcatccgccttcccagtcagctggggagctttctgggcatccctctatggagccaaaagcaagcaaagccctcatggggccctgggggctacacaggcggtcactctcctccagatcagctctctgccctcccaggccgggcaaccagtgcccccactgccttgggctccatcagggtcccctacagtgataaagcacctttgggcagatgaggtgctgagaacccagagatggaaccaggcccttgcccaagttcatagccctagcagggtgggaggacaacatggtgagagcaagtctgggaaggcttcctggaggaggtgtgccgtctctcctgactccccaccaccctctttgctgtcctcccttctgctatcctccctctcttgtcctcccgtttttcccatctctgctgtccccacctctgtcgtcctccttctgctctcctccccccatcccctctgctctccctacctctgctgtcccctctgccgtcctccctctgctctcctcccctctgctggctcaagagcagggtttcccaaccatgagctgcatgaactctagcttctaaaatgctctggctacaaactcacctttcaggtcagggggtactgctggcccgtttcctgggcaggcaagggtttaactcaaccccattcagggaagcacgtgtgggcgcaggcctggtggaagtggccttacaagggactctgcatccctaatgcccccacttgcccagaaaccctatgctgggccccagaggcaggcctggccatgggacgcctggtgacagtggcaggatggggaggcccacatgggcctgaaggctgaggcctgcagggcagtggggggaccaggccaacaggcaggcagtgccagcatccacaccaaggcaggcagagcatggggctcgaagcgcgggccgggagcgccccctagcgctggctgggcagtgtccctgctacaaacccaaggcccctctcctgtcagggctctggtggacctctggtgggcacagtgggatcctgaatgggtgctggggaccaaagggctgggccaccgggagaacagtggcccatgaaggtgctggtgggccagccccctcctcctcagcgtgcttccttagcgaccccagatggcagggcacagtccctgaagctgccccaccaggggctccctggctgcctccccgtcccataaggtgagcccatgagagaccccagctgtcagcacaactgaacctccgccatcagggtgccctctagtggttgggtgtgctctaggctggcagggtccccgcccttgctgtctgctgatggctgagggggacatgtctcatgggaggcccagcttccaggacacaactggtggctcctggggtcaccaagggcacctggtttgttcacagctctttgggctgctgtccccatgagggagcacctcccaccccagctgtgggtccatcatttcctctgattaattagggcctaggggtcaagggaggccccgagggaggactctcagtgtgaacaaaccagcagccagggccgcagagaagcctgtgaggtgcccacagggcctggtcccagtgtgggcagagcacctaagggatggcttctgtccactgagaagggtcgggagccaagacaccacactgctatcctggcgctggaaccatccacgcactcctgcagccaggccacgctgaggcaggtaggcacccagaggtccgggctgggggctgctctccatggccccaggccatcacacatccctcagggcgtctgggccctgcctgtgggctggactgcaggctgaaggccctgcctcatccaggactccctagggcagtactcggtgctctttcccctcagcggcctgaggagtctttcagaagagctggccctcctgggtgacacctcggcgagggtcccagcccctaaccccaggactcccaagaagtcactgaggtccccagagcagggagagcatgaccaggtggcagggccactggcctggagaacgtcccacactgttccatgagcagctcacgctgtcacaggacctggggacgtgggtctcctgaccctgcaggcccatcctgcagagcaggaagcgtgaagccaagggctgaacccatggagggcagcccagcactcaaacccccagggatggtgaggctccttctggaactggcctcacagccacacgcgccccaaggcccagcccctgcagccacgtggacagctctgccggcttccactcgctcctgtgtgcccaacggttcagaaatattattactctgcactgttacaggaacacagatttgatgttttaataaaaatacgatttctacaaaaggtgcttaacacggcccaggacgggctgtccggtggagtcagccgtaggacccctgaaggatttacaaagacagagccggctcaccagcacactcctgccagcaccgggacccactgcgaacaaagacagagccggctccccagcacgctcctgctagccctgggacccactgtgagccactgcggggtgtccttcatttaaaaaaagtctggactgtgacactgcagaaggagtctgaaagcccaattcctgaatccctgcgttagaactgagagttcaggccgggcgcggtggctcatgcctgtaatcccagcactttgggaggctgaggcgggtggatcacctgaggtcaggagttgaagaccagcctgaccaacatgatgaaaccccatctctaataaaaacttgcccgtaatcccagcactttgggaggccgaggtgagtagatcacgaagtcaggagatcgagaccatcctggctaacacggtaaaacactgtctctaataaaaatacaaaaaaattagccaggtgtggtggcgggtgcttgtagtcctggctactcgggaggctgaggcaggagaatggcgtgaacccaggaagcggagctggcagtgagccgagatcacgccattgcactccagcctgggagacagagcaagactctgtctcaaaaaaaaaaaaaaaaaattagctgggcatggtggcgcatgcctgtaatcccaattactcaggaggctgaggcagaagaatcgcttgaacccgggaggtggagcttgcagtgagccgagatcgcaccactgcactccagcctgggtgacagagcgagactctgtatcaaaaaaaaaaaaaaaaaaaaaaaaagtgagtgcttagctggagtgaggaggaaacactgaattcctaaatcaggaattcgtttcattttcaccaggcgcagatatcctagctcctgaaaaaggccaagaccgagggtctggccctgggcaggtgtaagaaaggactgttttaagaagcttattacacaaagctcatatttctggatccaccactgcttacatttgcacccagacaccacttttaggtgcaagaagaaaggtcaggacatagagaaaaatgcacacagaacgatgagggagaatgacgagggagaatgacgagggagcaagcctgcatcagagcacggctgatgtcacggaagccaccaaaggcacccaccagagccttccccacctgcaaagcccctgcagcacccggagggcaagctggcttttggaggccatgcggagtccagggcagaggggacagtgggatgggctgcctgttgcagtggctgttcacgtcaacagtgctcagccaaggcagtgaggacgaggatgagagccggggcagctgactgggcccgcgatgccgctcacaggagaggcgtctgcacacacctggcaactgcaagacttgttctcaagggtaagtacacttggacaaacgaacaccaggctacttacacagggtgagagaattcataaatattagttaaggatctaaaacaaacttctcaaataactgaaagctgaaagcctctggaagccaactgtccctgcacaaaggtttacaattgagaaatatctcctgttcctattttgtcaagtttctttaatggctgaacagaaagaagcttcaagtaatggagaaggcattgtctgagtgcagctgctttcctggacgcctgtgccgttcctgtcttccaaatcctatgcttggaggcccctggaggtacatttttgccaggaaccaacctgaccttaaaaagatgagtgtgacacagccggctgggcaggaggatggaggtgccacaggacaccacctgcccacgccctggccagcctggccatgctgccgagtgcggggaggccaccccacccagagggcacagggcaaaccctaagcacgggggtattgcccttgaagccccaggggatgccctgtgccggatcctcatgcctcattgactagcctgcttgctgaaggagcccaggggcctgagcctgcaacactgcaaggggtgagaagggcatgctgctgtgggcgcactggactcaaacctcacattagaagctacaaagaaccccaaatgcgcttcagagccccaccaacccccaagccaggctcatccctgacacagtgaatccactgcagcccccgtgggaaactctgtgccaattgactgcttaaagaactgggggaaatagaaagccgagaaagagctccgatacacaagggaaaccgcacgtgagaaccagcactcccagcagggagacgtcactctccagaggccacagagatggcagacacctctgtctccacaatgacccacatccaactgaaagtgtgcaggaagacaggtctattgacactgaaatctagaaatcaaggtccacaggcgaatggaggcatcttcagccctgaggaggccaggctgtgtctcctgacgcccctgagggtgggcacagcagccagctctgtgtgggcggagtccacgtggtcctcattctcttccctggggacagggcagcacagtcagatgctgagactgaggccacacacatgggggcgccttcctgccttggcccggcccagctgcctctggagccaggaggccgtggcagccacaccacagtgtggatccagacacgattctgtggaggggttccgggattccagacagactgaatctccatggaatgatgaaaattaaaatttacttgattatggaagtctctgatttattccagccaaaatattagatgagccactgagaatcaccacaaagcaatcgccctcacggcccttgccagggtgacggcacagcaggaggacaggtgcccaggccagtggttctagctcttcacctctgcgacctccttctctgccttctctttggccttctccttctcctccaccttctcctctttttccagtgttgctacaatctcagccacctggctggtggagatgtgaacatcttctttgtccaccagctcaatcacctacacacgtgggaaagggagaggctcaggtggctgcgccctacagcacagtgaggcagaggcggggccagcgccgtcagtcgccccagctggggtggcagcagcatgcacgcaatcactgcctgcgggccccagggtcctcagagcaccaattcccccaaggggtgccacagaccctggggaaggggctcagagtgggaggacaaaggagccagggggctgccttgacaggtggcagacagcacaatggggctgccagggtcaagttcctgctctggccaggaacctgggccatggcttcccagggcagagtggggtgacatgcagggaccttgtccccactctgccacccagactagcagggaagggaagggcagctgtgcagtagacacatgatccttgcttccaaactgaactgcaagaaaccagccaacacttctgttagacgtctggaaaatcactaacctgatgcatgcaccgggagccacgaggcagcttcccctcagagatgtcagtgattgggaaaattggtgtgcgcactcaggctagagccctgccttccctccagagactggatcctgggccagggtctccggggctaccctggaacctgagtggctgcacttgggagctcagcccagcagtcacctctcagccttggggcggtgcccaagctgccccgcggctcccctgtgtagttgcctctcagctttgggggcccccggcaggtgtgaagtgcccccaggctccctgtgcagtcgcccctcagcgtcgggggcccctgagaggtgtttgctgcacccccccggctccccagtgccaccagctgggggcggggtccagggacatgcgtagccactaggtgcgttttctctctcaacacttgagttgtaacttcaataatttctcacttctgatgtttcaaatgagagcagcggcttaaaggagcagtcgcagtgacagacccaaacccctgacaggagggggtagctgcccaggagggtgccggacatgcaatgaacagtccccctgccccaccccactccagagcaggtggcggatggcctgcgtggtccccagcgaggcccaccttgacgaggtcgtcgatgttgaccttgccatccttgttttcatccagtgctgcggccaggctggtgagcttgctttcgggaatgtgcttgacttgcttcatggcgttgatgagctcagcgacactgatgacgttctccctgtggaagcacagcctgcatgtggccacgggcaggcgtcctgccacacagggcctcactgcccacacctgtggctgcaagtggtcagcactgacacaggcggctccgcgtgagccaggcaacctccagcacggacccccaaggtatgatcccatcctgcatacaatgccaagagctcccagggccagcgtggacacaaacacagaaacaccaccaggtccagggtttccacgggcatgtctgcccctcagtggctgcccctctggggccatggctgctgggctgttgtcctcaggcctgtggccacttggcaatacgttcacgatcatgggggctgtggtgccctgggcagatgagggcctccaagagcagggacgagagcatgagcagggtgccacgtgcagcccacctacaacactgtgggtgtggaggtggagatttgaacctgcagggcaccagcagtcacccaacagctgtttcattcgcccagaagggactcacaaaacggcagctccctcagccactgctgcgcaggaatctgggacatgtcgggcacagagaaggccgactgcccgagctggtgtcattactgagcgtgggtggggtcaggaagagggagaggcaagagagagcctggtaattagaggaaacagaagccaacagaggtggaggttggagcgggaggagagggggctgtgggaagaggaagaggggccaggaagggacgaactgctctcggagaggcagagactgacatgccagagggttcctggctgggactgctggtcaaaggtggagaggcagccaggcagaggctacaatgtgccctttggagccagaagggcccagctcggatccagcaaagggaccagcctccctatgtgagtctccgatccctctcccgcgcccaccaccccactcaccccgtgggcatgccgttggccggggccagcttgccagcctgctggtccatctccagctgcgagatcaagccatcgatctgcccgatcatttgctgcaccctttttgtcaatctcttgctggctttagattcttccacgtatttttcttcaccagtctttgaaagttccttcttgatctcctgcaagtcctaataaaattattttggttgtaaaaagtttgtcttaaaagaaaaagggggtcaggtgtagtggctcacgcctgtaatcccagtactttgcaaggccaaggcgggcggatcacctgaggttaggagttcgagaccagcctggccaatgtggtgaaaccccgcctctactaaaaatacaaaaattagctgggcatgatggcaggcacctgtaatccagttacttgggaggctgaggcaggagaatcgcttgaacccaggaggcagaggctgcagtgagccaagaccatgccaacgcactccagcctgggcaacagagcgagactctgtctccaaaaaaaaaaaaaaaaaaaaaagaatctggttgggcacagtgactcatgcctgtaatcccagaactttgggaggccaaggca

SEQ ID NO: 113 - DNA, 4093 bp, Homo sapiens
cgcgcgctgcctgaggacgccgcggcccccgcccccgccatgggcgcccctgcctgcgccctcgcgctctgcgtggccgtggccatcgtggccggcgcctcctcggagtccttggggacggagcagcgcgtcgtggggcgagcggcagaagtcccgggcccagagcccggccagcaggagcagttggtcttcggcagcggggatgctgtggagctgagctgtcccccgcccgggggtggtcccatggggcccactgtctgggtcaaggatggcacagggctggtgccctcggagcgtgtcctggtggggccccagcggctgcaggtgctgaatgcctcccacgaggactccggggcctacagctgccggcagcggctcacgcagcgcgtactgtgccacttcagtgtgcgggtgacagacgctccatcctcgggagatgacgaagacggggaggacgaggctgaggacacaggtgtggacacaggggccccttactggacacggcccgagcggatggacaagaagctgctggccgtgccggccgccaacaccgtccgcttccgctgcccagccgctggcaaccccactccctccatctcctggctgaagaacggcagggagttccgcggcgagcaccgcattggaggcatcaagctgcggcatcagcagtggagcctggtcatggaaagcgtggtgccctcggaccgcggcaactacacctgcgtcgtggagaacaagtttggcagcatccggcagacgtacacgctggacgtgctggagcgctccccgcaccggcccatcctgcaggcggggctgccggccaaccagacggcggtgctgggcagcgacgtggagttccactgcaaggtgtacagtgacgcacagccccacatccagtggctcaagcacgtggaggtgaacggcagcaaggtgggcccggacggcacaccctacgttaccgtgctcaagacggcgggcgctaacaccaccgacaaggagctagaggttctctccttgcacaacgtcacctttgaggacgccggggagtacacctgcctggcgggcaattctattgggttttctcatcactctgcgtggctggtggtgctgccagccgaggaggagctggtggaggctgacgaggcgggcagtgtgtatgcaggcatcctcagctacggggtgggcttcttcctgttcatcctggtggtggcggctgtgacgctctgccgcctgcgcagcccccccaagaaaggcctgggctcccccaccgtgcacaagatctcccgcttcccgctcaagcgacaggtgtccctggagtccaacgcgtccatgagctccaacacaccactggtgcgcatcgcaaggctgtcctcaggggagggccccacgctggccaatgtctccgagctcgagctgcctgccgaccccaaatgggagctgtctcgggcccggctgaccctgggcaagccccttggggagggctgcttcggccaggtggtcatggcggaggccatcggcattgacaaggaccgggccgccaagcctgtcaccgtagccgtgaagatgctgaaagacgatgccactgacaaggacctgtcggacctggtgtctgagatggagatgatgaagatgatcgggaaacacaaaaacatcatcaacctgctgggcgcctgcacgcagggcgggcccctgtacgtgctggtggagtacgcggccaagggtaacctgcgggagtttctgcgggcgcggcggcccccgggcctggactactccttcgacacctgcaagccgcccgaggagcagctcaccttcaaggacctggtgtcctgtgcctaccaggtggcccggggcatggagtacttggcctcccagaagtgcatccacagggacctggctgcccgcaatgtgctggtgaccgaggacaacgtgatgaagatcgcagacttcgggctggcccgggacgtgcacaacctcgactactacaagaagacaaccaacggccggctgcccgtgaagtggatggcgcctgaggccttgtttgaccgagtctacactcaccagagtgacgtctggtcctttggggtcctgctctgggagatcttcacgctggggggctccccgtaccccggcatccctgtggaggagctcttcaagctgctgaaggagggccaccgcatggacaagcccgccaactgcacacacgacctgtacatgatcatgcgggagtgctggcatgccgcgccctcccagaggcccaccttcaagcagctggtggaggacctggaccgtgtccttaccgtgacgtccaccgacgagtacctggacctgtcggcgcctttcgagcagtactccccgggtggccaggacacccccagctccagctcctcaggggacgactccgtgtttgcccacgacctgctgcccccggccccacccagcagtgggggctcgcggacgtgaagggccactggtccccaacaatgtgaggggtccctagcagccctccctgctgctggtgcacagccactccccggcatgagactcagtgcagatggagagacagctacacagagctttggtctgtgtgtgtgtgtgtgcgtgtgtgtgtgtgtgtgcacatccgcgtgtgcctgtgtgcgtgcgcatcttgcctccaggtgcagaggtaccctgggtgtccccgctgctgtgcaacggtctcctgactggtgctgcagcaccgaggggcctttgttctggggggacccagtgcagaatgtaagtgggcccacccggtgggaccccgtggggcagggagctgggcccgacatggctcggcctctgcctttgcaccacgggacatcacagggtgcgctcggcccctcccacacccaaagctgagcctgcagggaagccccacatgtccagcaccttgtgcctggggtgttagtggcaccgcctccccacctccaggctttcccacttcccaccctgcccctcagagactgaaattacgggtacctgaagatgggagcctttaccttttatgcaaaaggtttattccggaaactagtgtacatttctataaatagatgctgtgtatatggtatatatacatatatatatataacatatatggaagaggaaaaggctggtacaacggaggcctgcgaccctgggggcacaggaggcaggcatggccctgggcggggcgtgggggggcgtggagggaggccccaggggtctcacccatgcaagcagaggaccagggctttttctggcaccgcagttttgttttaaaactggacctgtatatttgtaaagctatttatgggcccctggcactcttgttcccacaccccaacacttccagcatttagctggccacatggcggagagttttaatttttaacttattgacaaccgagaaggtttatcccgccgatagagggacggccaagaatgtacgtccagcctgccccggagctggaggatcccctccaagcctaaaaggttgttaatagttggaggtgattccagtgaagatattttatttgctttgtcctttttcaggagaattagatttctataggatttttctttaggagatttattttttggacttcaaagcaagctggtattttcatacaaattcttctaattgctgtgtgtcccaggcagggagacggtttccagggaggggccggccctgtgtgcaggttccgatgttattagatgttacaagtttatatatatctatatatataatttattgagtttttacaagatgtatttgttgtagacttaacacttcttacgcaatgcttctagagttttatagcctggactgctacctttcaaagcttggagggaagccgtgaattcagttggttcgttctgtactgttactgggccctgagtctgggcagctgtcccttgcttgcctgcagggccatggctcagggtggtctcttcttggggcccagtgcatggtggccagaggtgtcacccaaaccggcaggtgcgattttgttaacccagcgacgaactttccgaaaaataaagacacctggttgctaacctgaaaaaaaaaaaaaaaaaaaaaaaaaaaaaa

SEQ ID NO: 114 - DNA, 2421 bp, Homo sapiens
atgggcgcccctgcctgcgccctcgcgctctgcgtggccgtggccatcgtggccggcgcctcctcggagtccttggggacggagcagcgcgtcgtggggcgagcggcagaagtcccgggcccagagcccggccagcaggagcagttggtcttcggcagcggggatgctgtggagctgagctgtcccccgcccgggggtggtcccatggggcccactgtctgggtcaaggatggcacagggctggtgccctcggagcgtgtcctggtggggccccagcggctgcaggtgctgaatgcctcccacgaggactccggggcctacagctgccggcagcggctcacgcagcgcgtactgtgccacttcagtgtgcgggtgacagacgctccatcctcgggagatgacgaagacggggaggacgaggctgaggacacaggtgtggacacaggggccccttactggacacggcccgagcggatggacaagaagctgctggccgtgccggccgccaacaccgtccgcttccgctgcccagccgctggcaaccccactccctccatctcctggctgaagaacggcagggagttccgcggcgagcaccgcattggaggcatcaagctgcggcatcagcagtggagcctggtcatggaaagcgtggtgccctcggaccgcggcaactacacctgcgtcgtggagaacaagtttggcagcatccggcagacgtacacgctggacgtgctggagcgctccccgcaccggcccatcctgcaggcggggctgccggccaaccagacggcggtgctgggcagcgacgtggagttccactgcaaggtgtacagtgacgcacagccccacatccagtggctcaagcacgtggaggtgaacggcagcaaggtgggcccggacggcacaccctacgttaccgtgctcaagacggcgggcgctaacaccaccgacaaggagctagaggttctctccttgcacaacgtcacctttgaggacgccggggagtacacctgcctggcgggcaattctattgggttttctcatcactctgcgtggctggtggtgctgccagccgaggaggagctggtggaggctgacgaggcgggcagtgtgtatgcaggcatcctcagctacggggtgggcttcttcctgttcatcctggtggtggcggctgtgacgctctgccgcctgcgcagcccccccaagaaaggcctgggctcccccaccgtgcacaagatctcccgcttcccgctcaagcgacaggtgtccctggagtccaacgcgtccatgagctccaacacaccactggtgcgcatcgcaaggctgtcctcaggggagggccccacgctggccaatgtctccgagctcgagctgcctgccgaccccaaatgggagctgtctcgggcccggctgaccctgggcaagccccttggggagggctgcttcggccaggtggtcatggcggaggccatcggcattgacaaggaccgggccgccaagcctgtcaccgtagccgtgaagatgctgaaagacgatgccactgacaaggacctgtcggacctggtgtctgagatggagatgatgaagatgatcgggaaacacaaaaacatcatcaacctgctgggcgcctgcacgcagggcgggcccctgtacgtgctggtggagtacgcggccaagggtaacctgcgggagtttctgcgggcgcggcggcccccgggcctggactactccttcgacacctgcaagccgcccgaggagcagctcaccttcaaggacctggtgtcctgtgcctaccaggtggcccggggcatggagtacttggcctcccagaagtgcatccacagggacctggctgcccgcaatgtgctggtgaccgaggacaacgtgatgaagatcgcagacttcgggctggcccgggacgtgcacaacctcgactactacaagaagacaaccaacggccggctgcccgtgaagtggatggcgcctgaggccttgtttgaccgagtctacactcaccagagtgacgtctggtcctttggggtcctgctctgggagatcttcacgctggggggctccccgtaccccggcatccctgtggaggagctcttcaagctgctgaaggagggccaccgcatggacaagcccgccaactgcacacacgacctgtacatgatcatgcgggagtgctggcatgccgcgccctcccagaggcccaccttcaagcagctggtggaggacctggaccgtgtccttaccgtgacgtccaccgacgagtacctggacctgtcggcgcctttcgagcagtactccccgggtggccaggacacccccagctccagctcctcaggggacgactccgtgtttgcccacgacctgctgcccccggccccacccagcagtgggggctcgcggacgtga

SEQ ID NO: 115 - DNA, 22478 bp, Mus musculus
tgagaggtagcagcaaccttgttgttttaggactccgagcttgggaccctttggctcagctttggaacgtacaggtgtgtgcatgaaaggtccagagttcctgtgattcaaagcacttatatccagatgtggaggaggcccatcccagcagcagtgggaaagagtctgctggtcttagaggtgggaacttgacccagtgaacctaagagcttcctggatcctgttgagctttgaaccccacaattaggaggggcccctaatctgcagagagtactctgggagagttctcgggctagcaggttgacttacagactcagagagatctcagtgacacactgacaggggtagaggaagtggcttcgtcttgctccccacctccacaacacacacacacacacacacacacacacacacactttggtgtcttttacttctgttatcaaagctaccactctttgtcctggaatctcatggcttgtctgtgagcccccatggctactggatgccccttctttccaagaaagagcaccttgaaagggcagccagatccagccactgccaacccttgtatgcgtttttcttctctgctggacatcgctggctgcagaccaaacttgagcagagttgagcacaaacttttctcctgacaggactccgggatttgtttttaacagtcctcggctgctaaaaagaaagcataccaacccaactgccttctttgggacctgcagagagaactggtgttgatgccttctagcccctagccccacagtacccttcagtggatcaatctttggtctccccacttcccaggtgcagtgctctttcttttccttggactggggtctgagttagctccttttcaggggcaaacaaaccccttgccctggtccttccaggttgggcagcacccacagacaaggacagggtcagtccttgggctcagcttgatagaggtagggaagatagttctggaagctctaggaacattcagctaagagaactaggttgtgtgctgatgtggtcctgcaccccgagagaagtttctggtgccctgcaaaactcttctgtctcccaactctgctgctaattctgcgtagtttcctctacaatgtggagacactgaagctgaaatcctgtagaccatctagttcactcagcacttttctgggtaggtcaagacttggtggtagcttggagttttacttccccaaggatactgctactctcaaggaaactgtggtaatgtgccttagtaatctctctctctctctctctctcctcctccctccctctctctctcctctaccccaccatacctaagctagggctttgccagccaagcaggcatcaagacgtcaccacaaagatgtcctaagctgtcagataccaggttggcagccccatttttttccttgggcttacttgctctgcatatgacctttgcacggtcccttctgccactcaaaaggctcatcctccccacgggcctcatgtcctctgcccacttccctcctgcctcccatctcaccctgcactgcttccctccttccaagaataatgtcctcggcttactcccaagaggaagttaagaattatctctgatttcttatttccaagcttgtgggcattcccttcattaaacagtagaagtaggggatcaggaggcaaaatgactcttcagctctttttcccttcccagtatttactgcaaaggggaagacagtgactgtgagggaacatgttccacaaaggggggaaaaatcccttggcgcctagaatcgtccaaagtggccctaattacaattctggtccaaattcatttaccagaatacagaataaattctgtatttatttacagatttcacctcctacccgtcttcatatttagaaagatcaagaagggttttaatgtgtaaaagatggttttttttcccataatgcccccatcatcgcccacacacccgtttactctgctttgagtctataaagttatgctgccacggggggggggcggggggggaagagttaaaggagtgttctgacccactgttcaaagactgggtagggaactgaactcggtccctacacaccgccttcatctttccctgaccggtgtcaggtccgtcccccacctccaccccccactaggccgtcttcatgctaagtgtctaattaggacacctcaacccacccacccatcgacaaagcagctaaccaggttttgggaccacaccaggattagaaacttccaccttagaaggggcgatgaacaggggtcataggcagctcttacagtggctccgcccttcaccgtttgtctccggagtaactgagcgttgtaaggtaaaaccttgaaaaatcctgaaccttgcttctaaacttctctttctggtcctaagaacccgacagaacccgacatcctctataaaatcagcctttctagccctaagcctggttccagaatctcacggatgagtcgaagaaaaaattaatttgcctgtttggtgtgttgttccagataagccattaatatgcaaatcagggagttgggctcacggagtgaatggaagcagtgcgggtaggcacgcaggacagccccagatgtttgcataattacttctgccccaacttcgggagtgcaaaatgtcaagggaggagtctgtgagcgtaaattcagtgttatcccctggatctgagcgtgtggaggaaccaggcttcctttgcttagagaagaagcgaggcatcggggcgtctctgcctatggcctcttgtcaagtgggatcttgtgggtctttctcggaggaacgaatcactgggagcggtcgggaaaggtgcggacgaagccatcgctggccccacgagtcctggcagccccggaacttgcttctgggcatgttccaagcagtagagcgcagacctcgacgcccgccagtgcccccttcttttaggacaatgcttggggccgaccaagggaaaccctgttcccaggtgcaggcaaggacgctaactagagtttcggatgctgaggttttgtgaagccctctgggggatcattggatttttttttttttcctgtggactccggcactgctgtctcgggggttgccgccagcagtgtacacccggagttgctgctccatgcgtcctcgggaaaaccgaacctgtgcttctccgagtgacgtgttccagcacctcggggttttctaaaacaggaaaccggactagggctgtctgcgcaaaccacttctggaggcagtgacacttgcctggaattaactggatggaggtctccgacgtctgggaagcggggcgtgtgtgtgtgtgtgtgtgtgtgtgtgtgtgtgtgtgtgtgtgtctgtgtgtctgtgtgtggtggtggtggtggtggtggtggagcccagggggcgggggtaagagaagtcacttcaattccttccgcttgggggcgggataggaagagagaaaacctgaagctgcagaccgccgcatccatctctgaagcttctgggactacacacagctcgtgtggggactgagagtggatgggggtggtatttgaactgcaccgtccagcgtagttagcgaccgaagtgtcaccctggccgaactccagctttagtaggttctgagggctaggagtcttgactgagctcaagctctgacggcgcccgccacccctttccaggcttccaactctgtttttcccatgggatggtagtgctttcctaccttccgaaggggcacagtcaccgggcataaagggcgcgcactggtcgtgacgcataccaggactttgcaactttacatttggggtgcctagagcaataggctgcggccaaagggttgtgcagtcccggacagcctaagagaccttatcttatcgcaggcagagaaagcggcttcgaatacatccctgatcttagatgggactcctaagcactatatttctactaggccacccatttatcacgaactgttttgtcacctcgcctcactgccccaccccctcctcgcttcacggttctgccctggacttggccctgcagtgccgcgtctaagcgtccttcctagcacgtgggtggtggtgcagccatttcactctcgggctcacagcccagccgcctccccttctaggccaagagagcctccgacgtcccagggacggctttcgcaaccacaccagccagccaggctgctttcccgggaaaaggctggggaagaggggagagggtccgccccacgtcgcgcatgcgtgctggtttagccgctgtgcgcgtgctccagccaccaggcactgggcgcgcgctgggcaggcactcgaggagagaagtttctctgggctagccaccagcccgggcgaatctaaaccacgtccaagaggtgcgcagacagatttccaggaaaggtgggtgcccctcattagcatctagctgctacactggccttagaaaagcagtaacagccacagttgtaacataaacatttctcattgtatttccctgctctcttcagtgtaatcctgcctttacattgcttgtaacccgtcccgtggactctgttcagcaagcatgctaatattccttttaaaaccttagtgaaaaccatgatgtattggcgcaggcctttaatctcagcacttgggagacagaagcaggaggatctctatgagttcgaggacagcctagtacatacatacaatgaggactataaaaggagacctcatctcaagaaacaaaactttagtgagagtctataaacagtgacacacacctgtaatccctgtatttgggaagctgaggcaggaggaccacaattttgattacagactgaacagtagcagagccctgtctccagaggtaactaactgttagaagttcaaacagatcaaataacttgcccatacaggcatacagctagcgagtgggctagtctcggagcccacaatagttgtaactatgaagatttccacccacatccagcttccaactccaaatggcttcctagaacctttcaactttcttgctgagggctctgtgaaggggtttgtgctaccagcctaggacccaaccccaagtcctttcttaccctcaattcttccttataagaccaaaggaaaactgaaatgtacccagagtttttaagcccctgctgtgaaaggcctgggaaccctgacttgggagttctcaggcagagcctttgctgtctgctttgcttgtccccagttttacctacagctagggactggatagttgaccttgcctggctgtccagagcaactgttgtacagatgagcttaatccggtgctttcttccatggaagtgtgtgtgtgtgtgtgtgtgtgtgtgtgtgcgtgtgtgtgtgtgtgtgtgtgtgtgtgtgtgtgtgtgtgcactcgtgtgctaagaggagatatcaaatgctatgtggcttctggtgtgtggaggtcccggtctacaggtggtcagcccttcttgtctgttactgcccattctttgtccctaggaaggagtgagaggaggccgtagaacggaaaagctgggaatgttctgagaacaactagatactacagtcagcctgcacaggccagaccttcggacttctgtccagagtattgcgtcgccgctaccactttccagcggcaggcggcaatccactcagcggactttcagtcctgctgtggagtcgcgaggcaggagtggatggtgcaggcagatccagctccaagacggcaggagattagccacgggccacaggccctgcagaggccatggtacacatggccacgcctcagaaccgctcacttaacagctccaaatcagcccgcgtgcgtggccaagattgggcaggtccgacgcccgccaagccgcgcagttgaaacgtacccaaagaactagccgaggcctggcctcagcctcaagctggaggacgcgctggggcttgctggtctggccggatatccaggatccaagcacccagctaggcgcgctcatcttccctggactgcgccagtctcaggctcctcctctcccaagaggttgagtccatgggcagcggacctatccaggcctaagtggcctcagactcaggcatgccgtgaaagtcgggctcccggacagtctaggcaccttcggctgtctggggcagaaggagggcaggcaggcgccctgctctaagtaagagctcttgtcagataagagcagtggggagccccatgccctggtcacctaaaccggccaggaatcggcccggggtgtggggaaaggtggggggttgcggtagcaggtgtcccccaggcaagagggtgcctgcatttccgtaaacaaagaaaccgggtagtttgtgtgtgtgggggggggggcggggggtgtttaggagaatcgcagacaatctccttcataaaaatgtgatctaagagcatttgatttccactttcactccccccacccacccgtgtacccctccccgcccctacacactcactgtctccaaagacactcaaattgcagccatatgggctaaagtaataggaagcagttaccttatttactgcagaggcggcgcaagcaaacctggcagcgtggctgctagaagtgggatgaacaaacagcctggggtcttgttcttggaaacttttgttttgtttagttttgggaggtgcacaagggaacagccgattatataacttcaaagtgggggaggtcttgtgtggaagaggtgtggagaactgagctggtgggcaggggaggtttcaaaaataaaggtgggctgtgggcaagcctcctttcattggtttcaaggactgagagctgaacagcccaaatccgctccagacttggttggaatgagggcagttgctagtgccccctcctggaacacacaggcatcttcccattctgacctaaccggaccccagctctgggcctgtgggactgcaaacccattcctcagatgtccactcccctctcaatgtgtctaacctgtccaggggagagaccactgggaggtctgagttaacacctctgcaacactgttctagtttctgtaagcttggtagcactttgggtatgtgcaaaggtaacatcccacctcctcccagccgatctactgaaggactaaactcttctgagacaggaaccaagttctggacctctgaacgttctgaatctcctgaatccagcttcaactttgcaatgggctccacgggaactcccggcctttgaaactcagagagcccccaagcactgatcttgtcttgagctagctattagagaagaattaccatcaggcacaaaggcaggaaaatacagctagaaagcagagactaccactaactaacggttccttcagaagtactaagcgcggggactgcctctctttacgtaaaacttctccagttaattgggcaaagaagtaaaatttaggaactgaacagaagaagagaaaaggaaggaaggaaagaaggaagggaggaaggaaggaaggaaggaagggaggaaggaaggaagggaggaaagaaaggacgatggtggggcaggagtggaagagagctggattttttcggtgaaattgaaaccagcagttgatgaccctcgtccaaaaccccctggtccatgaagacacacaacttagggacagagttctcctcaaaacccaagctgaagggaaaccaccatcttttacttgatcggcaaacttcccagggataagaaagagaggaagagctgatgcccaccaccaccaccaccagcagccactccacgcagttccctgccactggcttcaaggtggccctgaagccggcttgcagagccgcggcccccgctaagctccgggtggcccgacagccaacgcccgcggcgggcaacagattccaagcgcgggcaggcggagcaactagagcgacccgggcggagggctagggtgggctttctctgggcggggaaaccagacacttataggcggctgagaccgactttatttttactgcccaaactgttggaaagtatttaagcttaaacagaaacagctgtatcgctggcaccggccgacgaaactatttgttaccaggaatgactttttatgattaaggacccagccgtcggcggtctcttgaaggcggcgggcgaaggtcgccggggcgatgtgggcatcctggatccgctgttcgttgagaaccgagaggactcctcacctggagcacaccttactatgtctaggagtgaagccaaaaactggaacctgcgactgttgatgcaagaggaggcctggggagtaccggcgcagcgggcccaactcggagctagccccaaggccagcactggcgcgtgcagtgtgtagcgccttggacccgaggccagctttgcgctctgggcttcctgcctttcgaaacagactccttagctcgctgttttccgggcttcgtcgttttttctttttctctctccccttttcccagcctcttcttggccaagggaaacttttttcagccaagttgatatcgcgatttaaataaattgtgtgttccgaggtcgggctctgtgatctggagcttgggtagtaaaagggcaatgtggggatagctgctgttgaacccccccccccccgcgcctcaacaggggttaccacgaggggaggaaagagagcctaggagcaaaaggtcattgagtgtactcaggtgtgtaaaagggactgaggcatctctgcgcgaccctcgtcccctacctgggacttgccatcttcgcgtcgggggtgggggtgggggtgtctcttccaggccgcactagataccgccacacccctcaaagtccatactgatgtttgtcgggaatcccccgcttacgcttacgtcgtctagaagagcccgagacagaaagtgcactagctctgcacccaggtctggagcagagccgcggcgcctccagagctagccaggctctaggctctgcctcgatggtcataggctccttaaacccacccaggccgggacagatgtggtcagggttgacttctctcaggactgaggagtggattggacggaaactgcaggctgggtcaggaatagaggctggggcagggcagctgagacttggggacaatgagggtgggaagaggaggctcgcgacccctcctgcagggtctcgcttcaggatggattcaggcggtaaacactggcttgtgccagtctgctttgggcttctgagcccggagaagcgcccacgccagctcgcaggacccggagggtggacgcgggcagcgctatgcgactggagaccaagagcaggctcattgatttgttagctggatgggactggtgaagaagggaggagggggcgttgccatggagacccagggtgcgcggccgcaagggaggggtcagggaattagtaggttcggcgcaagcgacgtaggtccgggggttcgggcgcggctcgatgcgccccagcacctgtgcattgtgcatcaacggcggctggcgaccaggatggcgccagctagggcatgggcaggtggggagggcctgggtctgcagaggggcagcgcctggctggcacctacgcagggagccctaatagctcggcggggcaagccacgcacccggggaaacgctgggcaatcaggcaggggggccaggggcgggagcctagggcagcggcccccctgtccagccgtgcagactgacagcagccgggcccgccccgcttggcgtcacttccgctgacggctcgctccccctccctctgggtctctggagtggacagagaccccgcctcctggctattggaacgcgggtcacgtagcaacgcaggggagacggggagaggggcgtggccgggcgctagtccaatcagcgcccgcagaacgggcccaggacgcttggctttagcaacgtcgttagcaacacgtggggcgggaggaagcgctgggagggggtggagggagggagagtgcgcgggggagggaggagaactgacgtcagcgggagagtattatgggctgtcgagggctggctgctgcttttctgctcctggaagcggctgaggggggaagcggcgagtcaacatggagctctcggcggtgggggagcgggtgttcgcggccgaagccctcctgaagcggcgcattcgcaaagtaggtgaaggggaaggcgggcggcgacgcgaactctccctcaccagggcccaggctccctccccttgctgcagcccagcctcccttcccccaggtcccagcagcggccgcggccgtggcggcggcggcggcggctcagccccagcgctctccttagacttgcagccctgcacagattgcatggatggggggtggggtgggggatgaatgccggtgcatgcactttgtgcagcgtttctgcaggggtgctgcagtggactggttcctttggcggtagtgtttggagcattcatttggtgcatgcattttcgtgtgtatttcttgtgtcctcgtcatgcatttctccccacgcacacacatacacaagcattttcccttttgcatctgcagggacgcatggaatatctcgtgaaatggaagggctggtcgcagaagtaagtaggttatatgcaatcgctaccccacactgatatcgaggagggttctttcttcctcttttccccttcacattgaaatacaacacaaggcagccggaaaagttgcacacacatacacgccctccactctgtcctctctctcctgctccagggactgatgctccattcttcctggtttcctttaggtacagcacgtgggagcccgaagaaaatattctggatgctcgcctccttgcagcctttgaggaaaggtacagacccttagcctagccactcactagaacccatacacgctgacttcggtgcagccaggacacacccccttctctctcttttctttctttagggaacgggagatggagctctatggccccaaaaagcgaggacccaagcctaaaaccttccttctcaaggtatgttgcgatctccagaggtggagtgtgccgttcagggaggatctgcagggcttgtaaatcaatgggtgcccttgccttgtgtgtatttgtaatctggacttctgtcagaggccccatcacggagttctagaggcaggacttagctgcaccagaaggccttcattcccaccccccctccagccatcccaagtagacctctgttacacaaggagtctgttggttgcaaatggcttcttccagacaaaccctcattcccctcccccagactattactaagagcccacctccccactcaattagaatttcccaggcatccagggaaagttgggcagtcaaggctagaggtcgtgggggggtggggtgggcgggggcggggcttttttctcctcacaacaacttccttctgcaggcccaggccaaggcaaaggccaaaacctatgaattcagaagtgactctaccagaggcatccggatcccttacccaggccgctcaccccaggatttggcgtctacttccagggcccgagagggcctgcggaacacggggctacccccaccagggagcagcaccagtacctgcagggcagacccacctcgggaccgggaccgagagagggacaggggtaccagccgtgtagacgacaagcccagctcaccgggggacagctccaagaaacgaggaccgaaacccaggaaggagcccctggacccttcacagagacctttgggagagcccagtgccggccttggagagtacctgaaaggcaggaagctggatgagacctcttctgggacaggaaagttcccagctggccacagtgtgatccagcttgctcgaaggcaggactcagacctggtgcaatatggtgtgaccagtcctagctcagcagaggcctcgagcaagttggctgtggacacctttccagccagggtaataaagcacagggctgctttcctggaggccaaaggccaaggtgccctggaccctggtggtgccagggttcgacatagttcaggcaccccagcctcagtgggaagcctgtatcgggacatgggggcgcaagggggaaggccctccctcatcgccaggatcccagtggccaggatcctgggggacccagaggaagagtcctggagcccctctctgactaacctggagaaagtggtcgttacagatgtgacctcaaactttttgaccgtcaccattaaggagagcaacacggaccaaggattctttaaggaaaaaagatgaattgccggggtgggagcccaggaccagtgcaggggagagtgagctcaaatggcttagtgctttttatttctgggtgactgtggcctctggctggtcctgtccttcttcacacccctcttccctttcattcctccgtcctcagttctggctggaaaattatctctagagttctattttctattagatgtaaatatgttatttaagagaaaaatatctaaatatatatatttcaactcttgaagttcttttatttaaacgaggagagagagagagagaaagagagagagactgtggtttggtaggggagatagactgagctggcacaggaggggcccctgtccctgcagggcaccagcaaagttgggggcctgggccctgggattttggagggtgtgtggagggactcagccggcccacctcctccctccaccgccggattcccaaccctcctggcaccgcagaagatttttgctctcctccccattggccagctaggccaacaaaaggttggcttcccaatcagaaaaaggggggtggggtcagaccagttttcttttttctattttctttctgtctttttttttttttcttaagatgaggagggttactagggggggaaagtaacaactcgaataactttctcacgtgtgttgttaaaggtagaaaaaggtcgcgagtgagtgggccgcagttctccccgaccacagcaggagggtgcactttatggaggtgtgagtgccgtacacgcggactgtgtgtgcgtgtcctgtggacaaaaatctccccgttacctcgattccttcccttacttttgcaaagagaaaagaaatccagcgaatttgtttacattcccgaaatgccaggataaattgggaggattgcgtgtcagtgcccagagcgccagacagttgttttacaagaaaaatattcgggtggactttttctttttgcgtcctctagattcgccagaagacagggcggccccacctcccaggaagactcggacaagcctggctcgacggggggagggtgggtcctgcttttagaggagcgagcggccgccaagccaccctgcggggcgggcagcgggctgcgcaccaggccggtcgggctgggcacgggggtcgcagcccgagttggaacttggtcaggtggagctcatggccgaaggggctcggcagggtttccatccaagaatgcgcagtagaactttagtgttttccttcttccccctttcttaaaagcaaaagctgtaatttatagtccttttcgattctgggagtgctctccacgtgaactcgacgttcagactccgccgcagggggcgggggagcgcgaggtggagcgggagcggccggggaccagtgtgccccgagaccatctgcgtccctggtcccggcccactccggaccgcgccgcgcgcagctcggactcaaaagcacaaatctgtccccgagcctacagtcgccgcttccagcagggatcctgcggcctctccaccctccccgcccttaaagggccagcagacgctctaacttccagggcttttggagggaggggctctaagctctgctcgcgggacaaagcacagacttcaggggctctgggctgggctgaaggagcttggtgatggggagggactgagagggacgtcagcctcgtcatctgcactcccggcttcccatctccagactctcggtctctctttcctccagacaattttttttttttttttgcctttaaagagagggagaaagggaaaacggtgtattctacgtgtttttattatttttttattttttggagaatcaaactgcgcctaaagagaagcccctagaatggggatttttatctgctcatatttgtaaaactagtattttcgactttgtataaagaagctctgttgcctgtgtctgtctagatgtcgaccctattttcagatgaacctgttttgaagggtgcatctgtgaccgagtggatgtaactccggaacaggagctccctatctggctaccgactccctttctcttctctccttcctcgtttgtatcttccttccctccaaccttcctgattctgccctcactgccctcgtcgtcctgccgtctgtccatggccgtcgtgtgtgtctccttagctcgctcttgagaggctgacttgggggtgggggtgggggtgggcaggggtcgggggccacgcggctcagagtctgtggagcctgggtgttgggtttatgagttctcagctatgtataaatctccaactgatctctgcctcggctcaagagtgaacccttggtacctatcttgggttgtgaatgtgtctgtatccagtatcactttttacgtgtttaaatatatgctttgtaaatagacacgtgtcttggcttcattattttatttatttcccagaacagggaagaggtagcctggaaaggcaggatacttgcctttctgacttgatgtccctcactccactctcatactctcaaaaaggtctggattcccgacaaaggccggttcccaactaggacacccctcagtgagagtgaggggagctgggttggggagggagcgagtcgtgacctttctgagcttttccgcgagctgtcttcattgccggcttaacttctttgggatgccggcagaattggagactcctgagatgaagtgtgcgcgacctctgggctctactcactctgagggaggattccccccagcgctaaacacccttccataccaaacttccatagctcctgacaaccaggagccatgctgactccctcactgcccttgacccgagcctgctcctcaatgctgtcacaggacttgtgccccagacccctccaacctcaccagtgctccccgaaatgcagagtctccgtctattgattgaggaattgaattcgcggctattgctaggcaactgcctgcttggagccggcgcagagcgcgctgatgtgattagtgagctgggagccgccgaccctcagccccgcgctcccaccaccagtccctacggcttcttggaccctagtgttctttcgggtagataccacaaggttggatgaggggctgccgatggagaacatagcatggggtgatgatggtgggtgttctcagtcttctaggctgcagacttctcagcagagaggcggggtcctgaggctgcaaaggcgacccatactccggattcccaaagaggaccttaccagtactgaacctagttccacctccatattcctgggtagacgtcgctcccttgcagaaaaagctgtaatccgtgcgaacacgcagagcccaaggggagggaggggggaatacggaccaggtcacatcttttgcccttggccccaccttcctcctccagctcagtgacctgcgtgggaggctgtgggtcaacgtctgtggtccggggttgccagagcaggtcattgagtgtccagttgagcggtcagcttgtctcagtcgccaagaggtccaaggtctgtttcttaggccacctcaaggtgctctgggtcgagcaagctctttactgggccctctggagggcgatggccatcagggagacaagaaggcactgtgactgtgcctggtgacttcagcagtagcccctccctcaaatataggttggaatcccgcaccgacccttagggatttctccgcttctttggtcaccaccaacttcaacctgggttcagggcttcctcagagaattttctgggtgtattctccttaagagcaaagcacgggtgtgaggacccctggctccagacagccttcgttcagacagatctccctccgtccgttctctttggcaggacgtgttagagccgctgtcggagctgagccttgcccaacacaaacacggattgaatggaatacttatggctctacttagagccggttttttttttttttttttttttttttccctgactcttggatgctcacagcgcgcggctctgacgaaggcccggtgctgtgcccaggacgacagtggtatgcaagcctgctccactctctgcggatgcatccacggcttttttcttttcaccaaaaagtccttcaagccaggggcggctcggattcaacgggatcccaaggtaggagcgaataggatcacgaacgggtgccatcaaggatggaaatttagctgacagcagggagaagcagtaggcagaggcctggactttctttctgcggccgcagacggttcggcgggtggttactctgagcagcaggggtgtagacagtgcaactgagtttaccacagcacgggacagcgggggattccgccctcctccccatcatcatttaaagtccagcgacacgaacttcgtggggagcgcgcgccctctacaggcaacggcgtcagcccctgtcccaagtacacccctccccctctctggttcacgtctgatagacgtgaagaaaagccttctttcctcttaaccggcttctcccagcatcacctttgtgcctttgtgaatcggcctcgacccacgcaggctggacaggagggaggtggtgttcactggcctagaacccagctgcaccaatcgtaccaggtgccctccacttggtgtcagtggtgcctactctaggatggaggtggattgattaggtggtcagactaggaacacagaaattaataaacatcaatgtaggccagccccgccccctcaactttggtctggagaccttgtccctgtagacatagattttcagagagcctagctggccaatggggccagcacttgttcctgtcctgacctgaggtctatgatctaactgcccctatccaccttttcaaaaagaaaagaaacaaaaggcactgaagacaacaaaagggaaatcaaatcgtcagctgcctgctttgcaagaaacaaggaatgggtttccctggctggagagatggctcagatggctcagctattaagacctgcgttcgatccacaacatccacctggaagctcaaaacccgtaactccagtcccagaggattcaccatcctcacagacattcatgcagggaaaacaccaatgcacaaaaataaaaagacatacgttttttttaaagtcgtatctctgcaacaaggtgtttctatctgtagtgttgacgcctccccacagcctgacatccaggcctgagtcccaagcagcctttctgccaggagtggcccatcttcccctacacttcagaggaactctattctcctgggaggccaaaggaaatttatgaataaaattaatgttgaagagagtaacacaagtcttgggctggggaaggttgtgtaacagcctgtcttcccttcatcagttgtggggggagagtcaaggtggcccctgaccagatgtttcctgcccttctcagagcttcccaacatggtactgtggaggtgagagtgttggttttacttttatgtactctgtaaggggggaaaagtgagttactgtgtatctcagaagctcggtggtggctggaggcctgtaaacatcccacttgcccagtaattagccatcattgtcccataatgaaggttactaccagcatctaacaactgcttctcactgctgtcagacaaatataaacatccttgatgggagtgtgtgtgtgtatatgtatgtatatgtgtatatatgtgtgtgtgtgtatatatatacatctacatgtacatatacatatatatgtgtgtgtatatacacacacatgtatacacacatatatgtatatgtcaaatatatatcttgatggatatatatatttgatggatattcttgatgtgtatatatatgtatcagatatatatgagtatatatctgactatgaacatgaatatattatattatatatgtatatatatatatataatatatatctttcccattaagccagtttttctcaaacttggcttcttggatattctgggatggtggacttttgtatggtggactgccttgtgtggttctgtggcactcttggtctctgctacatgctggtagtaaccttcatcatgagacaaccttctccagacactctttatgcctcccactcatcagcactctctctctctctctctctctctctcagctacttccaatgttcccccccaccttgtttggtgctgcagctaggcccatgtccacagagtgctgtgccccatgacaggggaagtgaaaactattttgtttatatgtattagttacaatgcacaccaagctaacaagtttaaaaatacatttgatactgagagtagcaaaaagaaaagtgtcccccctgcagatttactgcctttcccctgcaacacaaagtaacaccagtctaaaggtcctgcactctaggctagtgtcactagaaacccctgaactgtgagattcatgtgtgtaaacacagctgtcgctgtcttattctaaacctttccccagtccaacatgggcttcctgggcagtcattcccctgagagctggactgttctgttccaacagattctaagcttttctggggtggtaacatgcccactcttgctaaccctctatgagggcaaaagtttccagtttaaagaggtatacatcaccgggtagtggtggcacatgcctttaatacctgcacttgggaggcagaggcaggtggatttctgagttcgaggccacccttggtctacagagtgaaatccaggacagccagggctgcagagagaaaccagtctcaaagaagggggtggggcatacatcagtgactggcttaaaaacagataaaccaagccaaatgactgatgctggctcaaagttgaacatttccttctggataaaaccttggggtcagagctctctaatcaaggtcaggatttgtagtatacccaaacaaggggcactctttttggcaccaaagattttttttttttaaagtcaatgcttctgaggaaaagtacataatggtcgcttttcctattagttgttgaagcagacaaaagggggcttgtaattgtaatactaggaaagctgaggcaggacggccagaagttcaaggctagaagacacccttatcctgaaatccacttggcatgaaaatgtaacacctaacacctggaacccttatgaaacgaacctagtcaggtgcctaactacccatgtgtgtgtgtttgtgtgctcgcatatgcgcatgcacacccacctacccacccaagaaaatggggaagaggggctggtgagatggctcagtgggtaagagcacccgactgctcttccgaaggttcggagttcaaatcccagcaaccacatggtggctcacaactatccgtaacgagatctgactccctcttctggagtgtctgaagacagctacagtgtacttacatataataaataaataaatctttaaaaaaaaaaaggggaagagaacagcaaacataaaaaccaactactttatttatcggtaaacacgagaacttgactcagagcgaatggcgctgctccagtggggctcgcgctggcgcactacacacatgtgctttgtgacatagaccactggggtcacagcaccaggaaaaacacacaagaaggcaaagtggctgagaggaaaggatttgtagatttcaactttgggactgacgtaaccagtaaaataaaaggcaccaaattgggatttggagactggcagcaggggacaaaggccagtcaacccagatccccaaacagggtcacttctccaacagctcatgggaccccaaagagacggggaggtgtttgtaaaggcagtgtctggtacaaaggttgcagaccctggctgagggcagggagggacattgataatgcagtaggcaaccctttcccctttgttacccacttcctggccctgaattcttcccagtacgtagctcctgctgccagtaacatggtcccctggcacatcacaggcatctctcaggagctgtggatatgggtctgccccaaaaggcacagcattgaggttggtttggttacacaaagaccatcttatttggtgtgcagggtgagctactggggtgggggtggggtgcactttgaaagtgtggcaggtcccagacacctcagcccactgtctgactggttttagaaggggaaacatttcccttcaaggcaactggagtgaagagcccacacctgctggctgatcagtcaatggcagaagcagaaccagggtttcatagcacccctactttttggcatcacagactcactgaccagattgtcacggcccaccgtgatatcccaggacagaaaatcctgtcatcggccagcaatctgacaaggtagtttcaagacagttacccgggatgggggacaggggagaaggcatttagaaaggggctcagcactagacttatctcctaggatgggaaagaaattaggggccccctgccaggtgggctcctaaacgaccccaccacacaaatggcatagggctattgcttctcagcgagggaggaaacacaagctcccaaatgtgggagaggattgtcagggaatatgggacccaagagtggcccactcaccaggcggagctctgcaccaagactgactatagaaaatgcttccacagtagtttagagatgtctagacaggcagcagggtgacaggcccccacaaaacacctgcattcccacactggtgccaccatggtgacttatggggtcctagtaataaaagtccaacatgaaggaagattgcttgcccaggactccaagtgcctacatcagcttgctctgggtgtctagcctgctccttccccaagcccaggagtgtcagacctcagaactagggtgcaatttagtgggccaaagcaggggtatgggtccagacccagagaggaacagggtcacttctcactggggcttgagcctgcttgaaggaggcaataaggacatggctctctctattcccaagtccagaagcacccaggtacaccttagtgccaggactccaaaccctgactgggctttgggactacaattgcaactagaggggacaccacaccacggatagagactgaagatttccgcagggtccctgagcccaaccacacaactaattagccttttaaaactgaagttatagccttacttgcaaagcatagagtgtctccctcaccagaaagaccctgccgtggctggatgtgggagaaggccctaccagccccacccctctcctcaacggcctggggagggagctgtatcagtgcccccccctccccaatccacctcacagtagttggccagggaggggagggtctcactaggttaaggagggatgtgtagaaaggatgctatgtccaagcaggtagcttttaagtcagtggccacccggctttcctgagatgacaggacagactgaagtggaggcccagagaggtagaatcagcaggaagccatttcccagccctgagtctcaggacagggcagagttggcccccaggtcaggcatcaaagcaaaaccagagactggaaggcaggtctggctcgggcaatggtctcaataatgcctcaagttgaagaagcccacgctggtgggcgactccttcacggtgacagtgatgaggttggctgtgacatccgtgacaaagacgtgttcgatgagactgcgggtaggtttccagtcctggctggtctggatagctacagataggttctgcgcagcactgggaagcgaggtcgagtcagggtccgagtcagagctactattctcctctcccgtgctcagctcagacagcgcaggtggctttcggccttctcccggggctgtgtggccctcctgcccgccggaggcagcgacgcttttaacggtgtcccgcttgacggaaggggcaggcagagccgttgccttgcaagtcagcttttcccctttgttgttgtctgtgggagcgttggtcatgtttgctcctgtggggccgctcccaggacctttccctgtggctgggttggtagcaggaatagccttggctggggcatggcgagcaagcaggcccacaccaggcacaccgttcttgacgctttgcaagtcaaggacctgaaggctcaactcctgagtgggtgccagctgagcacctgggctccccgaatggttccctctctgctgctctgcagctccgccaccgggggccttcgggaccttgcctcctgcggggctcccccctagctcaccccccttctgcgtcctcactttcaggtctagcccgagaccgcacttgttggtggcctgggccttg

SEQ ID NO: 116 - DNA, 1413 bp, Mus musculus
tcgagggctggctgctgcttttctgctcctggaagcggctgaggggggaagcggcgagtcaacatggagctctcggcggtgggggagcgggtgttcgcggccgaagccctcctgaagcggcgcattcgcaaaggacgcatggaatatctcgtgaaatggaagggctggtcgcagaagtacagcacgtgggagcccgaagaaaatattctggatgctcgcctccttgcagcctttgaggaaagggaacgggagatggagctctatggccccaaaaagcgaggacccaagcctaaaaccttccttctcaaggcccaggccaaggcaaaggccaaaacctatgaattcagaagtgactctaccagaggcatccggatcccttacccaggccgctcaccccaggatttggcgtctacttccagggcccgagagggcctgcggaacacggggctacccccaccagggagcagcaccagtacctgcagggcagacccacctcgggaccgggaccgagagagggacaggggtaccagccgtgtagacgacaagcccagctcaccgggggacagctccaagaaacgaggaccgaaacccaggaaggagcccctggacccttcacagagacctttgggagagcccagtgccggccttggagagtacctgaaaggcaggaagctggatgagacctcttctgggacaggaaagttcccagctggccacagtgtgatccagcttgctcgaaggcaggactcagacctggtgcaatatggtgtgaccagtcctagctcagcagaggcctcgagcaagttggctgtggacacctttccagccagggtaataaagcacagggctgctttcctggaggccaaaggccaaggtgccctggaccctggtggtgccagggttcgacatagttcaggcaccccagcctcagtgggaagcctgtatcgggacatgggggcgcaagggggaaggccctccctcatcgccaggatcccagtggccaggatcctgggggacccagaggaagagtcctggagcccctctctgactaacctggagaaagtggtcgttacagatgtgacctcaaactttttgaccgtcaccattaaggagagcaacacggaccaaggattctttaaggaaaaaagatgaattgccggggtgggagcccaggaccagtgcaggggagagtgagctcaaatggcttagtgctttttatttctgggtgactgtggcctctggctggtcctgtccttcttcacacccctcttccctttcattcctccgtcctcagttctggctggaaaattatctctagagttctattttctattagatgtaaatatgttatttaagagaaaaatatctaaatatatatatttcaactcttgaaaaaaaaaaaaaaaaaaaaaa

SEQ ID NO: 117 - DNA, 1089 bp, Mus Musculus
atggagctctcggcggtgggggagcgggtgttcgcggccgaagccctcctgaagcggcgcattcgcaaaggacgcatggaatatctcgtgaaatggaagggctggtcgcagaagtacagcacgtgggagcccgaagaaaatattctggatgctcgcctccttgcagcctttgaggaaagggaacgggagatggagctctatggccccaaaaagcgaggacccaagcctaaaaccttccttctcaaggcccaggccaaggcaaaggccaaaacctatgaattcagaagtgactctaccagaggcatccggatcccttacccaggccgctcaccccaggatttggcgtctacttccagggcccgagagggcctgcggaacacggggctacccccaccagggagcagcaccagtacctgcagggcagacccacctcgggaccgggaccgagagagggacaggggtaccagccgtgtagacgacaagcccagctcaccgggggacagctccaagaaacgaggaccgaaacccaggaaggagcccctggacccttcacagagacctttgggagagcccagtgccggccttggagagtacctgaaaggcaggaagctggatgagacctcttctgggacaggaaagttcccagctggccacagtgtgatccagcttgctcgaaggcaggactcagacctggtgcaatatggtgtgaccagtcctagctcagcagaggcctcgagcaagttggctgtggacacctttccagccagggtaataaagcacagggctgctttcctggaggccaaaggccaaggtgccctggaccctggtggtgccagggttcgacatagttcaggcaccccagcctcagtgggaagcctgtatcgggacatgggggcgcaagggggaaggccctccctcatcgccaggatcccagtggccaggatcctgggggacccagaggaagagtcctggagcccctctctgactaacctggagaaagtggtcgttacagatgtgacctcaaactttttgaccgtcaccattaaggagagcaacacggaccaaggattctttaaggaaaaaagatga

SEQ ID NO: 118 - DNA, 22715 bp, Homo sapiens
cgggcagtcagtgttgagagaggcagctggtgaggcacctgggttagactgcaggtgccgaaggacccaacaggagctgtgggagaaagtgactcagtcttgccctgtcttgccgtggcaaatcatctcccccaacatccactcctgtctttctccccttttctttccctacactcgatgccctcactctgggaacgacatctctgtgatctctgccagcgatggccccacctgctcctgaagaccctcgactcccccatgcccacctgtgcccaccttcttcatttcggctggacaccactgcacaccagacttgtgcaaagtgagggtcagacttggggatatgctcttagatgttcccgactcctgagagggacctgtacccaccccgctgtccctcactggggagctgtaagaccactccaaggctgaagcccagtgtcctgcacccctatccagtggacacccttcccattgctcaggcccttccaggctgaatggcgcccccctcaagaggagaggtccaacccctcccctcagcttgggacagagtgggggtggggtagagaggacagttccccaagggactgcccacccccatcccagagctcgtataatgcctggagcaggctggagaatgaggtccgccagagatcctgtcttgcagacctaagaaaaggtttcagggaacagaagaattggtaacccctgcaggcctccctgctggccacttcctcttctattcatcccaggtcctccctactctccaaaagggagaaactgagggagaaacctgggactgaatggaaggcctggaatcccaactccccctgaggtttttggctgggaaaatacctggggacagctggagtcttcgggtatcctggggcgcccctcccccagagcgcccccttcccctagggaaactttgatctctctctcgctctgtctctctctctctctctctctctctctctctctctctctctcacacacacacacacacacacaggcacacacacacacgaacacacacacattggaaaggagatgatacctctaaagtcaggctgcaccgtcggggtggtgtaaaaaagttagagactgcctcaaaagggcagtgggaatgaccgcaaagggaagaggaaggagataaaatgaggcctatccctcccaacccagcagcccggctctccagagacactcccttttccaggccctacagtcccttggcaccctcctcccttcccaccaatacagcatctgaaggtgtcactgagatcttccacccatttttcctccccctacccatctcacccacaggttgctctactcacagcaattccttcctaggcttcctcctgtaaccctgaactatttaaaagctcattttaaaaaagaacttaagactgataccaaacttcttagttgcaagcctgaactgtgggcaccttctcattaaacgtaaaacctgcatcttttccaagagagaggacgttcttgtccgtagaggggtgacgggaggtgctgcagagcccttttgagctcctctcactctctgctctgtgactgcaaaagtgagaatggtgccctcggaggaaacacgttttactgcaaaaattgtctggagcccggaattgccctgaaagtggccctgcaattacaattctggtccaaattcatttaccatatttatttgtggattttctcctcccactcctctgcgtattaaaaaagatcaagaagattttttaatgtataaaagatgtttcctccacttaaggcaccccaccgccacccacgcacccctttattctgctttgaattcaacgacttctgctgtctcggtggctgaggcgaccatcccagagcaaggaagtgctctgtcttgatctgttcaaagggtgcggaactgagtccctggaaggtccggacccagaccccggagctggtttgcaggacacccctttaatcctcagtaggctgccaatctaccctctccacaccccaacacattgaacatctgcccccaataccccagccacagtccatgtctctgcctcgagggccaccgaacctcccaggatggatggggcgatggtgggggtatctgctgggacttccacggtggcttaccccttcatccgtttggccaaaaagtaagctctgaggttgaaactagaaaaatacagaaactcagcgtgaacatcacatttccactgctttaaactttctctctccttggtcctggtcaggaaccctacaccctctgctaaaccggcttttcttgccataagcctcctctgtttttaggatctcaaggactagctgaagaaaattaattttgcctctgattgctgtgttattctagataagccattattatgcaaatgagggagtgcggctctcaggatgaataagacggtgccggtagcggcgcgggacagccccagatgtttgcataattacttctgccccaacttcgagagtgcaaaatgtcaagggaggaagttgtgcgggtaaatacggtaccatgttccctgaatttgatttcctacagaagggcggggaaaccgatcggaggcttcagctgcagagagaaaaggcatcacggctcccgggccgacggtgtcccggccgagtggccgtctgcgtccgcccccgcgatgctgagccacccctcggcccagggcggccggagagagcaaggtcccgcccgggtagcgaggcgcttgcgcgggcacagagcagcagcttggccccacgctttccggcagccccggaaccggcaacacggcttctgggcgtgcgcggagccgccgcgctctggccgcggagcctcgacgccagccgagccccttcgtgtcccagacggcgcctcctcccggggcaacggctaggggtgcaccgaggaagccctgtaccggggctgcgaggaaaggcgtcgaccacagtggaggacgccgaggcttcgcccagaacctcgccggcaccgtcgcgttttctcggtcagctcccaaacgtctgccctcgggtttgccgcccgcgtggcccactcttgcggagggtaggcggcccggcagacgcctctgttccccgaggttctgcgagaggccccagactggcctccgcagcttgtgccttctcgaatgacccggcaggccctgcacttaggattttctgatctctaaaaggggaagctggactgtggctcttggcgttaacaatctcgcaagggaacggcaccggctgagagactcccactttggaactgacttgaggtcccgacgtcccagcaaaaaagtcacttcaattccttctgcatgggggtggggtaggaaatgaaaaaacgggaagcgccaggcggagtccgaggagtccctggagcttccctgggactctggagagccgcgtgtggtccaggaggaggcgggaggactgtggcacccagcatcgctggaggcagaagtgcccaccctggcggagctccggctcaagggagcccaggaggtccagctgcctctctgcgcccaggctctggtgccaccattccttgactcgcccagcctctccccgtgttttcccgtgggagggttggtgctccccgcctttctcatgagctgggtcacgggaggaggggcgctcatcaaccgtggctcgtaaccgccaggccaagcctgtcagtgcaggcagaatctggggtcaaactctccactcggggtatctggaaccacaggctgctcacgcgttgagccagggcccggggtgatgcgagaacagagtcagcgcgccccgggcatctccaggcaggggttggggctggaggtttctgataacgtcctgctctcggacgggactccaaggccttgatctctaggccgctcacttgtcccgggctgctctgccgccacaccctgccggcctcccctcgcctctcgcagtccccgcccctggctgtgcctagtccgtcccgtctgagccccttctccccagaccgtgagaactgagcgcccagacccaaggactcccggactccttccaggttgcggttgtccggcccaactctggaccgcctctttctgctccccaagggcgcctggggctcctaggaatgggtctcacaagcagcaccagcgagcagtccggggattgggtgtgcgtgtgatgggggggcgcgtgggggggggcggaaatggggccggcccgcggcgcgcatgcgtgctggttcgggcgctgtgcgcgtgctccagcggcaccgcaccctcagctcgcccggcctcggcgctccgaggggacgccggcgcgttttcccagcgagcccacgtggcccaaccggtccagatgcccaaggaatgaatcaaaactgcctctaagcagcatacggtccgtttcccagggaaggatgggtgtgtgctgagcaccctctctgggcttgcccctcatggagaagaagggacagccgaggctgatactggagttcctggggaaagtcagaacagaatcactaggtcctatgagtttgttctggtctcagaacaccaataacagcaacaacagtaactaataatgaacatttattgagcatttgcctgtgcctgacagtgtgggggtgcttccatatctcattgaaccccccatgggctctgttgggaaaacgtgctaatattccttttcttatagttatggaagctgaaacacagagaggttaagtaacttgcacaagggcacacagccagcaagtgcattggaacccaggcaggctggccccagagcccaccttttttagccactgtgctctagcattaaaaaaaaaaaaaagcgaaaacgcccaccaacatccagcttccagttgacttaaatcggcccctagaactccctcctgtctctattgttccagtctcatccttgttgccgagggctctgagggtcctcctgctggagcactgctctgcgcttccacgaggctccactggacctttcttgaattctttcctcaagccttggaggagctgaaattcacaaggatccaaagcccctgctgcggagctttagggacgtgagcttacggcttctcaggcagaacccctgctgcgtgcccctgagcaagtgacttggccccgcggtgcctcgctttcctcatctagaaaatgggggtaagggaactgatgttacctggctgttgtgaatgttaactgggataacgcaggccctagatatagggcaactagttaagcaatagatgttgcttaactctgaggggatattttcttcctgtggaggggaagaaagggggcctgatttcagtttccggggtttaaggcagaaatgtggcttctagaatgtgtgcagccttgtgggagattcctgtagagtgggcagccccttcttatcctttgcagcctgttccagtgcttctctaacaaggaggatgtgtggatgtctcctagggaggagaaagtgggacaggaaaggtgggagcttcttgctcttgggaacaactagcggcgggaaccaaggccagaaacctggacaacctcacttccagtcacccaggctgggccttgggaccagtttccagaatgtcgggtcaccctgcggcattcccgcagcaggcggcaggcgcccagccctagctcggcgtctaggaagcagcgctgcgggacgcccgcccggctccgggaccgcgggaggtaagccactggccacaaggccacgcctcggagccgcccgcgctcatttcactgccggcccgcccgaggcaaacggttggcttccaaatctgcccgcgtccgcggccaagaccgggcaggtccgacgcccgccaagccgcgaagttgaaacgctcccaaagaaccgggccggcctcatcctcaagctagaggacgcgctagggcttgccggcctggcccaagacccaggagcccagcgccccgctggggcccgtccgcccctctccttggagtgctccagcctccaccctccctcccggaggacgagtccgtggtccgcgggcccagggaggcctaagagggcccccaaactccgggctctcaggaggctgcagcatcgagggcagagtcctggcaccttttagaggctggggccaagggtagggcgggctcccgggagcaggtcgcagaccctttgtcgggaagggcagtcgcgggccgtgcgcccaggtcgccagaagagtgcggaacagggccggagacctaggggtttgggaagcaggtgtccctaggagggcgggcgcccgcatttccgtaaacaaagaaacggggcagctcatctcaggagagggggtggctgttaagagaatcgccgacaatttccttcataaaaatgcgatctgagagcatttgatttccactttcactccccccatcccccgccccaacacacgcaccgtctctaaagacactcaaattgcagccatatggggctaaagtaataggaagcagttaccttatttactgcagaggcggcgcacgccaacctggcagccgcagcctgagcagcggaccgccgagcaatgggattaagagtagcgtgtcttgtcttttacaactttgttttgtttgctcctgggacgtgtaggtgggaaaggcaattatctaactttgaaacaggaaagcggttgtatggagaaaagggaggtggcgagaattgagtcggttggggaagggggttgataagaaaggtggggagcaaggatcctctttctgtgggttcctaagaccatgccaccagctgacctgtcctctcggtctggatctgacccggctggaatgactgcaaacctcctccccctccacgcccacgcatgctagcaccctctcccggaacacagggcttcctcccgcgcccacccagccagagcccgggaggtgggctcccatttctcagaccgccacctcccgctttgtctccaaactgtcgaggaatgaggttgcccggtgacctgttttcacaccccctgcaacgctgctctctcacgggttggggggcaggggttgcgccaggcagggatgagacacactctgccccgttggggattgccttccttggcgggactgagcgcgtctgctactgacaagagccaggctccctgccctcagatcattctatacctcttccttccttctgaatcgagttccacctttgccacaagctttgcaggattccccgacgtttgcaaactcagacttttcgcaagcgatagttttgtttagagcaagcatttccgaaataatcgccatcaggcacaaagacaggtggaaaattgggtggggaagctaagataattacctaagaccctatccagaggagggggccgcacctgccagcatcaggggttccatttcttcaagtttcagaggtatttaggcaaagaagggagaatggggcagaaagagagggagacggaaggaaggaaggatgggaggaaggaagggaggaagaaggaaggaaggaaggaaaatggaaagaacgcatggaggaacgactacagctatcttttttggggagaaactgaaaccatcgccctctgcacgcctagcgcaaaccccatgatcagtaaaggcatcaagggcaagcacaactccgggaagcgggttccagaaaccctatctgaaggaaaatcaccgctcttcgcgggtgcgggagagcttgccaggggtgggggtagggcgcgaggccaggcgggtcaggtccccccggcccactctgggaaggccccctccctcccacttccacagtggccctggagccagctcgaggggctgaggcggccggtgcggggctggggcgctgttgtccttggcgggcagcggattccaagaggaggcgggcgggacaggcagagggacccgggcccagggcggagggtgggctttctctgggcggggaaaccagacacttacaggcggctgaggccgactttatttttactgcccaaactgttggaaagtatttaagcttaaacagaaacagctgtatcgctggcaccggccgacgaaactatttgttaccgggaatgactttttatgattaaggacgcggccgtcggcggcctcccacgggcggcccgcgagggtcactgggagatctgagcgtcctcgacgcgctgttcgttcagacagaacggccggagagatgggactgttcgacaagcggccaccttgtgaagtttaggaacaaggccaaaacctgaaacccgtgtttccagaggctggggcacgactgggagggaagatgggcgaagcgccccgcttgcccggcgggtcgaggacctcgcggctgccgccgcctgcgcgcgcctcactttggacaggaggccagttttccgctctgggcttcctgcccctccgtgtcagactccttggctgcttctctctctcttcctatcgttctctctctgcctctctcttttccccccctctttctccaccccatctctggccaagggaaactgcttgcagtcaggctgatcatcgatgtttgaactaaatcgtgggttccaaggagtgggagttgtgatttggagcttgagcaataagagaacagggtgggagggagctgggcccagagtgaggctgctgtccccagcgccgcccccgccacgggtcaccggtagcctagctggcggcagggtcggcggtgcacgtgcttgtgtgcgcacggcaaggcggtcgcggccggcccttgtccctttccaggagcccgccatcttcgcgcgtgagaccctctcgcccagcccgcactggacccggcgacgtcccccagcttcccgcgctggcgtttctcgcaggatgtccgccgcccacgttgggaagagcggtggacaggaagtgcgcgggccgggcgccggggttcggggaaagccagacgcacccccagccgctcgccccatcctctgccggctccgcccagatgcccttagcccacccaggccccgagcagggggcggcgaggggaaggcgaggttcggggccgaagcctggcgggggcgggcagcttgggctaagggcaggggcaggtggctgcgggcgtcggggatggtcggggggcaggaagaagccgcgcgacatcctctgtggggtcctgggctgcagccgggctccggagggaacagcccggcctccaccaggtctgtgttcggcttcggagccggggacgagcgctccagccagcccggctcgcagggcccggagggtggccgagggcagggccgcgcgacaggagcctgagacacatgcacattgatttgttagcgggacccggcttgggggggggggggacgttgccatggagaccgggggtcgggtgtgcggctccgggggaggggggcggcggccgggggagaagcccagccgatgggcgcgccgcaggctctcggggttcgggcgcggcccgcggcgccccagcacctgtgcattgtgcattgtgcggcgcgggcggctgggggaggggaccgcgcgagtcctgggcggtgggggtggggcggcgggccggggtctgccgaggggcggagccgggctgacatcgccgcggggatcccagcgagagctgtgggggacgccgaacgccggagggacaacttggtggcgggggaggggggccccggcgaggacagagggcggcctgcccccctcgccagccccgcagactgacagcggccgggcccgccttcccctggcgtcacttccggcggcgccccctcccactcgcgcgctcggtctctggagtcgcctcggactccgccccctggcgattggaacgctggtcacgtagcaacgcgggggagaaaggcagaggggcgtggctcggagctcgtccaatcagcgtgcgggggcgcaggcctccggccgctcggctttagcaacgtcgttagcaacacgtggggcgggaggaagcactgggcggaggggagggggccgagcggaggagcgcgggaggggggccgcgggagggagcgagagcgccgggagggggaggagaactgacgtcagcgggagagtattatggtctgtcgtgcgctggctgctgcttttctgctcctggaagcggccaaggggggaagcggcgagtcaacatggagctttcagcggtgggggagcgggtgttcgcggccgaagccctcctgaagcggcgcatacggaaagtaggtgcccccgggcctagggcctccgtgcggccgggccctcccctcccggcccgggttccctccccctgctgcagcccagcttcccttcccccaggtcccagcagcggccgcggccgtggcggcggcggcggcggcagctctgagcccaggcgctttccttagacttgcagcgatgcacggattgcatgggtggggggcggggtggggaatgaatgccggtgcatgcactttgtgcagcattaggtgcaggggtgatgcagcgggcgcgtgccttttgcggcggggtttcgagcattcatctggtgcatgcattttcgcatgcatttcttgtatcctcgtcatgcgtttctccccatgcacacacattatcgcctttgcacccgcagggacgcatggaatacctcgtgaaatggaagggatggtcgcagaagtaagtaggttatatgcaattctcaaccccagactgttattcgggaggtttctttcttcctctttttgcctttacattgaaatacaatacaatgcaatgagaaaagttacacacacacacaccccctctgctctcaccctgctcctgggactgatgcccacttcttcctgattccctttaggtacagcacatgggaaccggaggaaaacatcctggatgctcgcttgctcgcagcctttgaggaaaggtacagacccttccaagtcccagccgctcacttagaaacaagtagagtggcttctttccagcctggactagagtcccacttgctttctttactcacgcaccctttctccttttcttctttctccagggaaagagagatggagctctatggccccaaaaagcgtggacccaagcccaaaaccttcctcctcaaagtaggttggcagtgtccaatggtggaggaccatgttatggagtgatttgtgggaagggggctctgagggctgtgagccaatggggtgtccacacatgttgcctatttgtaatgtaggagggagttccctgacaagatgtcaccaagtcagtagcagcaccaactgtgtctggggggacgggcttggccacactagaattcctttacgctccccctcccaaatggacacaataatcaaatgcaaaaagtgtactttttgcaaatgactacttccagccaaatcttctacctcttctctcatccttctacctctcagctccaacagccatcccacccattcatccagccatccacccacccacccacccacccatccatgcatccatgtagaaattcccaggcatcatagggtaaagataggaggtcagggatagaggaggagtcctgtgggggtggacagggccctgccccactcttgagaccatcttctctcctgcaggcgcaggccaaggcaaaggccaaaacttacgagtttcgaagtgactcagccaggggcatccggatcccctaccctggccgctcgccccaggacctggcctccacttcccgggcccgggagggccttcgaaacatgggtttgtccccgccagcgagcagcaccagcaccagcagcacctgccgcgcagaggcccctcgggaccgggaccgagaccgggatagggaccgggagcgggatcgagaaagggagagggagcgagagagggagcgggaacgtgagagggaacgagagcggggtaccagcagagtggatgacaagcccagctcaccgggggacagctcgaagaagcgaggccccaagccccggaaggagctcccggacccctcacagaggcccttaggcgaacccagcgccggcctcggagagtacctcaagggcaggaagctggacgacaccccttccggggcaggaaagtttccagccggccacagtgtgatccagctggcccgaagacaggactcggacctggtgcagtgtggtgtgaccagccctagctcagctgaggccacgggcaaactggctgtggacaccttcccggccagggtgataaagcacagggctgccttcctggaggccaaaggccagggtgccctagatcccaatggcacccgggtccgacatggctcaggcccccccagctctggggggggcctgtaccgggacatgggggcccaggggggaaggccctccctcatcgccaggatccctgtggccagaatcctgggggacccggaggaagagtcctggagcccctccctgactaacctggagaaggtggtggtcacggacgtgacctcaaactttttgaccgtcaccattaaggaaagtaacacggaccaaggcttttttaaagagaaaagatgaatgctgggtgggtgtgtccaggaggagagcaggggagagagtgagcgtgagcttggcatagtgatttttatttctgggtgggatgtggccttttggctggtcccgtccctgatgtcacccccaccccaccagcccctttcatccctccttcctccccctcagtttttgttggaaagattatctctagagttatattttctattagatgtaaatatgttatttaagaaaaatatctaaatatatatatttcaactcgaagttgttttatttaaaggagagagactctcattgtgctttagttggggcagcccgaatgagctggggcaggaggggcccccttgccccagagctctagggaagttgggccctgggtacaggtttctgagagtgtctggaggggcttggcctgcccacctcacccctcctcccttctcccacagcccaatgccagactcctggcaccaaggcccggcccagatttgctctctcttcccattggccaggcaggccaacaaaaggttggctccccaatcagaaaaaagggggggtggggtcagtctgttttccttttttctatttttttttttttaaggtaaagaagtctattagggaaaaaagtattaacttgaataagcttttcgtgtgtgatgttgaaggttaaaacgtccccagcaggcagggacaggaggtttctccccaggaccacaccaggaaatgcactttagggaggggtgtgtgtgtggtacacgcagatcgtgtgtatgtcatgtggataaaatctccccgttccctcgttcctttccttactccgcagaaagaaaagaaatccagcgaatctgtttacattcccgaaatgccaggataaattgggaggattgcgtgtcagtgctgagagttcgagacagttgttttgcaagaaaagtgttggggtggacttttccttttcgcgtcctctagctttgccaggagaagagacggtggcccccacctcccaggaagagttggacaagcctccctgcctggggagggcgggccgccagctctgtggtggacacatggccagacaggcccaccctgcgggacccacggagggaggcgcggcggcgggcgctgctaggagcagtggcttcgcacccagggcctctccacggccaggcttggagtgtggctgaggaccacggctcggagctcggagctggggctagactcacccccgcggctccggccgggcacgggaaggaggggcgaggcggggttttcatccaagaatgcgcatcggaacttttgctttttccttttttttcccccgtccttcttaaaagcaaaagctataatttataggtcttttcgattcgcagtgttctctatttgaactcgacattcaaactccgccaaagggggagggaggagcgggagttgggagtggggacggccgcggcggggaaggccgtgcgaggcggcggggcctgggacgcccctgcccggcggacttgaccgctctgcgctccgaggacgcagaatgcgcgcccctcttttgactcaaaagcacaaatcagtcccctccactccacccccgtctcttggagcacggatcccgcagcctccctgccctccccgcccttaaagggccagcgaagatctaacttcccattgcttgttgagggaggggcgcgggggccctgcacgccagaggaagcacagactcggggggagcgaggcggggagtcgggggtgggggagcttcgcgtggggtggggggtgctgggagggaaccccagcctcgtcctccgcactcccggcttctcagcctctcctccagactttcttgcctttaaagagagaaaaggagggaaacggtgtactacatgattgtgtttgtttttgaatatcaaattgcgcctataaagagaagcccctggaatggggatttttatctactcacatttgtaaaactggtattttagactttgtataaagaagcgccgttgaccgagtgtatctatttaaatgtcgatgctattttcagatgaaacttcactgaaggggcatgtctgttacctagtggacgggactgggggatacgcgtcttcacctggccgccgccttcccttctctcccgcctgtcctttactcccacctccctcccttcctgggggctgactttgccccttcccttggaccttctttccagccagctctgtccctgccgcccctccgtcctgctgtttgtccgtggccgtgtgtgtatgtgtctccttctctcgctcttgcgacgctgacctggggggtgggtgggcaggggccgggggccacgtggctgggagtctgcaaccgcgcagggtgtgtgcgctgttgggtttatttaattctaagatttgtacaaatctccaatcgatctccgcctcagctcaagagtgaagcttcggtacctatcttctgcggtcgtgaatgtctgtatccaataccgctttttacgtgtttaaatatatactttgtaaatagagacatgtcttggttttattcttctttttccttccctgagcaaagggaagaggcatcccgggaggagaggatccgtccctcttctctcagtactcatcccgtcctcccgcccccatcctcgcccccatcgcgggggcaccgttcctgcaaaggcccttccccaactggggaacccacctggctgggatagaggtgggcgtgggaggccgctggggcagactcccctcagcccgtccgggggaatccgtggctctccgcacctactggctgcacttcttcgggccccgggcagaatctggggatcccgggaggatgcgcctgaggtcgggggttccactttcctctggcgggatcctccagcgcgccacacccccaggccggaggcgtctggtctccgaggccccggggcctcgccgcgttagccaaagcctcccggtgccagcccctcgtagctgtcttgagacccactccccagacccacccaaccttgctagcgctcccctaaatgcagagcctcgcgcctattgattgaggaattgaattcgcgggtattgctaggcaactgcaagctcggagccggcgcagagcgctgctgatgtgattagtgaacctggagccgccgcgccgcagccccgcgcacccccgcccccgagtccccgcagcctctccggcccaggtctcctgggcgggcctaaaccccagcgctgggcaagggacggtgcgggagagcagagtgcggggtggggggtggagagagagatgttcttggccttttctggccgcagacttcacagcagtgggggcggggtcttgaagcccgcacaggagagccactcttcggatccccaaagaggccaccgcactaaacccatttctacttccgtagtgccccgcagacgtcaccctgccaggaagccacgattcaggctcacccctaacgcccaccaggaggaacatggacaggggtagctcacgcatctccagccccttgctgaggagtcagtggcccggcccttggcagagcttcccccttccccagctgtgaccggtgtgggagggcgcgggaggacagcagcgtcctgctgcccaggcccaggttagcgggtcacagagccttgagtgtccttccgacgtgagggcctgcgctgccggccgagtagggtcgctggccgccaggcgtcaaagatctccgcccgagactgccccaccgcaacgggcggtctctgtgctggcaggggacgtcaagggaaggtgggtggggtggccccgcgatggtcgccacttggacggggctccctcctgcgtccactcggacggggctccctcctgcgtccactcctgggcgtgtggggcagtggaatgggctactgcttaagcggatgggagggcgcccaccctgcccctttttcgggttcgctggccatcaccaccctcggctttgaggagcgccctcacgggtttccatttcctgggcagagtccctgggaatccgccacaactgcagagaccaggcgtgcgtggcggcctccagccggactggttaccttgcgtcccgaggacagggctggcttgtgtggccaccgcggcggggaacctggcctcgcacaaacattggttggattggaaggttcatgctcttcctagagtgtcggatcggattcattttctgtccgtttgatgctggcttcgcaccaatcctgatccaggcactgtgccatgcgcccgggccgctggcgcacagacctgtcccggccctctggggctcctgtgctggtttcctcttctcctctaaaagccctccaggcccagaggagcctcggacccagctgaagtccgagactggcgtggctcggggcccggcgggactccgtgctgtccgtcgtggaaggcggctgcccgcagcctcgggtcctgaacgcggcgagagaggctgcgggctgggtcggggctttcctcctgagacttcggaggcggaggtggccggggtgcaggtggtgcgattgagtctcgggcaccctggagccgcggctggcttttccctcgtccgtccgaagggccggcggccgaccttggtgggacgcgcgcgccctctgcaggtggcggcgtcggcccgggtcgccggcgcccaccccttacccccggggggccggtggctttctggttccgaacccgagctgagaaagccttacctccccccgacccaaaggtaccgctgggcgcccaccgccacgggcgccccctctgcgtcctccctgaggcccggcgctcgagccacgaaggcggaggggaggaaggagaggtccagccgcccggatgaccgtcctcccagcccctccgcacccatcgctcccggtgccctcgggcaggtcgcggcggcgtggggtcgggccattggcagcccagtctgttcttctcagggtccactggattaggcgatcacatcagcggcgccgaaactaacaaaggccgagcgagctcggcccggcacccgtcgggccgaatccctgtagaaatgggctctcccgaaagcctggctccacatccggggccgcgcctgctcctgctcggccagcttgctccttcctggcggtcccagcccctttctgcagctctcataagccagaggacaggcccgctggggtcgcccttgcccactttctccaaaaggaaacagccagagccttgcgaaggcagcaaaagagagcccaccagcagtcttctttctctgcaacagtcgatttcgaattcgcaggacttcctggagcgggctagtgctgggggtcacatttccatttgcagggggaaccctttcctgaaccaaaacattcaggccttggccccaagtagcttttcacccagttactccaacatctaggcccagcttctctcttcacttcaaagaagctctattctccctggaggctggaattcatgaataaattcatgctgaagttggtggaagccttaaggagccggggaaggttctgtaataagcaaatcgcctctttattcgcgagctttgggttaggagttgcagtagctgctaactcacagtgactcccctggaattttatggctgcctccttgtaaagcattattagcacatgtggtggcttcaaggggttgagtggctttccaacacagcatctctggatactgtgggcgcggggagagggagttttattttaactttgcatgtcttttgaagggagcagtctcaaaatgagttgattatatattgcagcatccctgacctcacctgacagatgccgataatgccgcccctgcccccaacccctgccattgtgttttttctatttttcccattaattcagtctctcaaactcagcactactgacgtgctgggaaggatcatttctttctgtcatggagactgttctgtgcacctcaggacgtctagcagcactcctggtatccacccactagatgcaagtggcatccaccccacagcgtgacaagcaagatctccagatctgcaagtgttccctggaatgccagttgttctctgttgtgagccactggtatatggactcttaaacacccatcctttgcttggaaacatatctttttctgcaccctctgcaagtggcctttcccagtctttgatttttctgtgccccaagtatttggcctatgtccagacgaattattttgcctcaagaaaggaaaagagcagagtctactgtgtttccagggatcactcatgatgtacatcaggccaaattttttttttaaaaatttattgatatactaagagataacaaaaggacaaaaatcttctgacgccatttgctgtccttcccctgcaaaataaattaacatcagtctaaaagaagaaaaaaccctgcaacctatgctagttttccaaaaatgctagaaaacccacagaatcatgagatgcacttgagtaaaatctggtcatgtaggcactacctgttcccaactcaccattccccttccccacaccatcaggggctttttgggggaagcatttccttaaactggttgatcctaattaaatgtgggccctaggctgctgtcctgtttcaacagagatcctttcctagggcaataacatatctacttttgttctcttttaagaaagcaaacagccatagttgaaagcaattagaagtggcatacatgaatgattttttttttaattaaaaaacacaaatcaagccagtgattggctttggttcaaagcttgatcctcccctgaagtctccccttagtgaaagctctcggcccagagccctctccagctaggtcagaatttcgagtgtaaccaaaacaaggaacactcttttttggtacaaaatatatacatataaaaatatgctaacatctctaaggaagacagactggccactgcttcctattcaatacaggagcaaacaaaacgcggttaacacaccatttcacacacacaccattgccacagttcctgcgggaccttcgggaaaaaagcaacaatgcatcgtcagaagtgccagatacctagctacacaaacacaaacacacacacaaatagcagcaaataaaaatagaaaaagtctacttttatttattggtaaacataagacaaccaagtctgagcatctggtgcagttcccagtgacggcacttgccctgcacacgctcttgaagcaccaggaaaaacacacaacacagtaagaaggcaaagtggctgggagtaaggtatctgcagattcaaactttgggattgaagtagctggtaaacagaaaggcaccgaatcagggtctggagagacccggctgctggggaggaatctggcctgcccaggcagacagggacagacatcctcatttctccaacagctcctggaagccgagtcaccccaagggcttggagagctgttagtctggctttggagcagtgaaggtagcacagtgctcagcaggaaggagtcaagactttgctgtcgagcacagggaggctggtgcctgaggctcagcgtgccaggatccacgcctcctcccaggctgcgcagtgagctggaatctctccctctcctgtgggagcagctcttccccttactgtctgcttccagctctggcctagctatctgggactcttagcccttcaattcgccgaggtgggcaccattcctgctgcagccaatatggccactgtgggctggcccccagctggcatatggatggccctcaacgaagccatggacatgggtccctccccaaaggcacactgttaaaaagatccatttggctacaccaaggccacctcttcctatttggcacggtgaggtactggggggtcttgcagtctggtacgcctgccccccgcaaaccagagcccattctcaaagtccgggctgctccatggaatcaggagtgcctccctatagtcaggcactggaatgtagccccatgcctgctggcggactccatccaatcagaggaacagaaagcacccaccccaccctcttttatttttggcatcacaaagacctagtgaccagattgcctgccgctgccacctctgggctgccctgccttgctgcccacgctgctctcagaacagaaatcctgatactggtcagaagccatacaagctagctcccagacgtgaccacctagaggcagctcacagtcttgagttaacaggggcctcagggccgaggctgacagatccagcttcccgggaccctctaccaggcgggccccctagactttgtccagcttccccaatggcacaggtctagtttttcagctggaaaggagccaagcagggaacccctaaaggtgatggggattgtcagggaaaatgatactcctcaaggaatgcctcatccacttgggcagggccccacacaggacgtagggagttgttggctggacccacggccaacacttgcagcacaggcagagccggcagacgggcccatggacacccaagtgccagcactgctgtcctccaggtctccggggcagtctgtgggccataattagaatgaagccagtcctttactagcagaaggtaggtcctgggagtgaagggaggggcttgcctgccaagggtcctgcccactggactcccctggacctgagcacctccactttgggttttccttgggacacactgaactctgggctttttagaaatggaacatgcttcagtgggcctggggcaggaggtgggtctgggtttggaaggggactcaggtcagttctcactgggacacaggcaggagggagggtggcagccatagcctgcctctcctgctccgaggcacggaggctcttcaggtggaacccagctgtgggaccacccccgccccacccacgctggcttgtgggctatggatgctgccctgaactggggctagatggccatgaaggcagccttttagggctgctgggctcgctctactccagctgcctgccactgtcttttcacattaaggccccagccagcccccacctgtcaagggcaagctccccacttcatcactgccggctcaggcaatgccagccaggaccacccctgcccaccccatctcccaaaagctgtggccagatggagggaacactagtcccactggccatgcctccccacaatactctctgcccactccagggctgaaggcaaggtgggccagaagtcccctcctgacacctcagcccctgcaagacagggaccaaagctgtgattcagtcacgcaggccagggaggagcagttcaaactcagcaacaacgcagccatgaagaagcccgctctgttcaagacagtcacctggagccacaggtgccaccgggtttcctgaggcaagaggggagagcaaagaggcctgcagaggtaggaacaaggtggagaccaacaaggcagtgaggccccctgccctatgtcctgggacagagtggggtgcgggagaagtcccttccaagcctgcccatcaaggaggccacccactcctcctcccccgacccagactcttgagggggcttgggctgggagtcacttagccaagcgacaccataggcagggaaggggagtaagaccgcgcagctggtggcgccggggcttcagtaatgcctcaggttgaagaagcccacgctggtgggagactccttcactgtgacggtgatgaggttggcagtgacgtcggtgacaaatacgtgctcgatgaggctgcgggtgggcttccagtcctggctggtctgaacggacactgacgggttctgtccagtgctgggcggcgaggcggagtcggggtcggagtccgagctgctactctcctcacctgcgctcatctctggcagtgtggccgccttgcgggcttctccgggggctgtgcggctctcctgcccactgggggtagcactgcccttgacacagtccctcttgctggcaggggtgggtggcgccactgctctggaagctagcttctcacttttgcttgtgtcggtgggcatggtggccccgctggccccaatgaggccactcccagtgcccttcccaggggctgggttggtggccgggacacccttggtggcggtggcgtggcgggcaaggagacccaccccgggcatgccattcttgacactctgcaagtccaagacctggaggctcagctcctgggtgggtgctggctgggggcctgggcacccagcaggcaccctgctggcaccatgggtgtgcggggggccccctgtgttccccactttctgctccacagccccaccgctggg

SEQ ID NO: 119 - DNA, 1540 bp, Homo sapiens
ctgacgtcagcgggagagtattatggtctgtcgtgcgctggctgctgcttttctgctcctggaagcggcctaggggggaagcggcgagtcaacatggagctttcagcggtgggggagcgggtgttcgcggccgaagccctcctgaagcggcgcatacggaaaggacgcatggaatacctcgtgaaatggaagggatggtcgcagaagtacagcacatgggaaccggaggaaaacatcctggatgctcgcttgctcgcagcctttgaggaaagggaaagagagatggagctctatggccccaaaaagcgtggacccaagcccaaaaccttcctcctcaaagcgcaggccaaggcaaaggccaaaacttacgagtttcgaagtgactcagccaggggcatccggatcccctaccctggccgctcgccccaggacctggcctccacttcccgggcccgggagggccttcgaaacatgggtttgtccccgccagcgagcagcaccagcaccagcagcacctgccgcgcagaggcccctcgggaccgggaccgagaccgggatagggaccgggagcgggatcgagaaagggagagggagcgagagagggagcgggaacgtgagagggaacgagagcggggtaccagcagagtggatgacaagcccagctcaccgggggacagctcgaagaagcgaggccccaagccccggaaggagctcccggacccctcacagaggcccttaggcgaacccagcgccggcctcggagagtacctcaagggcaggaagctggacgacaccccttccggggcaggaaagtttccagccggccacagtgtgatccagctggcccgaagacaggactcggacctggtgcagtgtggtgtgaccagccctagctcagctgaggccacgggcaaactggctgtggacaccttcccggccagggtgataaagcacagggctgccttcctggaggccaaaggccagggtgccctagatcccaatggcacccgggtccgacatggctcaggcccccccagctctggggggggcctgtaccgggacatgggggcccaggggggaaggccctccctcatcgccaggatccctgtggccagaatcctgggggacccggaggaagagtcctggagcccctccctgactaacctggagaaggtggtggtcacggacgtgacctcaaactttttgaccgtcaccattaaggaaagtaacacggaccaaggcttttttaaagagaaaagatgaatgctgggtgggtgtgtccaggaggagagcaggggagagagtgagcgtgagcttggcatagtgatttttatttctgggtgggatgtggccttttggctggtcccgtccctgatgtcacccccaccccaccagcccctttcatccctccttcctccccctcagtttttgttggaaagattatctctagagttatattttctattagatgtaaatatgttatttaagaaaaatatctaaatatatatatttcaactcgaaaaaaaaaaaaaaaaactcg

SEQ ID NO: 120 - DNA, 1170 bp, Homo sapiens
atggagctttcagcggtgggggagcgggtgttcgcggccgaagccctcctgaagcggcgcatacggaaaggacgcatggaatacctcgtgaaatggaagggatggtcgcagaagtacagcacatgggaaccggaggaaaacatcctggatgctcgcttgctcgcagcctttgaggaaagggaaagagagatggagctctatggccccaaaaagcgtggacccaagcccaaaaccttcctcctcaaagcgcaggccaaggcaaaggccaaaacttacgagtttcgaagtgactcagccaggggcatccggatcccctaccctggccgctcgccccaggacctggcctccacttcccgggcccgggagggccttcgaaacatgggtttgtccccgccagcgagcagcaccagcaccagcagcacctgccgcgcagaggcccctcgggaccgggaccgagaccgggatagggaccgggagcgggatcgagaaagggagagggagcgagagagggagcgggaacgtgagagggaacgagagcggggtaccagcagagtggatgacaagcccagctcaccgggggacagctcgaagaagcgaggccccaagccccggaaggagctcccggacccctcacagaggcccttaggcgaacccagcgccggcctcggagagtacctcaagggcaggaagctggacgacaccccttccggggcaggaaagtttccagccggccacagtgtgatccagctggcccgaagacaggactcggacctggtgcagtgtggtgtgaccagccctagctcagctgaggccacgggcaaactggctgtggacaccttcccggccagggtgataaagcacagggctgccttcctggaggccaaaggccagggtgccctagatcccaatggcacccgggtccgacatggctcaggcccccccagctctggggggggcctgtaccgggacatgggggcccaggggggaaggccctccctcatcgccaggatccctgtggccagaatcctgggggacccggaggaagagtcctggagcccctccctgactaacctggagaaggtggtggtcacggacgtgacctcaaactttttgaccgtcaccattaaggaaagtaacacggaccaaggcttttttaaagagaaaagatga

SEQ ID NO: 121 - DNA, 25083 bp, Mus musculus
  misc_feature (4282)..(4772): "n" at positions 4282 through 4772 can be any base.
  misc_feature (18040)..(18567): "n" at positions 18040 through 18567 can be any base.
ccttcttttttgagccagagtctctccctgaacatggaacccactaatttcttactggctacaagtctctaggatcctctgtctctgcagccatgggattatagaagctgccaggtttttacaagggttccagggataagaactcaggttctcatgcttgtgtgggaaatactttactaactgatccaaatgtctagccgctggcctcttacttctcaaggggactctgtaagtagctgagatgcagagagtcagtgaataacatcgggatgtggctggagcatgctatgtagcaggaagcagtggcattgccaagagctacctcgagcccaaagggcacagtccaaggttacagtctgaaatacggggatccctaagcccgaagttttgcaaatactggagtctctcgattcggctcttcctgaggcaccccagtctcagccggctctagcgatgtcttgattggctggaagattgctgcttcttgatgtggtggtgattgcttccgaaagatggagtaatagcaactgctatcatttctgagcattttctaggcaccgccattgtgcaaagcgtttttgcacatattatcccaccgaccacccctataagatgaacaggcaacccagtgatattggccctgctctgcccccatccacttctttttagaacctccatgtgacagagaaattgaggttcagaggtgaagtaacttcccccaaatcacacaatggcgttctgtctacataactcccatgtccattctcctaagactcaaagggactctgtaagtaactgggatgcaaatgatagcagaggaaaagacggatctgatacacgttcctacaaaacctgatttgtttatcgctaaaattactaatagaacaaactggccctgaaaagtcccaaatgagtagacaaatggtggagcctctctcacttcagctcctccacagcaccccagtctcagccaatctctggaggatgtcttgattggctagaagtcagatgcccatgacaactgaacatttaaagaattttccatgtgagctgaaaccatattagaagagagctttatttccgtgactatcgcaactaacaagatgtatgttgcaactcagcttccagtgattaaaacaagaacaaaagtaaattgaccttgtaagcattctccccgtgtgacacttcactcgtagcagaagtccactgtagcaaaggcatgtagtcatagtcacgtaggactcttcttccctggaaaagaatgtacttgtaaatgtactaagaagaaaataaaaggggggttccagtgaggaaaaataacctatctgtggtcatgtttatcacgcagactgattcagacttctgacatccttatttcagaaggaaagcttgggaatgtctaaacttccgggtatttaatattttgagggtagaggagaaggtacagtttagtcttgctgggtagggatcaaacaaagatttctttagctctcgttctacacattcgaattgcctcagagtagctgaatcttgcctgaacgtggcagttactggatgctatgggaagataccgtaaggccatgattgctttaaaatcactcataataaaaagacataaaaaacacattttgaggcttgattctaaatgttatacttaaatttaggcgacttaattgcccatagaatgggaatgaagtcccaccagtaggcagtaatttcttacagccatggtgtgtgaaattgaaatcttaagatatcatcatatcaaagacgtaccttctcaaagaaggctccctccaaagagttgtgaaagacaagaaattgacccaaagtcatgaaagtatctccctccgcccccttagcacactcaggtcaaagcaaaagcacaattggccattccaaagttacctcttagaatccaaggagatatttattttaataactcattccaatgctatgggaaattggagcaacaacaacaacaaatacacacacatttaattacagatccatgggtcacatgctgggtacatagttatatatatgtatatatgcatacatatgcatatatatgtatatgtatatatgaatacatatgcatatatacagatatacatatatgtgtatatatgtgtgtatgtatatatatatacatatatatgtatatgtgtatatatatatatatatatatatatatatatatatatatatgctcccatttcattagagatccatgtaccacatgatgggtgtatagttccatcaatccttacaccaaaccctctagttagtaaatcccattattcccattttactaacaaggatgctgaaagtgtaaattctgcttgttcagctgagttcacatgatggtaaaagggaggttacaatacaggcaaactcctcagccactttcttcatgccgtatcttgaaggtagttttcctagtcacatgagctgataagagtctaaagcaaccccaggaaatatggttctagtggctcggcattaaaacatcattattaagtagatatactgctaatcacaacccgtgtgttttcattgtttctttttcttcttttggttttggttttgagacactgtctcctgtagcccagactggcctgtgacgaactttgtaggggaggatgacttagaatccctaatgctcctgccctgcctgacctgggattactggcctgtgctaccactaacaatgtttattttcacttcagatagaaatgaaagtagaataacaagttatgtatttatcatataatttaggcttgcctaaacattgtaaaaaatttgttttttaatttagaaaaactaaggacttaaatagaaaatatctttttatacactgaaggtgggttttggaccaacacgagggcaggcgcacaaacacagattttaattattccctttcagtatacgtgtcaggacatggagagagagggaaatgacacgaatctgtgggtagtggttcaggctattgctagggagaaatcagggaggactttgctcagtacggggaatccgggaattcatttctgactatcatcttccggggtgagctggtctaggttattaaagcaatctttaaattggggctgaaatgcctatgtctttgatccgggctgttcttactaaacaatggattctgagagcactcgggactttcctctttacaaacctgaagactgtcatcatcataagctaacgggccttgaacgatcatttctggactcagtttcaaggaactcaaggcccagggggacctaggtttttctcctgaaaagtagctagctggaatccatctcttcccttctgtatttctttctccttctagaacttgtcttcaagcttgaaggagaaacctgcccttttctttgttttatataagacaaaataatagtaagtaataactgaaagtctttttatcgggaaggaacttcctccggtccaagcaagtattgctgctgatactttacagagagggccagcctcaccgctggagttcgctctttgaaagaggctaggggagggaattctgccgccagcagatggagaggagacccggacaacgtggtccctcccagacaccctccctgcgggattagctgcccccagctctgctcaggcgcacctagcgcgtgaggttcctggtcacacagcttgcgcccctctctggagagcagtcgcagctactagcttgccgccagcagagccgcactgtctcgggcatcgcagagcaccacgactgtggacttgggacctcgaacccgagacgagcgcgcgctagccagccattagcaacgcttgcatttctgcaggtgcttatttcacattcttgtcttttctttcctgctggaacgggcgagtggttactttcagcctgaggccaaagggaaaggcagaagaaggggaactctgaaaaagacagtttagtggcagcgggattcttgccccaggagaggggctcaggggagactctcggtctctgccgcgggcccctttaagaagccaagtcagggctgccgctgtcgccgttgctgctgctgccgctgccgccgccgccgccgccgccgccgccgccgccgccgctatttggattgctaatccccaggagccccgtttaaaaaaaaaaaaaaaaaggaagaaaaaaaggggggagggggcgggcagctgtctctttaaatgtgatttccttctattgtatttgaatcgtgatcaggaaaaaggaaatgaaaccagagacagagggaagctgagcgaaaatagnnnnnnnnnnnnnnnnnnnnnnnnnnnnnnnnnnnnnnnnnnnnnnnnnnnnnnnnnnnnnnnnnnnnnnnnnnnnnnnnnnnnnnnnnnnnnnnnnnnnnnnnnnnnnnnnnnnnnnnnnnnnnnnnnnnnnnnnnnnnnnnnnnnnnnnnnnnnnnnnnnnnnnnnnnnnnnnnnnnnnnnnnnnnnnnnnnnnnnnnnnnnnnnnnnnnnnnnnnnnnnnnnnnnnnnnnnnnnnnnnnnnnnnnnnnnnnnnnnnnnnnnnnnnnnnnnnnnnnnnnnnnnnnnnnnnnnnnnnnnnnnnnnnnnnnnnnnnnnnnnnnnnnnnnnnnnnnnnnnnnnnnnnnnnnnnnnnnnnnnnnnnnnnnnnnnnnnnnnnnnnnnnnnnnnnnnnnnnnnnnnnnnnnnnnnnnnnnnnnnnnnnnnnnnnnnnnnnnnnnnnnnnnnnnnnnnnnnnnnnnnnnnnnnnnnnnnnnnnnnnnnnnnnnnnncgcgcccgcagcgtgcccttgatccctccgtctcccagggttctctttcctcgcgggtgactctggaaacaccgagagggactgggcggcggaagctgtaactgggatcgaccctgcggaccgctccgggctatctggaaagctccccaaacctttaccagggccagaaagtttgcccaggagctggcacccggagctctgaggcacaggtgcagggcagggagagtggaggacaagattctgccttctcccttttcgtcccaccctctccaggttcccttcctttttgtccatttggccttggaaaggggggcatcccaactagaacatcccggggtctccgacgtcgactctcctaccaggcccggagtagagcggacagttgatgaggtccgcttgtccacctgggaactggttctggcctccagagacttctagaattgctaatctgtcgttcctcccggtacatgttcgcccctcccctgagtttcctagtgcgggcatgtgaacctcgaaagttagtgcacatttttttttctgtctagtatgtttttctagggagcagaatctcatcgaactctcagaagggctgtgtgtgtgtgtgtcagcgaaccagagctttaatgagcatgtactgtctagtgctctgagctttgcgctggtttgcaaagaacagccccccctcccttccccattccacagcctgtaccctcctagcccattctctagccttaacaaggggagccaggaacgaaggtatcggttttttttttccacgtccacacaaatgcccttttaagagtcattagctgtctggttttgagtttttattcctttgaagtcctcatctaatcctttgaagggatttgttaacacaagaccaaaggcactgctaatgacttgtccgtttgggcttttaagatgcatttgttttggtggggttttgccccccttttcttttcttttcctgctttaaaagaattgtgctttcctgctggagttttcctattcacccccccccttcaatttcagccttctgtggtgtttatttacctgggctttaccctcagccagcagcataaaaacccagcgtgttctcataaaacacaggaagtcccacgatccagcaagaatataaacatcactcttcagtcttgaaggttaagacactagctcagaaaggagctaggtttgttggcaagaggaccagcttccttaaaatctcaggagagaaacaacaaccctttaaagagtcagtgtctatagcttgttcccttttaagcataagcttagaattacatctgggccccgagttttcagaaattggacaagacataagattacacagttggggaggcagtctggtgaactgctgtttactggctccctatcagcacaacctaaccactaatcctttattagatgttgaatctacagagtttggcttcttaaaaaaattactaattacatgaatgtgtgtgtgcacctaagctcaggtcccctggaggctagaggtgaaggatctccctagagtgggagtcacaggtagttgtgagccatctgatttgggtgtggagactccaacttgggtcctttggaagaacagaaatcatccttaaacagctgagccttctctccagcctgggaattgtgttctgtaaaggaagtttactcttgctaaagttggtgccttttattgcctcagactagaaaactgaaaggtatctcatagctgtagtagtgagcacctacctagttcaggaggtccactggtagttcatctttcctgcagtatgtgtccggtaaaggaaggctgtaactgaagatggacaagccccgtgggaaatgtctgtggaacatttcccctctttctgggaaattgttgagaaatttttgccagaaaatcaaagctaaagagatactcaggtgtcatatttgggacaggctggcgggagaatatcaaatattaacttaaggtaaatctcatttagtctttggcttgaattgttcaacagaggtaatggcatgtcattaattatagaaagatagaccgagtccgaatcttgtcctgtctttatctgttgttctcagaccctcgtgtctctttctcctgcaactagctctcctgccagcggcctcactgagtgcttgctcaaagccagcttgggtctttaccagcttggatctccagatgcagatcggtccttgcctaggcacgtgcaaaggtagcgtgtgcacaggaagccagtattcatgaacacagatatccttcaccatgcaattggtgttcccttctgcttccctacaggtcattttaattctagcgaattttgttccagctaagtacagattcttctctttcaaagttggctgcaataacatccaccctctgggcatcaagcatgatgggagttctgtgagtgtttttgaaagcccactgtaaaaccttgagctatgcaaaggatggagattagattctgaattggtgcacttgaataggccaaggatcttagttaactttcaaatatgaggatggatgccttatatataccctatagaaacaaaggctctagtaggaacctgacagggtttctctttgtagttctggctgtcctgaaactcacactgcagcccaggctggcctcaaactcagaaatccacctgcttctgcctccagagtgctgggatttttaggtgtgtgccaccactgcctggcaacttctagtgtattattaaaacgatttaaggtcttagcccacctcacccataattctgtatacatgagagactggggcagaagaatggaaagttccaggacaacctgggcaatttagtgagatcttgtcttaaactttaaaaggaaggaaagggttttcgagctgcctcagctgctaaaggtgcttgctctaagtctgatgacctgagtttgattcctggaacccatgtgaagggaagagagaaccggaatacagctcagtggttaagagcatcccctgctcttacatgggacccaggttggattcccagcacccatactgggtggctcacaaccctctgtaaccccatctctagggtatctgaggcccatggccttctggggcacctgcccttgtgtgcatcttcacccttcccccccccccccacacacacacatacaattataaataaaaataaacctttaaaaacaatataaacaaacagaattgagaaagaagtcagtggtggagcacttacctaaagcgactagggacctgggtttgatcatcagtactgaaacaacaaacaaacaaacaacacctaaaacctgacttgatctttgtttttctcaaagaaactgacctgagcttcaaacttcctggttctaaaagaagatactcttatattttgtgctaaaatggtgggtttggcattagcatttagctaaatattgacaacggatgcttaatagtctcctagatagggtcacctgtagatgctggagtgccctataaacactcattccctgagtctcactgtccccaactataatgaagctgggcttcatgggtacaggccaattacgccacaaggtcatttggtaaaagtgccaaataaaactaagagacacagacatatcacctagggtactcaggaggaaattccattggagatttcataataggaataaaaaccaattaaaaaaatttttatactagatttttttaaaagcaggttttatttgaacagtgttccaggaacacatattacaaattaacaagcattaagtatcccctgtctcctatctgacatcacattcatttcttccatgccgttttctctcagtaaagttatttcttacatgtaaaacaaaagtggtcaggttccagggaggcaaagcaagcagaaggccctatgtgtgactttaaagcaaatttttacattagtgtgtgtgtgtgtgtgtgtgtgtgtgtttatctatgtgcatggatagaacagcctgctgtaattggctctttctttccgctgtgtgtgtcctggggaccacatcagatcattgggcttggtggcaagcaccctcacctcctaagcatcttgtgatcccctacataacactttttaaatgaaagaacacatccctcaggctcactgtgaacaccgtgcctggattgagactttggtatcaatttaattgccttccactctcttttaaatccattgtttggccccctcctccactctctttactaatttgattttattcaaactacttttgctgtggtgaaaaaagtttgaaggaaaaaaaaaaaccacatcaccactatcctctgtctgtttaagagctgcatcgtgacctagatttcctgccagagtcattcagatcttgtacttctttgagacagtgtctaacgcagcccagagcctccggatgatgctgataaacttgccatcctgctcctccaggttccacctcaggatggactgggtgtatgtccccactttaggtggtactggagaaatgaccgttgggcctctgacatgttgggctgtctctctacctatgaaaccgaatctccatccaaagactcatgcaggatgtatggaagaatgcagaacttcaatcggaataatcagatattgacggaactttctgtttggggaagagaaggcaaccaaatataatttcgatggctttcttccttctctacctttgattctgtgcagcgggaaggtctttgtagggtgcattcaacaggttatctgtagattgttagcacactggggggggggggggtcatcagatgctttggctgtgagcaactcctttggtcccaagtctattctttgggattctttggcagtgcctgtgtccaaagaaaaaagggagggagggctgggaagatggaggagagtaggaggggaaggaggaagaagcagattggatcagaggtgcctgcagagatgctggaatgtagtcaagggtccaagggctatctgtaggtgccttggacacctcctggtatcccgtcttcagtttttcagatgataaggtctctctagcccactcccgtctttatccaaggttgtctgtgtctatgcagtctgaatttgggcgtcctttctccttatactgctggaaggaaatgtagtgaggttccccatagaaccttgggcatgcagtgattcctgggactttgtgcttgtctcccttcaggcagcatatcctaatgcttggctcttccccagggaacccgtggatgaggtgctgcagatacccccatccctgctgacatgtggtggctgccagcagaacataggggaccgctacttcctgaaagccatcgaccagtactggcatgaggattgcctcagctgtgacctctgtgggtgtcggctgggagaggtggggaggcgcctctactacaagctgggacggaaattgtgcaggagagactatctcaggtatatccctcacacttctggggcacatccggggttggatacatagtctctagctcctgaggtgtctgcctaaggggcctaggctgtggaggctgagcttcagctgcctcttcagagaagccgtgagttcttcctctactgtggctatgtttgcagagacacatcactgcatggtaaatcaccaatgtttttaaaggtaagagaataaaaaacacggaattcagaataaggacaaaattctgggggtgggggcagaccaaaggatagggtttggagaagtgtacgtagggaaatatccagggaactaggggaagagagaattcatttataagtttcttgggtgggttctcatttagtactcaataagcatatgcatatgtgtagatagtctttttgttttgttttgttttggtttttggtttttggttttttgagacagggtttctctgtatagccctggctgtcctggaactcaccttgtagaccaggctggcctcaaactcagaaatccgcctgcctctacctcccaagtgctgggattaaaggcgtgcgccaccacgcccggcatgtgtagatattcttttgcacaactccagtattattgatgagaacttttaaaatagcaatgtgtccttgctagtgagcccccaagcgctgaatttcatagcaggaggctagccttcagcagctataaaggtgaagtcaggaggtttgagtcactactccattgcttcctagtgctggccttgggcaatgcacacaagccttcacgtcctgtatgtaaaatggggattgtaattgtacttacttctaaagttagaatgaagtacttgaattggtacataacttaagaaataggtggtagctgagtttataattgacaggtaccatggtgggatcacaaattattttccattataatggacaaggagatggtaacatggaaggcagaaatagaaagtgtacaaggccaagcgagacagaaacatttcccctgaatttgtgtgtcctggcacccaatgagtgcctttgtctggcgtgttctagcatctctagcttctatattagctgcactggaggtaactctgtaccccgtactgccagatccactcaactgttcagctgtcagttcttcgccatcctcctgtggcagaggctccactgagcgcgcagtccctgtgtattagggccagccagccagcggagagaagctcttcagactccagtgccctgggctgctaagcaggctcttccccctgcatgtgttctcggggcactgcacatgtgaaataaaaacaaaactgctggtccttctgaagtcaaaggaagcttatctgtccacccaaagactgaagtagcgtgcttagtctttgattgaaatcattgcagatgtggtggttttgggcaaatggaaaagagagcaagtaggtctgactgtcattttgttgaatttctttcttccttttttttttttttttaagtcataagaaaatagaacagagataaatacagacctggtttttactcaccccaggcctgccaggtccatcagaaagcagctgggtaaatgactcccgctgggctcctgcctccatccctgttgaatcatttgaatcttattaaacgaagtcagattcagtgaggtcaaaagagccgattcctccctatctccccggttttatagaacattcaggaagaaaggcggcgctgcctgggcttgttaatcttttccattttcaaaaaggagaagggaaaaaaaaaactagtctgggagagcccagtgttaattaacttgtgtcttggtgacacgaaataattcttctccctgctacattcccagacaacatgttaattaactctgcattagcgcaggcgttcccagccatcctttaatatttgtattattgttattaaaatgggcagcagaaagcttaaggctctgacgcctcttgacagcggagggatttctatttcgttcagggatggtccattagccatggatttctttactttagttctttggcatatccagagctattttatcaggataagttcagagtgactccgagggtcctccaaagagacccagtccctatctatgcctagaacagcttctctccatgagggtcttgaatggacaactcttgtctggtctttttgagacattcaacctcaaatacccaggaccccaccaccacccctcatccttctctcatatacaactcagacctgctactgttgcattgtgttaagtacacagcctggatccccttagatccaattttctcgaacttttatgtagggcaatcccctttagcctatggttctgtttcaacagctggcacctacatctagccagcatctgttgtagccagaactatgtagtctcaccagatcctggtaccaaagacaccccaattcctgcagcttaggggggagccaaggctacttggagacaggacttatacttcaggagtccccagacatcaggccaaagctcccactgaggctgggcacctgagattgcttcttgactccctcaccgttttctcacttaccctgaggacatcataaaccacttgaacataaatcctcccctgtggtctgttcctgggatacccagctaagatgaggattctgtgagccagaggttaatgcacacattaacggccaagtgctggccggttttcatcactgttagcctttccaagtccatgagttggggtgggctgccaagacctctgcctccagtctcggcttacagtgtaagcacatgagccaggagaggacatgtcattttcttgggtcacctacctagttagagattctgggacctgggcttatctcccagacatcagtcctttgtcctcccgttagctgcttggtgtgttgtaatttgcccccgacttccctttaatgagctcccgctttcttaaggtctacacctcaggcactcagactcatttgccgcacactgttctctcagtcgtgtgtctctgctcagccccaaacttaacttactcaacagtcaggacaccaccagaatgctctttctgctctgtgacctccgatggggcatttgcctacagcgccaccgtctgctctggtaagatagagtgttctcccccattgacaagtctgcttccagcacagaaagtgggatccagaacagagatgacctctgacctcgctgcggggagctccctctctgctcactggccctgcttacaggccatccattttggccaaatgttgcaggctttggtggctgtccttacctctcctacaacctcttaggatgcaccagtccattctctcatttttttaagttggtacagacttctaaggagagcaagcatttactggaagctacgtgcagacatgctatgttacaagcactatgtaaaaaggaccctgctgcaacagttgagagcacacctggaatgtgatcacatagccagagttggctcagtcattgacctctgatactctgacacgccctacatgtcacactaacatctaagcaaggtagatgatggggttgccaaaccaccttctggtcctcatgttcttcttccaggcaggcttgttttcaaaagttagccatcactagatcattagtacagtctgctgagccttctcttctgtgtctctgtcaggtgtagagatagttgggaatttctgtttctaacaagttcctggatgctgccagcccctgaccggctccttttcaaccactgcagtgactccaaagttgcctcccacacctcaacactaagtgtcgcttgcttaagtgactgatgctagggagaaacttgatttagttgtgaggaaagtcacctctccagagagtcacgctgagtgggcaggaggagcatgaatgaagagccactgtgcatcatggagagatcctgtttgtcctctgggtctctgaggcatgattgtggcactacttgtctcccgggacacccctgtctcctggcagctgggctccagtgaatggtcatgtggacatggaatttgcagcttgacgggtaggaggtgaatcaaggcacactccccaaaaggggaaattagtggctgttgacatgagagtgaattcctggtgacccacccgtccaagggctggccccagctcctcttctgcagccagagttcctctaggaaagagacacagactacatgccttacttcttacacgtcacttcatctgcttcttttccatagctggtccacacagcctagaggcatggataaaagtagggaaatgcttggggaggcgaggaataacagcaagcaaaatgtcatcgtgtctcccccccccccccagggaaggattcatgggctattaattgggttcatctgtcttgcttatctgtttttatgtttagatagcttattactgtgtatcccggtcctatgtggaccttgccatcttcctgcctcagcctcctgagtactaggattactgctgtaatccactgtatccgactaggtgcagcattgcctaggttttttggaaacctgatagattcacatcagtttatcatctcacatcaatctatcatcgccagccgccatctttctgttgtccccgcccctgtctcttagcgtttttgtctctgttttttttccttttcttttcaccccaggctttttggtcaggatggtctctgtgcatcctgtgacaagcggatccgtgcctatgagatgacgatgcgggtgaaagacaaagtgtatcacctggagtgtttcaaatgcgccgcctgtcagaagcatttctgtgtaggtgacagataccttctcatcaactccgacatagtgtgtgaacaagacatctacgagtggaccaagatcaatgggatcatctaggccagagtcccaggcacctgtggggaggtgttcagtgaagacgccgtctcggtgtggtcttcactcttaggctctttgggaacctgagggtgggtgaggcatttcttaggagattatggactcttcctgggcactaaagacatagcaatcacatgacataatgcaaaggctgagacttcagtgacaaaaaggaccagcccttagagagaatttatggtcacaggctagccatagtaactgacaagattagtggaggaaatatttggggaccagcatgcactgtgccatcctgataggcttccccaggtaactatcgattagatgtgaccttggtgttcatggactagagttgtgcaattaattttttcctggctttggtaactaccctgttctagtcacagtccttcacactaggaaaggaaagagagaagaaatagtcactctttttttctttctttcttttttccttggtcaccttcccgtggccttaagctctggagccaagggaaactgcatggaggtacatttcagttgggaatgaaatccacatctttcaaccagacaaatatttatagcgatgttgatgaatcactgtttttagacaccttcattttgaggtgaggcgccccacagattgtttctatacaaatgtaaatcttaaaaaaaaaaggtcaaagttgttcaactattttattatcttagattatatcaaagtatttgttgtgtgtcattaaaaaaaaaactcgattctgaagacttaataaaaatgacaagctgaaatgcagtgctgttcttgatgtgaaatgacttacaggttgggccagcagggaaatggtttgcttttttttttctctttggaaaggtgaagtcaatacacagtttatttctaggtcaaataaaagcttccatttattgcaagggtttatatgaggtttatataggtttctgtattaccagcaattatgtaacaggccatcacgtagctcagagggatatagaataattaagttggtattgtaaaatgtgcatttcacgttggcattgtgtggagtgaggggaaggcagggagagcattgcctttgggaaacttgtaacctagaaagcacacaaatacataaaatagattccctttgggagagaaggtaattacctggcttgaaatgtggcaaagatgctgagcctgacatttctattttccaggatgtgtgtctcagggtgttttatgacaagtgcttaagaggaccttactttgaggatttaaagctggccccttggcttgttgtgtccctgcacccccatcgggggcgttatctgacttcaagcgccacctgctggtcattcctcaacccaccagcccaagggtgtcccagggaatgacaaacctccatgaaggatatattttcaattatttcataaaaccgttggcaaacaccagtgagtctagatgtgtttaattatcaagatgtcagaagcatgcagctaaagctatgtttaattaacttgaaagtactttaacgtctctgtcattggagtttatttttccctctttaattctagagaaggaataatgaagcaatgactgactctcctggcctgtaaaatgctcaaagaggttgggagatctgactgcttaaggtggcctatttaaaacaaatccaattatatcgtaccacagcctaggtggcccgcaggtgctccctcagagggaatgtttgctctaactcagcagttctcaaaccaccgtccctgagcctggttaccagcatcagcatgaacttgctgggaacagacccagcccacaaggcacacagaagcagaaactcagcagggggctgcctgtcctggaacagacctgggggtgactgaagaacagacctgggggtgctctgaagcttaaaaatggctgttttaccacaactcccagctagcaggatcacacgctcgaagttgttactattcaggttagtatggttagtattttggttaaccaccgaggaactcacacacgtggacaaacactgcttaccaaagggccggaaactgagactgcaccttgtttggctaacagctggctcatccttcatctgacacacttcatcacaattcagtctaacatttttaaatccatgctcttctgtttaattataactagtcagatatggcagtgagcttacaagagtggaggatccctatccaaagactaacatgtcaggcatcctcactctccctggagagctagacacaggatgagcgtgtgtaaagaaggtacatcgtggagggctgcacctgtatttccatcacgaacgaagccaaggcagaaccagccttttatatttaatcccgttcttaagccgcaagctgctgccgatatgtgatttgtatgttcttcttccgcataacacataaattaccaagatgagcccgctggatcctagcaggtatttccatttgagcctgtgcagatatttctaatccgtacaatacctgttctgttatacatcttgcaagtatatgtgtgttccaatttatgatgttcaaaattgaaccaaagccttcacgcgacctaggcagatgctatagaggttagcctagtgttttaaccacgccagcagcgacagtaatagtaattattgctatgtaattgtttttcttggatttttgttggagacagagtctccttgttgcctagaatagcccagagctcactatataaccctggctgactctgaacttcttactcctgagtgctagtaacatggtcatacaccaccacgcttggctaaacccagtattaaataaaatgatctctgcctgggtaatataaactttattgctaaccccagctataatagtacaactcatattaagatttatgaggtaattagtccagatcgtcaccattctaacaaagggatctctgataccaccttctctctctctctctctctctctctctnnnnnnnnnnnnnnnnnnnnnnnnnnnnnnnnnnnnnnnnnnnnnnnnnnnnnnnnnnnnnnnnnnnnnnnnnnnnnnnnnnnnnnnnnnnnnnnnnnnnnnnnnnnnnnnnnnnnnnnnnnnnnnnnnnnnnnnnnnnnnnnnnnnnnnnnnnnnnnnnnnnnnnnnnnnnnnnnnnnnnnnnnnnnnnnnnnnnnnnnnnnnnnnnnnnnnnnnnnnnnnnnnnnnnnnnnnnnnnnnnnnnnnnnnnnnnnnnnnnnnnnnnnnnnnnnnnnnnnnnnnnnnnnnnnnnnnnnnnnnnnnnnnnnnnnnnnnnnnnnnnnnnnnnnnnnnnnnnnnnnnnnnnnnnnnnnnnnnnnnnnnnnnnnnnnnnnnnnnnnnnnnnnnnnnnnnnnnnnnnnnnnnnnnnnnnnnnnnnnnnnnnnnnnnnnnnnnnnnnnnnnnnnnnnnnnnnnnnnnnnnnnnnnnnnnnnnnnnnnnnnnnnnnnnnnnnnnnnnnnnnnnnnnnnnnnnnnnnnnnnnnnnnnnttcctctgctctgaagcaacttcttccattgcacctgcacctcagcctgtggttctctgggaagcttgggttcccagggagctggatagagcaccaggtgggtggcttagcagctggaagtcttgggttctaattacagtgacagaactccttagtattcctcctggcgcttcctgggccagatgctcacccaggtcttcctaacaattaactccttgaattcagcgagccctccccaaggcttctgccccttgctacctgtgtggtactgtggaggaccttgaagccccggcaggctaagccacttgtctgaggttctccaacccagcaggggtaggctgctttctctgctcctctcaacccagtgccctgctgccggcccttcagcctcatctcgctacagaaagatgaacggaacttaagtgagggtttaccagggagtagccattttgctttatgatcttatgaaggaaagcttgtgtgcccatacacacatatcctgagccagcaacatgactgagtttatattgcaaatacatattgcaaatagggggaggggagaggacagggggagggaaggtagtggtacattcctgggaaggctagagcaccatctccttttatcctggtgtttccagatcacccagctgacaaggaacatgctgatgttatcaacatgacttttgactctcctctaagtttccccagcatttattgcctagcgtgttttattttccacactgttccctaatttaaaacttcatttggtaaggctggagcgatggcccagtggttaagagcactggcttcttttccagaggacccagcacccctatgacagctcacaactgtatgattctagttctaggggatccgacatcctcacacagacatacgtgcaggcaaaacaccaatgtacatgaaataaaaataagtttaaagtcaacaacaataacaacaacgaaacccatttcatttgggagaaaggccctctctccagataagcgaactcaaggttctgagcccctggataaggtcactcactctgtcattcacttgctgttgggcctcagacaagcgagttcacctgtctgggtctcagtttcctcagtaagtgacaagaagtagaaacgaccacagagggctctaatatgcttctgagtttgtgtttataaagctcctagcaccacaagccagagttacacgtgtggaaaggagtgtttatggtatatactgagaaagatggtagctggtgagccaatttatagggcagatgggcttttctgtaattaaattaattcgatctgtttatgtattatatgtgcgtgcatatgcatgtgtacacatgtgtgccacactgttcacttgcaagtaagaagtcaagtcgttggagctagttcttgcctctgccatgcaggtcctgggtcaggctcagcagcaagcgttgttacccactaagccgtctccatggcccatgatttgttttggggtaagggaaatcttattctttgagtatcttaaagctttgaaagatagtgaaagtctgtgaaatgttcagactaaataaaggctcaagagacctgactactgcagttctgttctgaatccagtagtcttgggtaagtaatgctacaaataaataaaattaattaaacaaacaaacaaacaaaacaacagcacagcattagggactggggaaattgttagtgaagcactagctaaatggttctgagacccgaacttggttctgaagagcctgtgtaaaagctgggaggggctggtggcttccctgtaatctcagtgaatgggaggtagaggcaggagagttctcagagcaggctgcctagctagactagcagttaacagtgagctccaggttcaagggagaccctgactaaacattcaaatagagaatgatggaggaagatgtctgatgtgctgagtagtctcatgtcagcttgacaggccagagtcatctgagagttggaatgaaaatgagagttgagaaaatgcttccatgagatcaggttgcaggcaagccaggagagcattttcttaattggtgaatgatgtgggagggcccagcctattgtgggtgtggaccctgggctgatggttttgggttctacaagacagcaggctgagccagccatgaggagcaagccagtaagcagcacccctccatggcctctgcatcagttcctgtctccaggtttctgactccagtccctgcctttgcttcgcatggtgaactgtgattcaggctatgttagccaaataaaccctctcctccccaagcggcttttggtcacagtgttttgtcacggcaatagtaactctaactaagtaatccatcttcagtcttaggccttgacatgcatgtgcatgtgtgaccctcttacacacatgtatcctcctaaaacatcattgggttagatgagaaagttggaacgtgaggaggcatattgttgaaaaaaatgtctcataaattacctgctgaagctgatagctatatcgtgggtgtataagagcaaaaacatactgaaatatctaggaatgaagggccataatatatttatttccaaatggttgaagaaaacatatgcatgtgtaggagtgtttgagagaagagagagtttgaatgtgtatatagagatagagaggaaatggtaagaaaatgggggagaggagatgtccacaaaaaggttaatgtaggcaaataatagctcagtgtgctatttttagtcttgaatctttttttctctgactgggaagaccaaataaaaagttctgctttgattttaaggaatgttagcattttcttgtttgggcttctggttcaattgggggaagaagaaggcatcagaaaaaaaaatcccagtttggaattcagtggctcgacagtgttcattcatgacaatttcaatgtatagttggctttagaaataatctatgccaggaatgagtggctgaggcaggaggattgctgtgtgtttgaagccagtgtgggctacagtgaaattttgtctcaaaatccaaacacatctaacagaaacaagagttcctgcaaggcagtggtggcgccacctttaatcccagcacttgggaggcagaggcaggcagatttctgagttcaagtcctaccaatacttgctgccaccaccacacgtagtgactatggtatctttaggaggattcgtttagtgccaatttctcaggctatttcttataaaatgaacttgctaaaattctcaaatttcctttgtaattaggatccaaatttcattatttgactggggaaatgtgtgtattaaggcaagatcacctctgcttgtgtgtcttagaactgacttaaaacgacgtttcaaagcactagatgaggctgctctctaccagtggctatgaattaattcttcattaattaaaaaaatcattcctacaagcaaatagaatctttgaagctcaatcaagttaattttcattgtcgaattgtgatgcctttgaacttggcttattgaattagcctattggatggccaccttgaagatggttctgttggtgactctaagcccagcagcctctcagtggctcaacgtcccaccctgtcccattcatcttagttgcttaatgagcagctacaggcaaacactccctttccgttatatagtagctaaaagagatttgtactcaatgtaatagagacaacattgaaatcaagaatcctgatgttgccactaatgaggccgccagctctgtttcctcatttgcaaattgagggatttagatcatctctaggaatctggtattcacgtttcttagaaggtattattttattttacatgaatgggtgttttggctttgtgcatgtttgtgctccatgttgaaacttggagactgaggaggccaggagaggtcaataggtctcctgaaactggagttatggattggttgaagccaccatgtaggtgctgggaatcttccaaaggcaggtcctttggaagagcagccaacactcttaacttcttaggcatctgttcagcccctagtactcagaatttgctttacagacaggcaagtattcaaatgaggagcaagcatttgctggcagttggtctgcaagatgccctaaagatttttgttttctgcgtttgagccgaatgaagtctctgcccacaccaaataagaataatatgccaaagatatagcaaagttgatgaactatgacttcgaagaccagttcacaaagaccgtgtgacttgaacattgtcatttgctgtatcatttattctggacttgtcaggtcatagagaccttctaaagccccacatggaaggaaatccatgtccgtgaagagtgactgcagcaacctgctctgccaacactcatttaccaatcttggaaatgagctacctagaaagtgcatcctctctgcccagacaaactttcagatgactgtagtcccagtttgtgtcttgggcataacctcccagcacgtcccacatcaatgaactaagctccccccgaattttctgacccacagcagatgtgtaacctagagcattattacgaggtcctgagttttgtactgatttgaagtgtatcaagcggagatgcttgactgttgtgggccacctctgggtgtgtctgtgagattgaaattgaaaaagagaagatttaccctgaaggtgggtggcaccattctaggggctagggagctgagttaggagtatttacctctttctgcttcctgattggatacaatgtaccgactgacccatgttcctaacactatgccctccccaccaagatggactatattctcaaactgtgagcctaaataaatccttctttctgtcaggtattttgccatagcgatgaggaaagcaactaatgtacaagctataattaaaacacatttagtaacttttatggcaatttgatggagcaattttacatctaaattactccagtgataaaaaatgtggggcttttatttggtatgcctttttaaaattgtatgttccttgtcttccagttttttatggtattgcacaaaagcatcagtggatggtagattgaagaattaaaaaataattggccccattccatagtgagtttgaaagcattgatccgaatggtaccatctttgtgggaagttgaaaggcttttaaaattatctggtctaacctcccactcagtgataaattgtctcttctaggttttttttcccctggcaataaagttttgattcttggcagtgttgttacaatcaatgttactaaatgtgcctctctctgagtacttgccatgtaaatgcctaccctgggtatttatggtctgtacagcaacactgctcagcaggtatttccagcccagtctcatagaagaggaaattgaggtttagggtaaaacagatatttttaactaactctggccatctgattgcagactcaccgtatgacatctgggttcttttctgtatttatacccaataaacttcattttatataacaaaaatgatatgttctttctgatggctggaaattatacttattttaagaagaaagggacagaattggaatcttaaggtaacccatgaaaacagagtgttcaggggctggagagatggtttggtggttaagaccacctattgcttctccaaagaacccgagttgacttcaattcctagaacctactgctttggtgctaagatgagagaaagatggcagagagagctagaagctggctttggttgccccagcagaaacaagagaaactctgcctcaaaaacaaggtagaaagagagaataattcctaaaaagccatgtatgatgtatacacacacacacacacacacacacacacacacacacacacacacacactacatacacacagttaaaatgtataaaaagacaataatcatttctaccaacccgcataccacaaagatttgtttgatgctaataataaaatcttggaacatatctgtcacatagtaaatgctatgtagtcagccctccatatccataggttctatatgcaaagatttgaccaaccacagaccaaaagcctattttctaaaaccctgactctgtgtagattggttcagtagttaagagcatttgctgttcttgcagaggacctgggttccagttcccaacacccagatgatagctcacaaccatcagggactctaggtccaggggagccaatgccctcttctggcctccaagtgcactacacacaaatggcacacctatatgtaggcaaaacatccatatacataaaaataaacacatcaaacctgtatctatactgatcatgcacagaccttttcctgtaattggctctagtagagtacaataactcttcatatagtttcacatgaagtaacctagagatgatttatacaggaaactgtagaagttatatgcaaacactatgctatgtatgccgttttacacaaagtgcttaaacattcacagattttggaatgtgagtggagctgtaaag

SEQ ID NO: 122 - DNA, 1552 bp, Mus musculus
tgagagacagagggaagctgagcgaaaatagaccttcgcgagagaggagggagcctggggagagccgcgcggtcagctccccgcccccaggccgccgccccctcactgcccccggcgccccgaccccggcgaaggtgcgaggggctcggggcgaccgggcggagcggctactgcgcgcgatcgggaccgggcggcggcggcggcggctgtggtgacggcagcgggaccgggatggaagggagcgcggtgactgtccttaggcgtggaggggcgagctcgccagcggagaaccgagcaagaggaggcgcaggagcggcggcgcccgagcacccgagggggtccgagtccaggcagctagccagccacgcgccacaaagggagcgcccccgccgcccggcacgccgcccccctccccaatgtcctcggccatcgaaaggaagagcctggacccgtctgaggaacccgtggatgaggtgctgcagatacccccatccctgctgacatgtggtggctgccagcagaacataggggaccgctacttcctgaaagccatcgaccagtactggcatgaggattgcctcagctgtgacctctgtgggtgtcggctgggggaggtggggaggcgcctctactacaagctgggacggaaattgtgcaggagagactatctcaggctttttggtcaggatggtctctgtgcatcctgtgacaagcggatccgtgcctatgagatgacgatgcgggtgaaagacaaagtgtatcacctggagtgtttcaaatgcgccgcctgtcagaagcatttctgtgtaggtgacagataccttctcatcaactccgacatagtgtgtgaacaagacatctacgagtggaccaagatcaatgggatcatctaggccagagtcccaggcacctgtggggaggtgttcagtgaagacgccgtctcggtgtggtcttcactcttaggctctttgggaacctgagggtgggtgaggcatttcttaggagattatggactcttcctgggcactaacgacatagcaatcacatgacataatgcaaaggctgagacttcagtgacaaaaaggaccagcccttagagagaatttatggtcacaggctagccatagtaactgacaagattagtggaggaaatatttggggaccagcatgcactgtgccatcctgataggcttccccaggtaactatcgattagatgtgaccttggtgttcatggactagagttgtgcaattaattttttcctggctttggtaactaccctgttctagtcacagtccttcacactaggaaaggaaagagagaagaaatagtcactctttttttctttctttcttttttccttggtcaccttcccgtggccttaagctctggagccaagggaaactgcatggaggtacatttcagttgggaatgaaatccacatctttcaaccagacaaatatttatagcgatgttgatgaatcactgtttttagacaccttcattttgaggtgaggcgccccacagattgtttctatacaaatgtaaatctc

SEQ ID NO: 123 - DNA, 477 bp, Mus musculus
atgtcctcggccatcgaaaggaagagcctggacccgtctgaggaacccgtggatgaggtgctgcagatacccccatccctgctgacatgtggtggctgccagcagaacataggggaccgctacttcctgaaagccatcgaccagtactggcatgaggattgcctcagctgtgacctctgtgggtgtcggctgggagaggtggggaggcgcctctactacaagctgggacggaaattgtgcaggagagactatctcaggctttttggtcaggatggtctctgtgcatcctgtgacaagcggatccgtgcctatgagatgacgatgcgggtgaaagacaaagtgtatcacctggagtgtttcaaatgcgccgcctgtcagaagcatttctgtgtaggtgacagataccttctcatcaactccgacatagtgtgtgaacaagacatctacgagtggaccaagatcaatgggatcatctag

SEQ ID NO: 124 - DNA, 53795 bp, Homo sapiens
tcgaaggctccaacgatgtcattaggacttggtcttcctgggcctctcttccttgccctgctctatttcatctttcagtcttggctccatacggtggcaagatagctgcagcaacatcagctacccaaggtgacccttctctgaaccaatcccagtggcctgggaggcaccatgctttgattagccaggcatgctcacgtggcctactctggaagttggatgtgggaactccaccaagaacacagggactaagagtaaggaaggaatggctttccaagggactatcaagggggagagatgggtgccaaggagccaaccatgccaagtaccaagagatgagggggtgctatgttcagattgtagctttgtgctgcacctttacacctccctgctctggtggtgctaacccacctccctggcccttctaaatcctgggaagggggactcaagtccttattcagaactccagcagcaggctataaatcctgtcccacttgcctgagccctttcagccccttcactcaaggctagtttccagattaccctaacctggagctggcgccatgtcctgcaggagacgggagagggcagagggcagcttcgggctcttaggtagaatttcttctttttaaattttaattattatttttttgagacagagtctttctctgtctcccaggctggagtgcaatggtgtgatcttggcttactgcaacctctgcctcctgggttcaagtgattctcctgcctcagcctcctgagtagctaggagtacagtcgcacaccaccaagcctggctaatttttgtatttttagtagagatggggtttcaccatgttggccaggttggtcttgaactcctgacctacattgatcctcccgcctcggcctcccaaagtgctgggattactggtgtgagccaaagagcctggccttacatagaatttctgcctatggatctcacttttctctgcattaatacttaccgctctgttttctgactctgttgccatcaattccccatacaacttcctgcctattccatcaggttgggctctgtggttattgtcacctgcctaaattgcacttgggttttactcacactcctttggacctaactgtcaagttctcaagagagaaggtcccatctctttggtcttatcgcagtgaatccttacaccaccaccatgaaatgggcattataattcctaccttttacaggtaacagaatagaatagaatagaggcatggcaagctaaaataacgagtccatggttacacatctggcaagggacagaactaggattcaaacacagccggtccgacactaggggctgtgctcctaacttctacatgatagtgctcagttttagggggagaggctcaggtgttacaaagggcttacccagagttggggaacagtcccaggtagactatgccaaaccaaaacagaaccatcaccaggagttggcaatgagttgtcaggctgtcctaacctagagattgggctcagccaatgtcaccaacagggaggaactcagaccaggaacacaagggctcagaatccagttgctaaggtccgaataacaagtgcaggtgcccaaatctggggagggcagggccggggagaaaggtgatctgccaggaggcaattgacctgcccccttaaatgcagatgtttccttcctcaagtgcatatcttggctcatgattcaacccctttatactcatagaatctggacctcaaaacattaaacagagatgtttactgtgggttgggaagggggacagaggtggagagctagagttcaaaaaccgtatgaagatgttttctgagctgaatacccccagtagggccacacgatgcccaggggactcactaggagatttaaggcatgtacagaggtaagagaaaatgagaaacaagaacatgaaaactagaagaggaaggaagacaaggccaaaaaaagagaaaaccgaggccactctagcgggaggtcagagacttgtgctttggcaattactggagttgtcccacagcgctgcccctcagaaacctacaccagggttggagggagccatgggtggacaggctgtacctgataacttgtgcttccttcccccagttttcccactctcgttaatgagttttgagacaaaatgtctctccccaggctagaagagcttcagtaacaagatgtccagagttagttgacactcaggtgaaaagcctcttgcagaaaggaatttttttttaatgccatcataaaacttcccagctcacctaggcctgccgtggaaatggtgcctccaaggacagagaggagatcagagcatctgatctgaagccgaggcataagggaaagttgggaatacacaatcctctcccagacagaatcaaacttgcctttctgcaacatctgattttgcaagaagtgacggactgagagtaggagaggaaaaggagagttcaaacaaggtcacttgacccacctaaccctgtccagaggaatgaagcctgagaaagcctcccagagacccgtcctcaatttcgccttgaccttttctgggtttatccatgtgcagcaggggcagctgtcccgaactaatcctctgcctaattcgagctcttcaccctccattctgtctcaattaaacaaacgcgggtctgccaggccgtttccatagaccactccctcacatgagaggcattccagcatctgggctctggagtcaggaagagctctgtccaaatgtcactctgccatttcctagctgagtcaccctggatgactgcccatccctacgcctctgttctctcagcagtgagttggggaaaattgtactcatctagaagggctcagagaaacaacagggagagagtgctgaaggcattgtgatgaaaaatattgctgaattattaaacattaaattatcaaaattattaatcgcattaaaatatcattacacacttacctgacccaaagtcttaatgatagggttcaagaggcttttcctcccagaggtgcagctttgaggggcttttgtacactggccctagagacacaggggtgaataagacaggtaccagctctcaaaggcacacagtgagcaggggccacaagacagcctaacgctcaactagaatcaatgctaaacatactatgacagataaatgtacagtgtgctctcaagagataacagtgcccacctaggaaacttagggagttgtcatttgatctgggcctggaagagcgagctggatttgattggatggattgttcttggcagaggaatgacatttcaggaagagggaacagcaggagcaaaaagtatgatgtttggattccactcgggatattgggaacacatgagaaggactagagaatgcagtctgttatgtgggatggcaggctaggagatgagaaaggtaagctagtcaagactcggaagtggctaatacaactgaaagtggtcccataggacaatgggagaactttcagtgatgatggaaatgttctacatctgcccgtccaatatggtagccactggccccatgtggctattgagcactttatttatttatttatttttattttttgagacagagtcttactctgtcacccagactggagtgcagtggtgcaatctcggctcactgcaacctctgccttccgggttcaagagattctcctgactcagcctcctgagtagctgggattacaggcgcacgccaccatgcccagctaatttttgtatttttagtaaaggcggggtttcaacatgttggccaggctcgtctcaaactcctgacctcaagtgatctgcctgcctccgcgtcccaaagtgttgggattataggcgtgagccttcgtgcccggcctattgaggactttacaggaagctagtaagactgagctgtgaaatttttagttttatttaattttaattagtttgaatgtaaatttcaatagccacatgcagctagtggctactattctggacagtatagccacagaacttatgacaatgactcaaggccctcatcttgcagtcccatcctcagcccataaaatgggagccccgcccaagctgctgctgtgattatgcagcagggtagatgagtttggggctgaaatataatttatttcctgcttgctaagccacgcactctgatgtggcagtgtctgcccagaggaagaggcagctttttctaattcttacagaggcatcatgtgggctagcagtagccctgcttcctctgaagtttgttgctcagtgatctgtctgcatgtagagtcaggtttcttttcatctcctgcttcctggagtcactgggccaggtacgcacacctggaacatggcccaggtgggatgtgctgggcactgactgttagtgatgctcccacagtgtgagaaggccgggtcctcagtatggctgtcagtgtaaagttctattctgcatcccaaattctgcccacaggcagatcctttggcctaaacttgaggaggaggtaatgatctctactttgaccacaggttgaaagggcagtcactattccactttgccagcaagagagcacatattatagtttaattctcacttggcttcctggtctatttctcagttgtttctaatacaaagaggaaaggtaaagtcatgatacttttttggagcctcctacctcccagcaaaaaggacatgcacatactttccaatcttgaatgcaaaagcggtgacatattcacgagccaacaagtacacacatgacattactgctctaaaacacaggcacagactgtcaagagttggaaggaatattgaattctaaaatctcatcataagatgaggaaacttgagtctcagagaagtttgatgatccgctcaagccaggtaggagccagatatggctagatcccatttctcctgaatcaacccatacctaattattaaaattaaaggttgcgaactggtagccattagttaaagtcagcctgctgatttttaattttttgtcctcagtgttggctcatgcacaacttaaaaaatatttttgccagcctggccaataaagcaagccccatctctacaaaagaaaaaaaaagatttttaaaaaacttagccaggcatgatgacttgcatctgtagtctcagctaataaggaggatgaggcagaggactgcttgagccaggagttgtagtctgtggtgagctatgatcacaccactgcactccagcttgggtgacagggcaagaccctgttttgaaaacaaaattaaaaaaatatatatatttggctttatttaaaagacgaaagaattcactttgaaatccaaattaacgaacatttctgggcctgtaaatctacatggtagaaggggctgaagcaatgtcgtgcctgatcctaccatagagaggataaaggggaggaatgagggatggggatcatttcagacactgataattcaagcagttaagctggatcacaaagtaatatatgctgctttcaaaatgtctagttcatgattcattattgcttattatgaggacttagagtttcaatctgtagaagtttcaataaaatacagatcttagagatcatgcagtcaagccaattcattttacagatgagcatcacaggtcccagaccacacacgccttcagataaaaacagggtcgcagaggtggtgaccaggccggagttggtggattcccctggctcctgcactatgggggcgctagatctgtcacattccttgcccctttacaaatagttttgggagcaaatccccaggaatgtttcttgtggattcacatgtatcaaggatactcatttccacaccaaaggcattgatgccccacctggcacataacagccactcaataaatgtgttagatgaatgaatgaatgaatgtgtaagtgtgaatgacctcaaaggtgagtgatgctgcctaaaccaaggtcatcgaaactggcccttagggcaccattccctgaagccaccagtgccatcatctttattcacagccaagcagctggccccagagctttgtgtcttgctcttccccagatatctcagtgaaaagcctttgattcaattttcactccctctcttatagctctcttgctctaggactccactgggggtccgagagctgttcttcctctgctatttcctgttgttcttgaataaaacaaatgccccttcaactttgcttctccatgggacatgttgttctccgagaggctccttgatcctgcaagtaattaggtctggaagggagggtgtcctattggccctccagactggttcagacatgtctagacccagcttaaattaccttgtctgttacacaaggatggtaacaagttggaaagaaaatgagacaagcactttgctgctgtctggtagagcaggtggggctcctgtttaacatttgctgatctccacttaagagcagaacatcatcagccttagtcgccatgctgaaatgggctctgtcacttggatagcgtttgtcagttgaaagctttctctccataaacatcaacagactggaaacccagtgaaaactttgtttttaatatttaaaaattaagtctccacatgcactctgggacagaggggcaataaattacaacttgctatgtgccagagattatactaattgtatatctgattaaattctcacaacagccttaagagggttttgtaatcctcatctgcagatgaaaagtggaggaggagagagtaagtggcttgcctgagtaagggccaagacggaattcaaacccagatttttgatgtcacaaagctagtatcctggcggggcgtggtggctcatgcctgtaatcccagcactttgggaggccgaggcaggtggatcacttgaggtcaggaatttgagacccacctggccaatgtggataaaccctgtctctactaaaaatacaaaaattagccgggcgtggaggcaggcgcctgttatcccagctacgagggaggctgaggcagtagacttgcttgaacccaggaggctgaggttgcagcgagctgagatcacgccctgctgcactccagcctgggtgacaggaacaagactctgtcaaaacaaaacaaaaaaaaaagctagtatccttctcttagtgttgccccctgcagaggaactgtttttttttttttttcttttaaagcaccctacatcacataatgtcagctggacttttctgtgatattaacactgggatcctgtaaaacactatattctgaccatagtctgacactctgcataatgaacaattagccgggaaaacatagtatttgaacctcctttgcagagaggaaattctcacaactccaaagcaatagtcagcccacagtcaatgccatctcatcacccagcccaaggctcggcctaaaaccttctagagggtctcactctaaagataacccaaaggtctcacagcttcctggttgcaaaaacgacaacaggagcaggaattgagacctaaagatcatttgggtagaaatgaggaaagaaatgacatgttaaatgatgatttttccctaacttgccttgttctttctagatgtggctcaagaacttgcagagttatggtgggataattcgactgatcaaatgctgaaagttttcctatcgacttcaaggctgttcaaatctctatgtactttgaagtctgaggcacaagataatttcccagagattcatgtttctatcgatgctaggctgggctgacacagataacccctcaagaggcctttccgaactgctgtataaactgtcctgggtccagcaataaagcaactgtgtcattatagttctctgcccttcagaagatctgatcttaatacccttctcttctttttgtccctctgatttcatcaaatttgttgccattctgggtgtttctccttctctccctgactttttctacttcagatcaaagaacttcccctttttcccacttttggatttgcgccctggaggacaacgcaaggttaacttccctcccacctcctcttgtaggcacacagggtgccccttagccagcgaaatctccgcgcccgagatcctctcacaatttcaggctggtgaattgtagtaggagacatggtttagtttgatgtggttaagtcagtcatcatggcatcttcgtaccctcagccccaaaccgctctcctactcatcaccctcactttcatttctttggattatctttcatcggcttaccaccagccttcacagcctcacccaaggctgaagcagggctagcagggtggtgcgtttccttccctggttgagctggtgactgctgtgggtaagcaggtccaatgtgaactcaattttacattgagaaagagaaagcaagagtgagtgggctgctaagactgttgcttcatggtttcccctaagccccagaaatagaaaggcagacttccgactggcagagcccgtatgctaaccaccagaccacactgccagataagaaaaatgttcgattgtgtcatacttccctcattggctccagtgtctgaaaatggccctgaatttcagagagtcttaccatgacccagggatttagagaggatcgaagagggaggacaaaggaatcaggcaccttctctctctcttttctggggtaaatttattttcaaccacaaaagtaaaggaaagaaaaagtcacaacagatgagttatgagctaactttctgatttgcacatgtaagagaaagaaatgaactggatatcattagacattgagaaagggagtctgcaagctagcaatgtatcttcggcctttttgatttacacgtgtttatttatgagtacctactgtgtgccaggcatgatgcttggtgctgccaattcaaagagaaataagacacctccttgcaaagtgagaaggcagaactagattcagattcacctagatttcaactcttgtgctcaggccaccaccaccaccatggaaacaattttgcttgactctcccggcgcagccgcggcaggcgtgtgtgttgtcagacactgcaggaagagtgatggcctgggtgttgacaggctcctaattggaaggtaggaggtgccaccagagatcagctataaaagatatctttggactggggtgggctgctaatgcttggaagagacttgtgggtgaggcccggtgagctgtcacctcggaattgggccttgcccagcagacagacatgcatgcgggggaggtagctgacagacaggggcgcatggggaagcagccattccagagaactgcaacagcagattgcaaaccaggacttcaggactcagagggggacaaggaaaggagagcctatagtggccccaaagcccagggtcagaggcagggccaggagagcagctgacaagagctttatggtaaggacaaaagagaagacagccggagtctccttttattcagctcataaagacccaacttctgtgcacttataactgttcagaccctgaggggttcaaaaaaagaaccgtgttaggagaattcaatatttaattaagagatgatcagatccgtgcaccgaaattattgctgggtaagacaatactgtgtgtgttacatagcattggaacttaggaaagctctttccttgtgttgtttaatttaatccactcaacaaccctgcaaagtgggtaccattgtccctgttttttatgaatgagggggtgaggtgctgagaagctgtgtacgttatttgagtttgtctggctagtcagtggctgagccaagttccaatccaggtcatgtgagcctctgaactttctgataaaacctgcagacccccttaactgggataatatagtcatgcattaagcaagaaggagaagtaaatacaggctgatggtgtaggggagaaattcaaagggagaaggcctaggagggagagggagctatgtgtgaacagaaccaaagatggcctctgggaattggaaggtctcttggaattcgtccaaactgaggatcacaagtctccacattctgagtaggaggatgagggtctgagttaggatttgggtcctgcagggcttgctaaggaatcccctgatggcctaggattccacgcagagcacatctggtgtgagagagctcgctgcaagggtgaaggctccgccctatcagatagacaaccaggccaccaagaggcccagccctccaaaccctggatttgcaacatcctcaaagaacagcaacgggccttgagcagaattgagaaggaaatacccccacctgccctcagccgttaagtgggctttgctattcacaagggcctctgggtgtcctggcagagaggggagatggcacaggcaccaggtgctagggtgccagggcctcccgagaaggaacaggtgcaaagcaggcaattagcccagaaggtatccgtggggcaggcagcctagatctgatgggggaagccaccaggattacatcatctgctggtgagtaggcttcattaattctctgatgaatggacgattgcaagggaacttttttcatcttcaaggagccagaagaagtggtgattaaattggtcttttaaaataaaaagactccaaaggggtacaagtcttcaagcttcccctgtggtgttccgggcactctggcttctctttcggagggaggaagagcatctattcataggctgtgacttggagaggccccacggtgagtcaggcgcttgctgtgtgagccgctggttgctaatgtcttcgggaactgctaatttacccatctaatttgttcctgtacactggccacaaagggagaccactcaattattctgatccaaaagagaggcttgtgtttaccatgatctccccagcaactgtgtgagtgtgtgtgctgtgtgtgtgtgtgtgtgtgtgtgtgtgtgtgtgtgtgtttgcctaacaaccttaggcaatgacgaagaggtggggctgctgcccttgttagcattttcaaacacattccagttctgagttgagggcaaagattgtaatggggtgcttcagagaagccttggctcccaaggaggttataacttcaaagggtgtttttgaaaaaccaaggcggatgaggaaagtggctacaagttccttccatcacagaggatcaatgaaggggaacaaagatttgggagcatctactttgtgccaggtactgtgcttgggttttacacgtcttctcttgttgactttgcataactcccctttgaagcagatattactccaggttcttgccgtaatgtttcagcttaaagaaaaccaacccatacttctttaggttgccctgaaaaggtgaatcttctgtgaagccttttctgtctttatctgttaaaattaattaagctcttgtttgtgctcccagaaaatcactttagaccttagaaagatggcagcctcagttttctcatttgtaatataggggtacccatagggtcattgtgagaaataatagaaataaatcatggaagtgcttggatagtagctggtacttagccctcatcagtcatcattgtcattgttgttaagagtaataataataataatatcacttattataattactcacctctaggtttttaaaaaacttacaggccgggcacattggctaacgcctgtaatcttagcactttgggaggccaaggcaggcagatcgcctgaggtcagcagttcaagaccagcttgggcaacatggtgaaaccctgtctctactaaaaatatgaaaattagccacgcgtggtggctcatgcctgtaatcccagctactcgggaggctgagagaggagaattgcttgaacccgggaggcggaggttgcagtgagccaagatggcactattgcactccagcctgggtgacgagaaactccatctcataaaaacaaaaacaaaaacaaaaaaacttacataaatttatggggaacaagtacaattttgtgacaagcgtaaattgcatagtcgtgaagtcagggcttctaaggtatctatcaccagattgatatctattggtatctatcaccagattgatatctattgatatctatcaccagattgatatcaccacattgtacctattaattaatttctcatcatcctccccccacccttctgagtctccagtgtatattattccataccctaatgccatgtgttcacattatttagctcccacttatgagtgaacaatgtgatatttgtctttcagtgtctgacttttttaacttaagataacagcttccagttctacccatgtggctgcgagagacatgatttcattcttttttatggctgaataatattccattgcatatatatacaccacagttttaaatccaatcatccattgatggacacttaggttgattccacatctttgctattgtgactagtgctacgataaacatacaagtgcaggtatctaattatttcttttcctttggatggatacccagtagtgggattgctggattgaatggtagttctaattttagttctctgacaaatctccatactgttcttcctagagattgtactaatttacattcccaccaacagcgtataagagtttccttttctccacatcgccactaggttgtaagttccttgaatgtagggatcatgtctcttttcttcattgttttataacaagagcctaggagtgtttggcacatggcaagtacttgttttctagctgacagatgaatgaacaaatgagtgaaggatgcttcctcctcactgctgtgagcttctgagaatggacccttgtctgacctgcttctgtatctctagtgtgactgctttgtctggcacaacagaactgctcagcgattctgttgaacggatgctgctgcctggcccgtatctggcctggagagtctggctgcgagctcatctgtgctctggtctggctaaggttagctgcagccctaggaactcagagagtgtgtcctggacatttcacccctagttggtgagctcctcaagggtagggacggtgtcttgtttatttttaaattcttagtgcccagtacagtgcctggtacacaggagatgctcaaatggctacccctagcctctgaggtcccactgcactcaaagaagagcagagctccaaatgaccttgtcatctttcccctattacccaaacctgttcaatttccccatttctgtttattaaagatccattttctcagttacaaagatccaagactcctcgagggtattctaccctaacggaaataggacaggctttgtagtcagacttgaaccctggctttggcgactactagctgtcctgcctggagaagttgcgtacccttcctgagcctcagttttccctttcattgaatcaggatgataatacacacttcattcatccactcagcaagtgtttactgggcgcctcatacacagcaggaactgttctaggcactgcggatacgtagacgtcaacaaaacaaacattgctcttgcctgaaaggggcttacaaacttgagagggggagacagacaccaatcaaataagcaagtacacatatagtatgccagatggcaatatgtgctagggagaaaaataacacagagtgagggaaaatggaatgcgctggcccgggttattagtgtcttactcaggtgatgaaggaagacctttctaataagaagaactcacatctggggaagaatgttcccggaagaaggagaagagcaaaggccctaaagcaagagtttgaagaatgacaaggggtcctgtgtggatgaagcagagggagggaaggaggaagggagtgtaagagaaggggacacagagatggctagagccagatatgcagggccttataggactttggctttttactctgggcaagaaggaaaccttgggagagcttcaagcagaggagcgaaatgatctgatgcaggttatgaaaggatccccctggcagtggcacagagtatggcccctgacctgtgtggatggggcagaagcataaggctggccatttgcatcccacaaatgacctcagtgtgagggatgagcgagatcatatacgaatgcgcttgcgtgagtatgcatagagcaagtgctcaagccatggcagcttctatcaatggccctgcagctgcctggctatagctccctggtctcctgcagacaagtcttggccagtcacgtgagtgcctctgtcattgcccactcagtcattccccctgcccccacctcctttcttcaacccttcactggtggttaagctcctagcacagcagcctcacctccagcctctccccaccccaacccaacccaaatgcaactccactcacatccttcccctgttcaagagtcttccatggactagtggctcattaaatccacattcttggctaggtgcagtggctcacacctgtaatcccatcactttgggaggccaaggcgggcagatggcttgagcccaggagtttgagatcagcctgagcaacatggcaaaaccccatctctacaaaaagccaacaaacaaacaaacaaaaaacaaaacaaaagaacaaaacaaaaattagccaagcgtggtggcacacacagctgcttgggaggttgaggtgggaggatcacctgaactcagaaggtcaaggctgcagtgaaccacagtatcaccactgcactccagcctgagcaacagagcaagaccctgtctcaaaaaaaaaaaaaaaaaatccacattcctggagacttgcagctaaggccttccacaataagatgctgcatttacgtttcccacccataatcaactgctatcccaaacatattgaatatctgtggagaagtatgggtgggtgcaatatgtcactcctagcagaatcactgaggaaactgaccacactcatgatggaaaattgacggtaatgagtccttccctcaggttccccaaccccacaatatgccctaaccatggtggacatgtattcctgtctgtcactggctcacttctcccaccaggctaccgcaaactccacaatgatgtatattctcttaaagctacaaaatggcttgtggtttccaaatcagttttccttactgctcttatctcccttgatacttgcccctatgggcccctcatccataataaaatgccctcattttacacttactagttctgacaagagtcccaggttccaagtcatggattcccatatgggattgctcctctgatccttcattcctatatcttttttcaatctatccacaattcacaaagcatcggtgtcagaccaatggcaaataataagtgggacctgctggctatggatggaagagcgaagtccctgacaacatgtttctaccagcctggaaatgaggctctcccatcccctaacacatctaccagttgtgatggatttaaaggctggctaatgttaagcttgttccacaggggatagaatattggcccctggactgacacctaccaccatgtggatcttggagcaagacaaaggagccccccaacattcgtgttctgaaataacaatgcctgaggctgtctattccccaccacggatgccaaagcacagacagccactcacagctgtgggatacagatgcccctgtcattataaaaggccagccctaaatgctattacagagtctaaaaactgaaaatgttattgtgaaacctttaggttttttatagctggctatgcctgatatagctggtggcctgggacacagtttccctactcagcgctgggacacctcggcaatactgcacccacagtgtcatccctatctgtttggaatgtacaattcttctacaacaccatgggccaggaatatcacatcatcctgagcagccatcaggacaaacaaaaaggaatgtggtcctgtatgtttagtcccacctcccctacaaactacttttatcatagaaatgatgcccaattgtcagcccagcgcatgtggtgtcctccagcaccccttctaaatgtgccctcaagcaccccttcttctttgtgcatctttgtgacacccttccagatgtcagcctatatctccatgacccaaatctgacttaagagttgtggccgggcatggtggctcatgcctgtaatcccagcactttgggaggccaaggcaggtggatcacctgaagtcaggagtttgagacgagcctggccaacatggtgaaaccccgtctctactaaaaatacaaaaaaattagccaagcttggtggtgggcacctgcaatcccagctacttgggaggctgaggcaggagaattgcttgaacctgggaggcagaggctgcaatgagccaagattgtgccattgcactccagcctaggtgacaagagcgaaactctggctcaaaaaaaaaaaaggtgtaccagcccagggagacaatggccacattgcaggtgatgaccacagcccagccaaccactgcatcctggaggctgcccaccagttacccacatcatctaccaagggacccccttgctggagcacaaacagcttcccttgggggatccctcaatcagcatttgtcacatacctgaaaagggtggccaccacccaggccaccaaagttataactctctcctctcacttcctccccattgggcacaataaacctcattgccattgtggctggaacttcccttcctgggcctcccaaagcaattctactgcctaaggctatctccgggctaacttgtatgtacacagagataaagccacatcccagtggctggacctcatgcaatgttgggcctcctatctgcccccatgagcaggccactcccttatttgcaccacaaaaccaccaacaccaaacacttctggtctaggctcctaggtcttgccctgtcctatgttggctcagatgttatccagtctggtccccggctcatgagtccagatcatacatctatccaaatgtataaatacatgcctatgcttgtatcttcctaggcccacacagcacaactagtgtcatggcccaccccagatattaaaggaacacaagagattggaagccccagagggaacctgcttcacctgttccactcctagataacttcttcctgacgtcccaaatacctaaactcacctgcacactgctaagtctgacaacccccttcacatttttctgactgttctgcaatttaaccctgctggtcacagtccccagtcagaggtgatgggcagtcttcctacccattgtcctgggtataagcatgacttggggccagaagagtgggactaaggtcttacaatatgatcacaccaggaaaactagcagatacttcagagaaagatctgaggtcctatcagcccacgtaacacaaaaaacagcagcactggaagctttcactgaagggcaaaaacccctaactgccagggtggcagataagagactagctccagatgatatgccagcttcccagaaggagtatatgctctcagagggcatagtgtatcctgctggacgtggataaatattgcaaggcaaagtaatccaaatagcccaatggatgtaccaccaaacagaaaccaaattctacatgtggtactctgaactccctaggacttggatgtcccctatagcctggggtgaccttgttttaggagccctcctgcccacaagtagacttacatactgcactggctatgtaaaattggtacagcctatatacaagtatattagctctttggatggtgaaccaaatgttagggagtgaattttgaagaaattgagttgagtgcaaaaagttgctcccagcaaaatgtcatttgtccaaatagttaacacccactggggcagaaaccatcagggcaccccacccctcaccacccactcagccccactcacctctgcagcacctagtaatcatatgcaagaaaactcacccttactctttttgattgaccacccccagcctgacccccaatggagcagatcactcaaaattaatcttcccccactacctcctctcggcattattcaacaggtgggcccctgtcctatatctacgtaggtccccagcaccaggctctttctcctccccagaagtcagggagtcctcttctcagtggggccctcaaccagtggcttccctcgctgcctatgcctgcataagtaatacacctttgaattgcctgtgatcaccgggtcaggtgtggtgcgttttggcatccaaggcttttaaatgggagagaacagcagatctggttcctttcactggaatattgttatggtccaattctgcaaccagctgacttcattactacctgtgaactgcacctccagctcctccaactgaccccatacccagacccttacttgggctgtttcctaccagacacacctgctctgttaagaaaaccattattgaaatcaccggctgttaattcctactcagtccttagtagctctgtgagctggagcaagttctgtaggctttctgtgactcagtttcatcacccataaaattatgattacaatacttacttcattagagtgttgcaagggcctaaaaaacactctatgtatagctcaaagtacaagcctgacaacaaaggaagtttccagataatcgctcatcaaggggcaactcgattttctgcttcctccagaaagccttccatgctgatgtccatccactctgatctctccctaatccaatctgattgcagttttgatcagcacctcactgttgaccatggatttcttctccattacaaatgtgttcattttgacttccaagtaagagataaaggtcttggaaagaagtgattgcattttacctggctctcctactgactttctgtgtcatcttcctcttaattttggggagactgagtttctttctctgggatggcaaatacatggcctatgtgccaacactttcccatcctgaaacctcaggacacacaccagtgttctcatcttctctccagaacctgggtccagactcacaattcttcttaacacaatactttggacagtgtctactaacttatctaataaatatgttttgagtacttcgtaggtaccatcccccttggtcagtttctagaagttaaaacgttggacatcttgtatctgcacttatggaactcatcccttagtggagaagaaagacaatatgcaaatacacaaataagaaaatatcaagtagtgacaaatataatgatgaaaattaaataacggtgtgttagtgcctggggaggaggctattttttagatcaggtatccagggaaaggccttctgaggtttctcccttgatctgggagattgggtgtgggcctaagaatatgtattcctaacatgcaaacgtaggaaatttgggaaacactggcatagtgaatgaggtgagggcatagtcagaagacctaggtctaaattccgtctcctacatttatgcagctgtatgaccctgggaaagttattgaaatttctctctcactttcctcctctgtaaaattggaataatattactgatctcaggaggttttttatcaggattgaataagatcaagtatttaaaatgcctggcacataataagtgctcaataaaaggtaggcattgtttgcaacaattaggtctatctatttataactgtaatcttttgtttgaatcactcaagagacaaatccaataaatgccgctaggtaatacggtgtctgcgtgttggcttttgcctcatgaagctcttcctcttgaaaaataaattttcaaaagacattcctgtgagcaagaatgcccgagtctaaggaacaagggtcatccagttctctagtttaggcatgtttgagatttgaaagggctttggcctaatttcctctcctatcaaatgggcaccaggctacctgccctttttcactcatgggggatttctgagactcagagggataagagatttgcaaagcgtgagacacaaacagttgcagatacagacagaacacttgctttctcagaccggcaggtgcatacaatggcaaggccacctgatacaccagtcctgttcatttggaaaagggacaactccttcacattcacaagctgggctggtaagtgaagaataagaagaaaaaaaaaagaagtcggcaggaagcagcctcttcaaccagcaaagaaaccgttagaatccatccctgcgccctgatgccaaagttccgcctgccccacccgtcacgctatcaaggacacccgcctgctatcagaaagccctgggggtctttttccctagtttatcaaggacctgtggaaacatttctctaactgaagataagaattttttttctctctctttctcctttctacttctagctgtctaaaccagagggttcctctcattttctttcagtaacaactgctctgaaaagaagatatttttcaacctgaacttgcagtagctagtggagaggcaggtaaggtgggtttcattaattcatttgttcattcattcattccttccattattgtatgcttcctgcatgccagaaactgggctaagaaggctcttggatttaatcctgggcagaatgagcttgaggtctttggggaagccagactgcacttaacaattacaaaatgcggaattgtaaattgtgatctgaacttggagtgagagcatacatatttgagctgagagacagtgtgtataataattttttagatttggctcttgccctccaagtggacgttttcagggttaaaaagatgcctcagagcctagatgacttgctaccattccgtgccagccccgtctcccaacccaagtcacaattgcttgacccttgtgaaggcgaggatggaaatgacttgttggagtgatagagaggctagcataaacctgccaagacctccttcaagatttggttcattttgcaaaagttgccagataaaagatatttccagatggagggccacgcaggaaatacaaatggaatatttgttaatagctcttcctttgcgagatatgacccaaggcggccttctgcaatgtgatgggaagcactgtagcttgaaagcgtgagaggagtcagcaggcccacggcagtctcgaagtctttggaaaggggctctggcctgagcaggcattaaagatgctctgctcatcagagacgcccccttttccaccaccaccatcccaaatggagatgggacctgctatactctaagtattggattctcagacaggaggccagatatctagaagaatattgagctccttaatgctgtggctttgcataataacaacctgcactctttttttctgtccttggagtcaaatgggcttctgcaaagaagtttatccagaagtcagggatgagcactattcgaaaagtcctaagtgggcagggattgccactgattgcactgaagaatgtgttggagctcatgagactggcttccccataacatttggttgtcgaatggttccacagatgaacctgagaagaccgtgagctccctggaacaatatgtaaaattttgcatgtaggaacagagctacacctagggaatggtctttaacttttgtcagatttgtttggggcgtgtgggggttaaatacgtacatcgtaaaatttaacatttaaccactcccaagggtacagttcagtggcattaagcacataaatattgttgggtgaccatcaccactatatagctctagaactttttaatgttttccaactgaaatgttttgtccattaaacaataactatcccctccccctagctcctggcaaccaccattcgactttctgtctctatgtatttgtttaagtacttcacaaaagtagaatcatatatagtctttgtcctctcaggactggcttatatcactcaatgtcttcaaatttctttcatgttgtagcttatgtcagaatttcctttctctttaaggtggaatcatatgtgtttgcatgtatatatatgatatgtatatatatgatatatatgatatatatcatgtgtatgtatgatatatatatcatgtgtatatatgatatatatatcatgtgtatatatgatatatatatcatgtgtatatatgatatatatatcatgtgtatatatgatatatatatcatgtgtatatatgatatatatatatcatgtgtatatatgatatatatatatcatgtgtatatatcatgtatatatatgtacacataaaatagtatgcgtatatcactttaaaaaatccatctgttgatagacacttggttgcttccactttctggctattgtgaatagtactgctgtgaacatgggtgtacaaatatttgtttgagttgctgttttcaattcttttgggtttatgtccagaatggaattgctagatcatatggtaattctgtttttaattttttgaggaaccggcataccgttttcaataatgcctgcaccattttacattcccaccagcaatacacaagtactccaaaccctccagatcctcaccagtacttgttaacacttgtgcattagccatcctaatgggtatgcagtagtatctcattgtagttttgatttgcatctctaataattagtgatgtagaacatcttttcatgtgcttattggccatttgtatgtcttttttggagaaatggagattcaagttctttgcccattttgaaactggattgtttaaatccagacagagcttgtcttgctctgtcgcccaggttggaagcgtgatcttggctctgtcgcccaggcagtggcacgatctcagctcactgcaacctctgtctcccttcctgggctcaagtgattctcctgcctcaggctcctgagtaactgcgattacaggcacacaccatcacgcccggctattttttttttttttttttttaagtagagacaggagtttcactatgttggccaggctggtctcgaactcctgaccgcaggtgatccacccacctcagcctcccaaagtgctgggattacaggtgtgagccacagtgcccggcctatatgttctagatcttaatctcttatcagatatatgatttgtaaatatattattccattctgtgggttgccctttcactctgttgatggtgtcttttgatgcaccaaagttttaaattttgatgtagtccaatttatctatttctaattttgttgcctgtgcctttagagtcatatccaagaaatcttgctaaatccaatgtcatgaagctgttcccctgtgttttctttaagaatgttatagttaccaggtttttaaaaggtttgtgacaatgcatgggctatcttcaataatgattctggagtggccttcctcaccaaagcaaagacactcagggctttgtaaatatcagtgtgaatctaggaactgggcaattgataacatggatgtgatatttgaaggcttcaattcaaaaggaatgattaagtatctccatatctatatcagtaccctgggagctagtgaagatgaaaaccatggtctctcttctccaaggacttaaggcaagatgttgcaggcacacacgtgaaattattgcattgcaaggcagaatctaatgaggcacctagctaggcactaggaccaagggctataagaactcagaaagggatcaccaccatgagcttcaggggacagagaaaccttcagggtaaagatgtagcttgatctgggtccacattggacaagatttggagaagcagagaagactggagaggaatttgtactaactgcaataatcattgccatttactgagcacctactatgttccaagcactgtgctctgcccactgcatacattatctcaatgactactcctaaccctacatttatcattgtctgtattttatcattcaaagcactgaagctcagagattttcctaagatgacccagatagtaagttgtaaagcagagacttgaagccaggtttatttatctcaaagcctctactcttaatcactctactattctagtaccaaagctttagaacagggagaaagcagacatccccgatagagagaaaagagtaacacagtgcacagaaatggcacaagcaggatatttaagatcagagaggagaacaggctggatgggaaggttcagggtccaggactgtgggatgtaaagttggatcaatggagtgagcaggattacagggtgcctttaatggaagcatgggaaatttggtctcgacctgctagaatgacagaatcacacatagaatttcagctctaaccttccagtctgcctcttttctctataaaatgagaaaattgaggtctcaagaggttaagcaacttgtggatggtcatggacgatagggaactattgcaaattcttgagcatggtgttgacagggaagaaaacagtattccagatcagttagtgtggcagtaaaacacatgaggggtgactgaagggaagcagcaaaaactggcagaaaaaacaagcagctctttctctgttttttttttgccaaaggatacctccctcaacaatgggcattcctagggagcatcattaacaagattccagctctactccttcctgctgaggtttgtcgcttaagaatctggagacaggtagggtgcagtggcttacacctgtaatcctagcactttgggaggccaaggcgtgtagatcacctgaggtcaggagttcaacaccagcctgaccaatatggtgaaaccctgactctactacaaatacaaaaattagccaggcgtggtagtgtgcacctatagtcccagctactcaggaggctgagacaggagaatcacttgaaaccgggaggcagaggttgcagtgagctgagatcacgccaccgcactccagcctgggtaacagagtgagacactgtctcaaaaaaaaaaaaaaaaaaaaaaagaatctggagacagcttgtaggggcaagtgctatcagaaaggtcagaatcaccttcccctgccaggctcagtgccctttgatggcccagatgccagaaaacacagctgccccagcagcgacctgtcctcatcctccccacttcctccaatagaaagcctgtctagggtgcaatggcttagatcagagacacgtgactctgaagagccaatggccaggaatggcttctggcaccttctttatgttgccttcctgaatgtgagcctgggccaggcctctgtgaacctaactcacctgtcccatggaggccaccataccaggagaggtaagacaagacactccgttccccaggcaagaatgttgaccccaccttacttgaactaagcccttgtagggcagaactccacttatccatctatgtccagccaagaaagccctgccctggttgactattgtcctctgaggttctctttgcttagttaattctaataatagctgccatccattgagcacttattctatgttgatcactgggctcagcatttggcatgcatgatttcattttattcctacaaccccataatgaagatattgttatccctgttttgcacatgatgaaactgaggttcagggctgttaaataatttgcctaaaaccatgtacttaaaggagccaagactcaaacacaagcctttctctctccaaagcctttgcttttactcatatgattgactgcattctacactttagtccttgtagagggtagaggttctgcagtggagagtcaggcttcaaagagtggccttgttaattccagacaccacctgtttctctgttcctgggagccaagagcctgatctctttcccaaaccaaactcttggttccaaatataaatggtatctggaccattattcttctcccagtaatgatgctcaagaaaaacaaaggaccttgaagttccttctacactttcacccagagggcatcatgcaggcatgctttggccaaggggaatggtgctgccatttgtacagtcattcttttaatgaatatttattgagggccagccacacgttaggcacgttctaggtgctgaagacacaactgggaacaggtcagaaagagtttccaccctcacagagtttacattctagctgggaggaaaggccaaaacaaaacacacaccaaaaccctgcacatacatctgtagtaaagagcaaatagtgatgatgctaggaagaaaaacaaagaaggataacggggatggagagtgaggagaagaaggattttataaagccctctgaggatgaaatatttgaacagagacctgaatgaagtacatgggagccatggggtgatccagggggaaagcattgcaagcagagaaaagggcaagtgcaaaagccttccagtaggagtcagcttggtttgttttaagaaccagaaagaaggccagtgtggttcaggcagacagagtgaaggggcatgctggagaaaaggacaggggggcagcagaggccagataatagggccttccaggccacagtgaatttggatctcaaatatactgtgccggggtcccaggcactgtggtgtgtcactcaggtgtggcacctctgcatagctacagagaggagacaggctgcctaaacaaagagcacaaagacagctcagtgagtcagctcacctggctctgactcccaccttgaacttgaagcagcaaataaagcccagggtttggtacccaaaggagaaggtgggggaaggtttgacaatggcctgaggtggaagaaggagctgttgaccctgtatgtctcatttgctttgtccatcaaagggtctgaattatcaatgggtgctcaaactttttttttttttttttttttgagaaggagttttgctcttatcgcccaggcttgagtgcaatggcacggtctcagttcactgcaacctctgcctcccaggttcaagcaattctcctgcctcagcctcccgggtagctgggattacaggcgtcagccacctcgcttggctagtttttgtatttttagtagagatagggtttcatcacgttggccaggctggtctcgaactcctgacatcaggtgatccacccacctcagcctccgaaagtgtcaggattataggcgtgagccacctcgcccggccgcccaaacattttaaagttagaatctctttttataagcaaaattttccatagaaggtgactgtgtgccactttcctctccaagcacctgatctgcttcatttcacagaatccttagaacagctccacgagtaggtactctgaatactcccgctttacagatgtggaagctcaaatgcagagaggttgggcaacatgcccaaggtcaatgaatgcagaactgctgcagtgggagcaggggtgggtgacacccactagggaggtgctttcaaactcctactgctccaaggagcaagctagaaaatcccacttctcaggccccttccactaggacacactatgagcttaacactgctaagaactcactgaggaatggtgacatttgggggcggctccttcagtgctttgtttggcttcttttttaaattataaatggtggtttgaaagttgttggaggggaaaatcagatgaaatcagggatgtggctgaagcagtcagtgtagcagtgtagcagagaagcagagaagctgtcagcagcctacccaggccccgaaatgggcacagccctgcatttctggcctgaggcttgccgaggtcttaggtgaacttcagctctttctacagcaccccagtctcagcactctttggtggatgtcctgattggctgggagattgttgcttcctgatacagtggtgattacttctgaaagatggggtaataccaacagctatcgtttctgaccatttactgtgcagcatcactgtgcaaagtatttttatacatatcctattgactcctctcaaaactcctgtgaggcaagcaggcaccccagtggcctcatcctagttctggccctggtgacattatgattgcctccatcctccatttgataggtacagaaactgaggttcagagaagtgaagtaaattcccccagatcacgcagctagcaaacagctgagcttctatgctcatcctaaggctcggttgaaatggattttttaaaagatgtattttgggctctttactatatagaaaaccgaatctgtttatcactaaggttactaataggccttacatctgtgaaaacttatctgtcagctggccctgaaatgttctgaaatgagtctgagcacaggatgcctgtgacaaccgaatagtttaaaaaaattctccatgggagccgaaaccctattaagacaggtctttatttttgttcctgaatgccacatttagaaacaaaatgtcatatttttgtatatgaatgtcacaagtgacaaagcatatgttgcaacttggcttctaatggttgaaaaaaaaagagaggtaaattatcataatgttgggatcttctcaattatatttgcattttcatttctatcagaagtccattttagcaaaggaatgtaaccttagtcacttgaaactgctgttcccttagaaaacaattgtaaatgtaataagcaaaaaggatagaaaatgcccacaggggaaaaaaatgatccatctggggtcagagccatcgtgtagattgattcattcttcttctagcattcttattcaggaaggaaaacttgaacattttctagattttaggatatttaagatttgcaaggaattgggggaaagggaaaaggaatgaaatttcagtcccactggcagggatcaaatagagattttctcaacttttaaaagaaccgttttacatgtcccaatcacctcatagttcctgagtctctcttctgcataaggcatgtactagttgttaagggaggatacaataaggtcatgattgctttaaaattattcataataaaaacacattttgagacttgattctaaatgttaaacttaaatttgagcaatttaattgcccgttgaataggaatgaaatcccaccggtaggcagttatttcttacaaccactgtgtgtgaaattgaaatcttaagataccatttcaaatattcaccttctctaaggaagttctccccaaagagttgtgaaagataagaaactgacccaaagtcatatgcagtaatctctttttctttacacactcaggtcaaagtagaagcatattattaaaaagaaacgttatgccctgaatttggctgttctgaggttacctcttggaacccaaggatatatttaatttaaaaactgacttgagccccatgcaaaactgtgacaaggaaagtaataatttatcagattaaataaaaacaagcagatgtggccaggcgcggtggctcatgcctgcaatcccagcactgtgggaggctgaggcagatggaccgcctgaggtcaggagtttcagaccagcctggccaacatggtgaaaccccgtctctactaaaaatacaaaaaattagctaggcgtggtggcgagcgcctgtaatcccagctactcgggaggctgaggcagggaaaatcgcttgaacccaggaggcagaggttgcagtgagctgagatcgcaccattgcactccagcctgggtatcagagcgagactccatctcaaaaaacaaacaaacaaacaaataacacccaagcagatgcaaacaggtcatttagtcaccacgataatgaacgttaaaatggaaaacacttacatgttttatttaggagaagaagggggtgaggtgaaggaatcctgtttcctgcttttaaaaaacaggaaatagtttccaaatttgggtgggcaattcttattttaaacccccatttcacctttaaatttaatttcaagctcttttaaaattatcttaatgatgccctttactataacatagcagctgccatttatgagtgcttactatataccagttgcttttcatgcaagcaacttcatatctgttattacccccatgccattacaaatctatgtgccacccttttgtgcactaactcatataatccccacaataacttaggcaataggttctgtcgtctccattttacagatgaggatactgggagtttatttgtttgtttgtttatttattttgagacggagtctcactctgtcacccaggctggagtgcaatggcgcgatctctgctcactgcaacctctgcctcctgggttcaagtgattctcctgcctcagcctcccgagtagctggggttacaggcatgtgccaccacacctggctaatttttgtatttttagtagagatggggtttcaccatgttgggcaggctggtcatgaactcctgacctcaagtgatccacccgcctcggcctctcaaagtgctgggatcgcctcggcctctcaaagtgctgggattacaggtgtgggccaccgagcccggccaggatactgggagtttaaattcctgctgtgagcccaggttgacacagctggtcaaggatgggttagaatccaggtagtctgactccagagctactaccgcatactgcctcctcagattaaataattttcctaggacatgctaactgataagtaagagtctaaatcaaacccaggcagttgggttccaaaattccagcgtttaaccaccacattgactggttataagtaggtaaactgttcatcacaacctatatatttattttcatttctgttagaaatgaaagtagtgtggtaggttacatatttatcacatagtttaggcttgcctaaattctaagtattttcttttttaaattaaaaacaagggtctatcggaaaaaaaaaacccaactttttttttttttttttttttttgagacagggtctcactctgttccccagactggggggcaatggtgcgatcatggctcactgcagcctcaacctcctgggctcaagcaatcctcccacctccgcctcccgagtagctaggatttcaggcaagcaccaccacgcccagctaattatttttattttttattttttgtagaaacagggtctcactgtgttgctcaggctagcctgggtctcccaaagtgctgggatcacaagcatgagccaccgagcacagccgaaaaagtctttttgtatactgaagtctccactaggacaaaaatttgctcttaaggcttcctttgggacacacacacacacacacacacacacacacacacacacagcttttgattatacccattagggacccaagccttgggacacagggaccagaaaatgacaagagcatgcaggcagtagtaaactctggttatacttaaaatgggaacagaaatgtatgcctatgatccagactgatcatataaaaccatggatcctgaaagtacgttccctctttacaagccttaatgactggcatcacgcacaaataggcctttcagcttctgaacgcagatattttcaaggaactctgaggcccaggagagcctaagtttttctccacggaagggcaaactactagcctcccccgcttcccctctgcgttcctgcctctttctagaaggaggctgagagggggaagcctgaacccccaaatcaagtccgccttctttctctgtgcctgacccagggcaaaataatctctctgatcctgttcttgaccattgaaaaagcactttctctggtcgggatactactggcactttacatggggggcagtttaaccgcaggagtccgctttctgaaaggtgcagagggaggggattccgccaccagccgactgagaggagccccggccccgcgtggtccctcccagccaccctccctctgggattagctgccctggctctgctctaggcgtccccagcccgtgcagtcccggctggcgcaccaccatcgcctctgcagagcgcggccgcagcccggagcccgcagcccggagcccgcagcctggggcccgcagcccgtagcccgcagcccgcagagccgcgctgtccggggcatcccagtgcacggcgtccgtggacctgggacctcgaacctgggacgggcggaaaatccactgggaacacttgcatttctgtaggtgcttatttcacattcttgtcttttcttgcttgctcgagctgttcgtgggttactttctgccttagttaaaccaaaagggaaaggcggaagaggggaagccctgaagaatgatttagtggttgcccagcctcctttccaaggagaggtgttcgctgagcggctctccccgtccccgacactggcccctttaagaagccaagtcagtcctgatgctgctgtttgtattgctaatccccaggagccccgtttaaaaaaaaaaaaaaaaaaaggaagaaaaaaggggaggtggggggaccgggcagctgtctctttaaatgtgatttccttctattgtatttgaatcgtgatcaggaaaaaggaaatgaaaccagagacagagggaagctgagcgaaaatagaccttcccgagagaggaggaagcccggagagagacgcacggtcccctccccgcccctaggccgccgccccctctctgccctcggcggcgagcagcgcgccgcgacccgggccgaaggtgcgaggggctccgggcggccgggcgggcgcacaccatccccgcgggcggcgcggagccggcgacagcgcgcgagagggaccgggcggtggcggcggcgggaccgggatggaaggttaagtcctgagcagcagcagcagctgcagccgcctggagccaggctgcgcgccccggcccccgcctcggccgcggcgcgcccgcagcccggtgattcgctctctctctttggcgtttgaagggagcgcggtgactgtccttgagcgcggaggggcgagctcgccggcggagcgccggagcaagcggaggcgcaggagcggcggcgacggcggcggcggcggcggcgcccgagcacccgagggggtccgagccccggcagccggccagccccgcgccacaaagggagcgcccccgccgcccggcaccccgcctccctccccaatgtcctcggccatcgaaaggaagagcctggacccttcagagtaagtgcggcccccctgcccctgccacccccggtgtccacggcctcgcgtcccggagcgtcggggggacccgggcggcccgcgagggggctccaggtgcgcgctcgcggcgtgcccttggccccctgtgccgagcgctgggctcctccttcctcccgggtgattccgggggctctgggagagggactgggcggcgggcggcagggacaggggtcggcccggcgcctctgcgggccactccaggctactgggacgctccccaaagccaccacgggccagaaagtttgcacgggagcaggcacgaggagagcctggaggcgcgcaggtgcagtccggagagcgttctgggcttgactctgctcccttcttccctctccttctcggtcctttctctttgtccatttggtcttggaaaggggaacattccaagtggcggcctccggggtccccaacggccgccttcccggtccgcaggtggagccgctgccagccttgcggataacgggcgggtgaggggtccgaccgtccacctcggagctggctctgggcctccagggatttctagagcagcgaaatccggagtaaatctgagtaggtgtacccctcctcggggtccaccgatggggacatgtgaacctcgaaagttaatgcaccattttgtgtataggtgaattattctggggagtagagtctcgtagtttttagcagagtcttaaaagggtttggggtcagggaaccagagctctaatgagcattggccgcatctgttttctgagccgcgtactggtttggaatgtttttctatccctcacccattcttcagcgttaacatggggagtaaggggtgtttaagatatcattttcctgtcaacgcaaatgcccttttaagagtcattagctgtctggttttgagaatttttattcctttgaagtccccctctaatcctttgaagggatttgttacacaagaccaaaggagctggttaatgacttgtccatttgtgcttttaagagacatttgttttgttttttcttttcctgctttaaaagaattgtgctttcctgcttgaaataccgcacacacacacatacacccttcaatttcggctttctatggtgtttatttacctgggttttaccctcagttaccagcataaaagctcaacatattctcataaaacacaggaagtaccaccatccaatgagaatataaacatcactattcagtcttgaaggttaagacaccagttctgtaatgagctaggtttgttataacaaaaacccccacttccttcaacaaattctcaggagaaaaataacattcctttttaaaagtatgtttatgcaaacaatgggtttaaagggtggtttgatcacttttttaaaataaacttaaaactgagctctgagtttcagagactgggcaagatcatagtaacacaataagggagtgaattggatgaattggtgcctcatgcctttttgatcagcagaatttagtcactaatcctttcaatagaagattaatctgaaggtttcatttccctgaaggaagtttgcttctttcaaagtttgtgctttttcactgaggttagaaactgaaacatcctaacttcctaatacaacagatatctactgctggaggctcaccagctccttccttcacttcactatttgcccaacgaagacagattctgatcaaagagggacaagccagttgagaaattgctgcagcacattctccccatgcccttagaaattgttatgattgtcccagaaatccaggcttaaatgatactcaggtgtaatattcaagataagggtctgggagaatataaaatattaatttgagggtgaatcaatctaattcagtcattgtcttggattgtccactaagtataatgtgatattatcattaattaagtatagaaagacagagccaatatcttatactttacttctccatctcatctcaggccatcaccgtaactcttttactttacattcctcctgttgtccagtatcctactagatgcttcattgtgtacttcctcaaatccagcttgggtcattacaatcagcatctccaaattacagatggagacttgcctagctatatgcaaatgaaacatttggacagaaagccagccagaattcatgaacacagattcccttgctgtgctactggtggcccccactgcctcccctgtgagtaacaagagcagttcatttgaattccaggcagttttgcaccagctaagggcaaattctcttctttcacagtcctttggcagcatcaacatcgggacatccaatgtgcgtccaggttccatgagtggttttgaaagcccagagtaagaccatgggctgtggaaagagaagagatgcaactctgagttgatacacatgaaaaagctagggtattagttattagaaggggaaatggcagtccttatatacaatctgtagaaacaaaggaaagaaagcaaggcttcagtgaatgaaacctcgtctctacttaaaataaaaaaaattagctgggcctggtggtggacacctgtaatcccagctattcgggaggctgaagcgggagaatcacttgaacccaggaggtggaggttgcagtgagccgagattgtgccattgcactccagcctgggcaataagagtgaaactgtgtctcaaaacaaacaaacaaaaaactatagttttgaatttttttgagctagggtctcactgtgttgtctagtctagagtgcagtgctcactgcagcctcaacttcctgggctcagatgatcctcccacctcagcctcctgggtagctgggactactggctcatgccaccaagcctgggcaattttttatatgttttgtagaaacaggattttgccacgttgcccaggctggcctcaaactcctgggctcaagtgatcctcctgccttggcctcccaaagtgctgggattacaagcgtgagccactgtacctggccattttttttccccagataaactaacttgagcttcccattttcttgttccaaagatgatagtctcatgaagtgctgttacactgtgtctagaaagtgtgggcatggctttagcactcctaaatattcataaggaacacttcatacttcacatgacgggatcacctgaagttgtcagagtgttatagacattgagccacctagcctcctgtccccaagtataatggctgctgggctttatgggcacagaccaattaggacacaaggtcgcctggtaagttagtaccagttagaaataggagacatggatttatacctgcagggtacccaggaggaaactccctttgggaattttacagatggaagaaggtctgttttttgaaacataatagatttttaagaaatagatttgtgtttaagtaaggttccagagaacacttgctaattattataaatcaacacgtattaagtgtttgctgtgtcccatgtgggggacactagaataattccttccactcctttattttcttttagcaaagttatttatttttaaatgtaaaaatgtattcagattccagtgaagcaaagtgaacaggagatgctatgcatggcgtattaacgaaagaacacgtgtcacagcctattaacaattgctggattgagatgtcagtgtctgtttaattgccttccactctctttgaaataatcattgcccccacttcattttcttcctcaaatcaactttatccaaatcaattttactcttataaaaatgttcaggtaaggaaagaaaggcctatttgatgtccttcgtgtaacaatggccttacgatatgggattttcctccaagtattccttcagtaggaagaatggaaaatggaatttctgtaaaaaagtaaaattaggagaattcctattatgtcctgatggaattttgattttggaaagagaaagcaacctaaaataatttttggtctcattcttctttcttcctcacctctgcttttgtgcagttggttagggctggagggaggatggcactggggatttgcagattcttagcactctgggtcatctgctgccctggcagtgagcgactcttttagtccagagtgcgtcctttgaggttaggcagtgcccttgggtgtccaggttatgggaggaggaaaatgagggagatctgtgaagatagagtcagcggggagagtgggaaaaagcagaaggagaccagaggtgcccaggtagtgctgggcatgggcaggggcacagtgccacctgcaattgcctttgatgcctcttggtgccctgtgtttacttcttagacatctagggagtaaggtctggctctttcccatcttaacccaaggttggttgggactctgcagtctggccaagggatgtgttgtcctgtcccttctcccttaggtcactgaaaggcagtcaggtgagatgccctgtctggcccaaaacgatctcggaccctcggtgctggtctcactctggtgaggctgtccctgatgcttggccttctctccagggaaccagtggatgaggtgctgcagatccccccatccctgctgacatgcggcggctgccagcagaacattggggaccgctacttcctgaaggccatcgaccagtactggcacgaggactgcctgagctgcgacctctgtggctgccggctgggtgaggtggggcggcgcctctactacaaactgggccggaagctctgccggagagactatctcaggtaccctccccggcactccactgggccctcggaagggaggctgggtggtccatggacatctgcagtcggtgtgtgttgccccttaccctgctccaggctcggacaccacctatagaaagaggtcagactgcagaggctgagtctcagctcctgtgctgagaagcagagggcatttcttcctgtttgagaagcatgttctcagggttacgttcctatgtggtaaaatactaatatctttaaaggcaagagaattgtatacccaaaattcagaaaagtgcttcccttggggagcgggagaagctaggggatgggattgaggaggagtacacacggaggatcagagggactgggagtgtttctaagtttggaggtgggctctgaggacctcatttgaatgcttcagaacatatatgtatgttataaattttttttgtatgactccagtattatatgatgagaaatttaaaaatagaaagcatatggagctccaagcattgactcatagcaggaaggcagtcttcgaagagcagaaaggcaaaggccctgtaggcagttggaggtttgagtcccaataccattgcttcccagcttggtggccttgggcaagttatttaaccttcctaagcctcgatttccttatctgtaaaatggggatgataatagcacctacctctaaggatgtggggaggatttgatggaataatgcagataaactacttggcttggtatggatcaaatagatgttagctgctcttacataatcattattttccaatctaatgagcaaagggatggaagaatggaagagtaaaataggaactcgacaacaccaagtaagacaggagctgaggacatctcccatgctctgggccatcctattggccatccgaattttccagcactgtgtgaaagcctttgcctagaatgtactagtgtttctagtttccgatgagctgctgtggaggtaactgtctctgtgccctctactgtcagatctgctcaactgtgtagctgtcagtatttctccgttttcctggagcagagggtctgtgaagcatgcttccctgatacaccaggaccatccaacccatggaagcttgttgagacctcagcgcccttggctgctgggccagcttttcctcccaaacctgccctcagagcattttacattatagaaacaaaacaaaaccaaaaaaactgcaggcagtttcacagtgaaggaagctttacctaaagactgttagaagaagctttttgtccttgaattcccagataaagttcttgcagtccttgcagatatggtggttccgagaaaataagtaggattttgcaatgatcatgcttataattttggtcagttttctttttttttaagtcacagaaaatagaacttggataaatacagacctggttttgctcactcccagtttgccaagtcagtgagaaggcagacgggtaaatgattcccatcggacccttgactccatccctgtcaaatcatttgaatcttattaactgaagtgcagatagagtaaggtcagaagagccccagcttctccctatctctaccgttttatataacattcaggaataaaaccagtgctgcctgggcttgttaatcctttccattttcaaaaaggagaggaaaaaaaaaacagtctgggagaacccaatgttaattaacttgtgtcttggtgacatgaaataattcttctccctgccacattcctaggcaacatgttaattaactctgcattagtgcaggcatttccagccattctttaatatttatattattgttattaaaatgggcagcagagagcttaagatgggacatctcttgacagaggagaaaaattgtcttttgcgtcagggatggtcctttagccaaggtcttgtttactggcattcttagtatatctggcaggatcttttaacaaggcaagttggaggagtaactgaacgggccctctaatgtgtttgagttcttcttcacccctaggataacttgtccccgtgaggatttccaatggctgagttgcctgttacagttcttttccgacatttagcttcaaatattcatgagacccccatgcagaacctcaactctgctgctgtgttgtattgttgggaacccaagagcagctgttcatgtctgtgctgagccagatctccttggatcccttttcactaattcttgtgtgctgggagtggtggggtggcggtgatggcagtggttttgcttttaacagccagcacctgaatctgttagagccagaagtatgcctgccccaactagacccccaacggaccttaaccagtgacagacatggtgggagtaccaagccccgcagccttgcctggagccaggcataacttatattccagggtccctcccctctgagggactttgcctgaggatacaacttggcttggcttcctccccttccctccagcctcccctgctgccttccaggtttttcctgagaatgcctcattcataaatcactggcacatcaatccttgcctcaggggctgcttctgggatatccagcctaagataccaattcttggtgccagaggttaatgctcaagttaggtgtcaagtcccggcttattttttactaatattagaatctccgaatcccagagctggaaggggctacagagaccttctttttcagttcccttgctttacggcttaagtcacagaagcctgtacaggggactccatttgctcaggtcacctggcaagttagaggtcatgctgggacctgaacttgtctcccacatattcgtcctttgtccttcccttcatagctgcctgatgtgggttgtaatttaccccctgacttccctttaataagctccctccttccttaaggatcgcacaccccaggcagttggattcattccatgcacactgttttctcagtcgttcatccttgctcaggcccaaacttaacttacagagcagtcaggaaaccagaactgtctttccactctgtgacctccaatgtggcggttacctgcagctccaccatctgctacgttgggataaaatgttctccccccagtaatgagtttgctcccaggcggtgctttgaaaacactcagagatcttcaaatggaaagcaggattcagaggcaaattagctggccctggcccgaacaatgagctctccactcacagaccacctcttgtcaattccattaatctcgcccaaatattgcaaaatgtgtcaactgcccttaggtcccctacaacctctcagaatgtacccactgattctctgatatcctgaaatcaaccagaacttccaataagagcaagcattcacctaaaactgtcctaaaggttttatgtagaaaccacctgctaacatgctatgttttcagccacgagtgaaaattacttcctgcagcaagactggcgcagctgggaatacacccaagatgtgttaaaacataaccagcgttggcttagcccttgaccatgggtgccctgacatgcttcgtttggttgttttaacagctgagtgaggtggagcctatgatggctgccatttcactgaggctcagagaatcagaggtctctccagggtcactcagggctggtccgggacattgaagctgggtcttctctgcttccggtacttgtgttactgcacttttgctgttgcttctcaaatgtcagcctgcaaccagtcccccggaagtgttcgttaacgcacagactgctgggccttctccccagggtgtctcagttgggtagggaaggaggagggctgagaatttgtttttttgtttgtttgtttagtttttgcttttcttttgagtcaaggtatggctctgtggcccaggctggagtgcagtggcatgatctcggctcactgcaacctccacctcccgggctaaagccatcctcccacctcagcctcccaagtattaatagctgagactagaggcatgcaccaccacacccggctaatttttgtattttttgtaaagacacagtttcaccatgttgcccagggtggtctcgaacttgtgagctcaagtgatttgcctgcctcagcctcccaaagtgttgggattacaggtgtgagccactgcgcccagcctgagaatttgtatttctgtcaggttcccaggcagtgctgatgtcgctggtcccaggaccaacactttgagaaccactgcactgagccctgccatgttctgtctcccaccttgacactgaatactgcctgaaataagtgactgatcaactgaggcttgggagagtcttgatttaaatgtcagaaaagaagtttcccttttgattcatgccagtgggcagcgagggccatgaattaagatcctcccttcatggtggagagatgctgttggtcctccatatctcagaggcacgattagctgcaccgcgtgttttctgtggaactccctgtctcccagcagctggggccccagcgaataatcagggggagatgtgctttgcagcttatggaggtattcaaggccagctctccccatgggtagaatcagtggctgttgacatgatagagtttgggagcctcagaagaatgcccgttttattgcattcctggtcagtaccctctcaaaggggcccctagggtctctctccagctgctcttctgaaatgagggttcccctgggaggggacaggtaatacttgcctaactccttatgatagatcacatcagctgagagccttgcccacagaggaggagccagggggcagcctaggggaatgatgagcggttgctgcagacaaggagagggctcagaaaagggaggagttatgccagatccaaatgccagtttcatctgagttccctctgcctgctggtgaagactgcactagccggccctccttctggagccgaccttccctggcttcctgacatcctgaaagttcggcctcctttctagggctcatccccgagccctgtcttccaggattgtccctttcactgtcttcttagcttttctttcttttgccccaggctttttgggcaagacggtctctgcgcatcctgtgacaagcggattcgtgcctatgagatgacaatgcgggtgaaagacaaagtgtatcacctggaatgtttcaaatgcgccgcctgtcagaagcatttctgtgtaggtgacagatacctcctcatcaactctgacatagtgtgcgaacaggacatctacgagtggactaagatcaatgggatgatataggcccgtgtccccgggcatctttggggaggtgttcactgaagacgccgtctccatggcatcttcgtcttcactcttaggcactttgggggtttgagggtggggtaagggatttcttaggggatggtagacctttattgggtatcaagacatagcatccaagtggcataattcaggggctgacacttcaaggtgacagaaggaccagcccttgagggagaacttatggccacagcccatccatagtaactgacatgattagcagaagaaaggaacatttaggggcaagcaggcgctgtgctatcatgatggaatttcatatctacagatagagagttgttgtgtacagacttgttgtgactttgacgcttgcgaactagagatgtgcaattgatttcttttcttcctggctttttaactcccctgtttcaatcactgtcctccacacaagggaaggacagaaaggagagtggccattctttttttcttggcccccttcccaaggccttaagctttggacccaaggaaaactgcatggagacgcatttcggttgagaatggaaaccacaacttttaaccaaacaattatttaaagcaatgctgatgaatcactgtttttagacaccttcattttgaggggaggagttccacagattgtttctatacaaatataaatcttaaaaagttgttcaactattttattatcctagattatatcaaagtatttgtcgtgtgtagaaaaaaaaaacagctctgcaggcttaataaaaatgacagactgaaatacagtgttgtttatttgattacgacttataatttgggatggcggggaaatgctctgctttttcttttctaaaggagaagcaaataagcaatttactcttaggtcaaataaaaacttctgtgtattgcaagggtttgtatgaggcaggcacatttctatattactggcaattatgtaacaggtcatcatgtagctcagaggaatgtagaataattaaattgttattgtacaatatgcatttcacttcagcattgtatggagtgagtggaaggcaagatcattgcctttgggaaacttgtaacctagaaaggacacaaatacataaagcagattccctttgggagagaaggtaattacctagtttgaaatgtggcaaagatgctgagcttgacacttcgattttccaagacgggtgtctcagggtgttttatgacaagtggttaagaggacctttactttgcggatttaaagcaggcaccttggtttgtgtgtttgccttcccccgagtcaggccgcccccatgaactgatgcagagcgccaccttctggccatcaccttaaagcgcgctagcccaggagggtcccgacgtaggacaaacctagatgaagaagaatatgcttttcaatgatttccttagagtactcggaaatgcaagaagtctaaatgtgttcagttattaagacacaagaaacatgcagctaaggctgcatgttaactataagattcctttaaatcttcctaaggtttgtgatctttgttatttttaatttttttaaatccctggacagagagacaaatgattttttttcttctagaggagaaataatgaagtgatggctctcttggtctgtaaaatgctacaagtagttgggaaatttgactgcttaaggtggcctatttaaaacaaatccagttacattgcattccagctcaggtgatggaaaggcattaccagcgaggggatgtttgttctaagtcagtggttctcaaactctctggggaccagcagaatcaacatcacctggtaacttattataataaagaaacagattcatgggccccaccccagataccctaaatcagaaaatctggggatggggttcagcaatttgtgggttgtttgtttgtttctttgttttgagacaagatctctctctgtcccccaggctggagtgcagtgttatgatcctggctcgctgcagccttgacttcttgggctcaagcaatcctcccacctcagcctctgtagtagctgagactacaggctcacaccaccacgcccagctaatttttatctttttggtagagattgggtttccccatgttgctcaggctggtcttgaactcctggactcaagtaatccacctgcattggcctcccaaagtgttgggttatagacatgagccaccgtgccccacctgtgttttaatatgccttaaagatgattctgacgcatgctcaagtttgagaatggctattctaaaatatctcccagttaggaagatcaagcattctaagttattaatatttgatgcaaaggttaatcactgaaactcttccacatgtagatactgtctacccttggttcctaaactgaaaactttcacatacattcatcactcatttgttctgcacatcatcttcaaaatcaatcacaatttaattcaccattttaaaccatatttacagtaataatagtaatggtaatagattttatctatgcaattatcttataagcagtattaagtaaaaatacaaatgatcattgctttggaaatctaaactttattcttaatccccattgtagcacaacacacattaagattcaagaaatcagccaatatttttgtcatgctcaacaaagcaataattaaccttttccatttgtcaatggcaccatcttgcagaattgtggatgcgcaggcagtctttgtagcacgtcaccccaggggcccaaatatctaacccacaactgacttaagaggaaagacatgtaaagggactcagtgggaccagctcccaaggtctaccctggtggtccttgcatgaatgtgttactgtgtgtgctctagacctagggtcaggagaactgacatctgctctcttccctggtccgtgccttcattaaagcagttggctggaacattttgcatcctcttatctcttgaatgtcttttgccccaaaccagcttccttttattgctgcttctaaaataactactacttttcaggaaaacttggagtcctacaaagttaaaatagaacaagcatctaggagatttatcatctgaagacttggatttgaattccagtggacatgactttaattgcttaataaccatttacatagcacttaccatttgccaggcactcttctagttttacatacattaactccttgaggccacataacctgcctcggtggcagtttctacttcttatcacctgcattgtgctgccaaggaaaatgaagcacagatggttaagtaactaacttcctaaggtcctgcagctgagaagtgacagcagtcgctttaaccaaggcgcttcaccctgtgccctgctgctctctcgaagtctcacctcactgaacagcaggtttcccatctgcaaaagagggagaatgaacaccttccgtcccagattatttggggatatttgagtttaggcagaaatgtaaacaaagcacaatgatataggattagcaccacaataaagcaatgtaaaaagtgctctggaaacgcagataagggaacaattaaattggcccaagcatatctgtctggagtaaagagaaagagacatttgaaatggccttggacctggaagagcaaagacttggggaccttgacttgcagcatgagtatttcagtgagcccagtttgtgtatgggtgttggctggaggccagccagtgaagggtttaaattttgatgctgtcactttctggtggggtgcccttaattgccagtttctacaagatctgggccctgtggacattgctgacctgtgacttgaccttggaccctcagctcaagccccgcctcttccaggtagccccctcaatctctccaatttacagctgctcatccaatcattctcaagtactagaaatcttctaattaataggataaactattaatatgctggctcctggaccaaactgcaaatctacagaatcaggatctcttggatgggacccaggaatctacacattcatcaagcaactcctcttcctttgttgtcccctgacttcaatagaacattgctgctaaaccctgaaccctgagttccacaaaatcagggacactgtctctggtttacccttgccagactgtagcacctgcctggcacatagtgcccaatatatttccttccttcctttgttccttcctccttccgttcttcctccttccttcccttttcttcctttccttctcttccttccccccttcccttccctctctctttctccctttctttcctcctcttttttttttttttttttagagacagggtcttgctctgtctcccaggctggttttgaactcctgggctcaagcaatcctcttgcctcagtctcccaaagtgttgggattacaggtttgagccaccatgcccagcctgattgttatattttctttgttttatttaaaactttgttctctgcttttttctttctttctttctttcttttttttttttttgagatggagtctcagtctgtggcccagcctggagtgcagtggcatgatcttggctcactgcaacctccacctcctgggttcaagagattcttctgcctcagcctcccgactagctgggatgacaggcatgcaccaccacactaggttaatttttgtaaagacagggtttcaccaggctggtctcgaacttctgacctcaggtgatccgcccacctcgacctcccaaagtgctgggattacaggcatgagccgctgcgccccacctattctctactttaaaacttgatttgagaagaaggccttttctgaaactagcctttaagttctttatcatcgctcacagcatttaggccaatgtcatgcatgtggaaaagcaggaacaaatatttatggcatgagtagctaagagagagggccagtaagtaaataaataggggagatgaggttttctataattttaagaataaatggtaaatcaacatcaaagtaggaagtaaaacccaggaatttgcagggaaggggcaaggaagatagaagataagtctgcaacatcttgttattccagaaagtaaggaaatagtaaaaactaaataaataaatgaaatgaaatgaaaaaaatgatgtaaacatgtcataaagacaaaggagccagcttaaaggggctctcaatagccaaatctaagacaatttgattatcaaaacaattaaggacagtaacgaattaaggatagtaatgagttttaagcatggcagggggcagaattcatgagtttattccagtgataaataaatgagggagaaggaaggactcgtgtttacagcagaatcttggatgccaactggtaaatgggaagacagcatgagagctggaaaaatcattttgcaactgtgacagttaagatagaatcaagcaagcattatcaatagatgctaaatttcaacagagaaacaaagaacaagatatggatatttggatggtcttcaagtaccttcccatatattcctcactagctatgagaaggaaaaacgctaattacacagtagagaaattggatagcaccttgaccaggtgatctatgtggggcagatgagcatctcaggcctccagatgtgatatctgaaaaggacagagaggatcactctttttagtagttctgctgagaatatataacatgtctaattatgagacaaatcattagacaaacccaaaatgatgaacattctagttttaaaagttgatggggggggagtgtggactgtattctttgaaaatgttcatgtcatgaataataaagaaggctgtgggaatgtttcaggttaaagaaggctaaggagacctgacagctaaatccagcacctggcccctgtactcagtccagtgctggagggaacaaattctacaaagggcatcattgggtcaagtgataaagtcagaatatgaacggatagattagttaaaaagtattaggtgttaatgtaaatgttactgaaattggtaattgtactgtgtttatgtaagagaatgtccctattattaggaaatgcaccctgaaatatttaggagtaaagtgatagaggcaggaagaagagaaattctaggcagacaggggtgggtccctggcaaaaccccaccttccagccaaaaaccctgcaaccctctgcccaaagtgagaacttctatccctgtttgcccactctctccccattgattctttctgattaatgtctttttaccaatccaatgttgccttctctaaaactacctatggcccactccaccccccgccatcctgtgcctatatagaccccagactcagtcggtagaggagagaagcagcttgactggagagaggcgacttgacttcagagggagagctggacttcagaggagagattaacttcagagaagagccggctggagaacgccagatctcagggaagattatctgcttgtcccgtcccctctccagctcccctctccactgagagccatctccatcaataaatacaattctccacctccaccatccttcaagtatctgtgcgacctcattcttcttggatgctgaacaagagctcgggacccactgagtgatggtacccaaaaaaggctgtcacactggccctttgccctcactggtggagggcagcctccccatgcgatgaggcgagaggcccactgagctgacaacacaccactgtccacagacaccggagctaagagagcattgtaacatgccctctggggctttgggggtcacaggcattcccacctgggcactgctgcagggcctgcagggagcctactcttgccgctgcccaaagcagccggccagatcctgcacttgttcacccacgcgttcctcgcaagaagagcttgagcatggcgggccgagtgaacagggcacgcctatcgcaagtctgatgaaggggtggagaaaaactcctgcatcaaagagccattatatatgtaacttaaatagttgagaaaaaagttgtctctgtgtgtgtgtgtgtgtatgtgtgtgtgtgtgtgtttcaagagagggagagagagagagaggagagaggagaaatgataaagcaaatgagatgaacatattaacaacaggtgagtctaggtaaaggatgtactggtacactatttttattcttgcaacttttctgtaagtttgaaactatttccaaataaaaaggtatttttttttaactcacaaatctcggctttttcttgttttgggctttttggtttgattaggagaagaacaaggcagataaagagaggaaaaaatatagtgtagaattcagtaatgtactactgttcatttgtcacaactttaatgtacttttgaccttacaaatgtacctcaagcaagtaattcccctctccacacccactccccataatgggaagaatgtgtttagaagggttcacttagtgcttatttctgaagcaggttatttctcaaccttataaaatgagattaccagaaattctgcatttcctttgtaattaggatcaagatgtaatcatctggccctgaaatgtgtatattataggggtaggaatctaagctataatgttttgtatgtacatctaagaattgagttaaaagatgtttcaaagcaatgaagaagtcacatccattctctaccagtggccatgtattaattctcccggaaaatcatttctccgagttaatagaatctttgaagctaaatcaagtcaatttccattgtcacattgtgatgcttttgaactgggctcactgaattatcctatttgatgaccactttaaagatggctttgttgtgagcctcagcaaacccacagccgtatctctgtgtcagcctccccaccccaccccattcattcaaatcacttaatgagcagctcaaggcaaatgccccccgtaactacatcccaggcaaaatagatatatagtaggtaaaatagcctatgtgatgtgattgaaagaacactgaaatcaggaaacctgattttgccactaattagtggagtgtctttaggtaggtctcagtttcctcatttgcaaactgaggagcttacagtagatgatctctaggaatttggtagtcagactttggtttacagacaggtaagtatggaatttgggaggaagcatttgtggtagccactccccaaggtgaccctagtgattcttgtttcctggcttcacctcctgtgttgtctccattcacatggaatagggctaacttgtctaaccaataggatattgaaatgatggaatgtgacttctgaggctagatccagactgttgcttccaccttgctgtctcttggatcacttgttctggagaaaaaaaaacaaaaacaaaaacaaaaacaaaaaaacagctgtcatgccttgaagctgttcagacagctctacatggagctccatgtggtgaagaggaactgaggcctcctgccaccagccagcactcatctgcccatcttataaatgagccaccttgaaagcagagcctctggcccagtcaaagcctcagacaactgcagtcccagcttatatcttgaatataacctcgtgagaaacccccaagctggaatcagtcaaccaagctgttcttcaatttctgccctacagaagtgatacaagataaataattgttgttttaagccactgagttttggggcaatttgttatacaataagcttttattttgtatgcatttttaaattcttattttcccagtcatccactttttattatattgtacaaaagtgtcaatccatggtagattgaaagttaaaaactccagagttcgaaaagcgctgatcagaataatacaatcttagatgaaggctgaaaaagtttttgaaattatccagcccatcctctcactgagtgaataacttgtctcttacagttttctagcaataaaattctaattcttggcagcattatcaccattaatgttattaaacatgacttttattgagcatttgccaggtagatgcactatcctaagtattttatggtctttacaccaactctacacagcaaatatttctatcttaattttacagaagaggaaactgaagcttgggataaagtcaagactttaattcatcgaggtcatctcattctagactatattgcctctagcttcattaatttgtttatctcccaaaacttaattttatagaaccaaataacatatatatattttcagactgctggaaattactttctcacttattttaaggaaaaagagacagaattcaaatcctaggccaggtgcgctggctcatgcctgtaattccagcactttgggaggctgaggtgggattgcttgagcccaagagttcaagatgagcctgggaaacatagcaagaaccctgtctctataaaaaataaaacaagggctgggtgcggtggctcatgcctataatcccagcgctttgggtggccgagaggggtggatcacgaggtcaggagtccaagaccagcctggccaggatgctgaaaccctgtctctactaaaaatacaaaaattagccaggcatagtggcacatgcctgtaatcccagttactcaggaggctgaggcaggagattcgcttgaactccggcagcagaggttgcagtgagctgagattgtgccactgaactccagcctgggcaacagagaaagactccgtctcaaaaaaaaaaaaataaataaacaaaaaataaaataaaataattagccgggcctggtggcacacacctgtggtcccagctacttgagggactggggaggggaggctgaggtgggaagatagcttaagcctgagaggtcaaggctgcagtgagccaagattgtgtcactacattacagcctggatgacatagtaagaccctgtgtaaaacaaaaatattaatatagccaatgtaaaccaagtgttaaaagcatttgccaacaataaatgttttcattgcatttaatgttacctaacaaaatgggagggagtgtaaatgtataagagtcatctttggagacaaatggatgtggttctagttagtcttctcatttgtaaatgaagataatatacttacattagcatatcattgtaaaagttatgggtaatctacatgaagcaatgagaacagttgctggcattcatgcatgcatgcattcaataaatatgtattgagcgtttccaaaaggccaggcactgttcttggcaatggaaatacagtggtgagcaagatagcaaggtccctgttaccacagcacttacattctagtgggaggaaacaaaataaataaatacacaagtaaatgaacaaatttatttcagaaagtgatcaatgaattaggataaaatagagcaatgcgatagaatgtcaagagatgcagagagatgtcgttttagaggagggagggcgtggtcagggaaagcctttgtgaggcagtggctttgagctaggaccgaatgtcaggaaagattcagtcatacattcagaaacagaggaaacaggcaagtgaaagtcttaagtcaagaacccacttgtcgagcttaaagaacatcaagaagtccaaagtagctggaggaaaggtgatacatgagaccaaatcatgtaggatcttacaaggctgaagatgagctcagattttattctaactgcagtggcaagactttggaatcttttaagcaggagagtgacatacatactctgattagtgtgttgaaagatcactctgtgtgtgcatggaggaccctagagagacgagctgggaggctgttgcatgatccaggtgaga

SEQ ID NO: 125 - DNA, 2304 bp, Homo sapiens
gaattcgtccaaactgaggatcacaagtctccacattctgagtaggaggatgagggtctgagttaggatttgggtcctgcagggcttgctaaggaatcccctgatggcctaggattccacgcagagcacatctggtgtgagagagctcgctgcaagggtgaaggctccgccctatcagatagacaaccaggccaccaagaggcccagccctccaaaccctggatttgcaacatcctcaaagaacagcaacgggccttgagcagaattgagaaggaaatacccccacctgccctcagccgttaagtgggctttgctattcacaagggcctctgggtgtcctggcagagaggggagatggcacaggcaccaggtgctagggtgccagggcctcccgagaaggaacaggtgcaaagcaggcaattagcccagaaggtatccgtggggcaggcagcctagatctgatgggggaagccaccaggattacatcatctgctgtaacaactgctctgaaaagaagatatttttcaacctgaacttgcagtagctagtggagaggcaggaaaaaggaaatgaaacagagacagagggaagcctgagccaaaatagaccttcccgagagaggaggaagcccggagagagacgcacggtcccctccccgcccctaggccgccgccccctctctgccctcggcggcgagcagggcgccgcgacccggggccggaaaggtgccaggggctccgggcggccgggcgggcgcacaccatccccgcgggcggcgcggagccggcgacagcgcgcgagagggaccgggcggtggcggcggcgggaccgggatggaagggagcgcggtgactgtccttgagcgcggaggggcgagctcgccggcggaggccgagcaagcggaggcaggagcggcggcgacggcggcggcggcggcggcgcccgagcacccgagggggtccgagccccggcagccggccagccccgcgccacaaagggagcgcccccgccgcccggcaccccgcctccctccccaatgtcctcggccatcgaaaggaagagcctggacccttcagaggaaccagtggatgaggtgctgcagatccccccatccctgctgacatgcggcggctgccagcagaacatcggggaccgctacttcctgaaggccatcgaccagtactggcacgaggactgcctgagctgcgacctctgtggctgccggctgggtgaggtggggcggcgcctctactacaaactgggccggaagctctgccggagagactatctcaggctttttgggcaagacggtctctgcgcatcctgtgacaagcggattcgtgcctatgagatgacaatgcgggtgaaagacaaagtgtatcacctggaatgtttcaagtgcgccgcctgtcagaagcatttctgtgtaggtgacagatacctcctcatcaactctgacatagtgtgcgaacaggacatctacgagtggactaagatcaatgggatgatataggcccgagtccccgggcatctttggggaggtgttcactgaagacgccgtctccatggcatcttcgtcttcactcttaggcactttgggggtttgagggtggggtaagggatttcttaggggatggtagacctttattgggtatcaagacatagcatccaagtggcataattcaggggctgacacttcaaggtgacagaaggaccagcccttgagggagaacttatggccacagcccatccatagtaactgacatgattagcagaagaaaggaacatttaggggcaagcaggcgctgtgctatcatgatggaatttcatatctacagatagagagttgttgtgtacagacttgttgtgactttgacgcttgcgaactagagatgtgcaattgatttcttttcttcctggctttttaactcccctgtttcaatcactgtcctccacacaagggaaggacagaaaggagagtggccattctttttttcttggcccccttcccaaggccttaagctttggacccaagggaaaactgcatggagacgcatttcggttgagaatggaaaccacaacttttaaccaaacaattatttaaagcaatgctgatgaatcactgtttttagacaccttcattttgaggggaggagttccacagattgtttctatacaaatataaatcttaaaaagttgttcaactattttattatcctagattatatcaaagtatttgtcgtgtgtagaaaaaaaaaacagctctgcaggcttaataaaaatgacagactgaaaaaaaaaaaa

SEQ ID NO: 126 - DNA, 477 bp, Homo sapiens
atgtcctcggccatcgaaaggaagagcctggacccttcagaggaaccagtggatgaggtgctgcagatccccccatccctgctgacatgcggcggctgccagcagaacatcggggaccgctacttcctgaaggccatcgaccagtactggcacgaggactgcctgagctgcgacctctgtggctgccggctgggtgaggtggggcggcgcctctactacaaactgggccggaagctctgccggagagactatctcaggctttttgggcaagacggtctctgcgcatcctgtgacaagcggattcgtgcctatgagatgacaatgcgggtgaaagacaaagtgtatcacctggaatgtttcaagtgcgccgcctgtcagaagcatttctgtgtaggtgacagatacctcctcatcaactctgacatagtgtgcgaacaggacatctacgagtggactaagatcaatgggatgatatag

SEQ ID NO: 127 - DNA, 96598 bp, Mus musculus
  misc_feature (16721)..(18461): "n" at positions 16721 through 18461 can be any base.
  misc_feature (21639)..(21658): "n" at positions 21639 through 21658 can be any base.
  misc_feature (31832)..(32269): "n" at positions 31832 through 32269 can be any base.
  misc_feature (48053)..(48314): "n" at positions 48053 through 48314 can be any base.
  misc_feature (53839)..(53964): "n" at positions 53839 through 53964 can be any base.
  misc_feature (58514)..(58548): "n" at positions 58514 through 58548 can be any base.
cgaactcagaaatccacctgcctctgccttccatgtactgagattaaaggtgtgcaccaccactgcccagctgagagagaggaactcttagctactgcttctggggatgcaagttattacagctatttggaaaccataagaagcttcttcaaaaacaattctcaaaaatattttatatatatatacacacacacacacacacacacacacacacacacacacatgtatatgtatgtgtatttaaacaggggactagaaaatgggttagtttttaagagcaatgtttgcttttccagagggcctgggttaaattcccagcaaccacattacagctcactattgtctaaaactctagccctggagaacccaacaccttcttctggtctctgttgacacttcatatgcatgatgtacagacatacatgtaggcagaacatccatacacataagcaaaaatgaagattaaaaactatttttaaaaacctccaaactacaattatcatatagtattggacaatatgatatcatattgagcaatctaagaactgatcatatcctggttgtggtggtgcatgctggtaggatttgctgaaggagatagaggcaggaggatcatgagtttgaggccagcctgggctacacattgaagaaaaataaaaagaaccaatcatatatccaaaggaaataagataagtttattggaaaaaaatgcctgcatgggccagggagctagctaaggtagtaagcatgcccattgctgacgtgcctaccaacctgactttgatccccaggaactatgtggtagatggagagaacaaactcccgaatctgatctcctttgatctctacatatatgctgtgtcttgaatatagcagacacacacacataaatgaaatgaaagaaaacagaaagaatgtacttgtacccctatttgaattgtagcattactcacaatagtcagaattcaataccaaacaacagatgaatggatagagaaaatgtgatacatatttgcaataggctattacttagccattaaaaaggatacaatcctgctgtttgctgcaacaagaatagaccaggaggacattctgtttagtaaaagagtctagacataaagcattgtagtatatgaccttgctcatatgtactacttgtggaaggtgaccagacataagcagtgttgggtggtgggcaattgtcagagagtgggaagaaaaggcagggaataggttagttaaggagtgtgagctggccttgaccctgaggcatggcaaagccttcctttggtccaagggtggatactggcagttcgtgcagaaaatgtctaccatagctttctccttctgagtgtttatggtctgaggactgtgcccttacagggactgcttctactgagattagctaaacctgttctttttttacagctgtataccataaaccttcttccttgttcatctgtatgtaataacaccatctctttgcacagctgtatgcaataaccaaccctgcgcccagtctggtcagccctgtttaacaaacctgctgacctttcaggatgctgaggcatctccagctgatagcccagatcaccaatcccaggtttctatctctgttccctctgttatttcttcattttcctcactaccctactctgtccctggacccctgctagataaatcaaagggggctggggctggggctggggaagataggacagggtaacagtgcttgctgctcctgcaaaggacctgggtgcagatctcagcacccacacagtgacttgcatgacctgcatgcaagtccagagccaggggattcaatgctctattgccctcttctggcttttgcggactcctgcacacacacacacacacacacacacacacacacacacacacacacacacacacacacaaaaaagtagagaggagagagagagagagagagagagagagagagagagagagaggagagagagagagagagagagagagagagagagaaaacagctgtgcattcggattgttcccactcttctcctattctgattgatgttgctatgaacattcacttacaagctgttgtgtgactgctatgctttcctttctcttgtgcagacatctagaaatgtatgtatgaagcttcttaattctgacctgcctggggttacaagtgacttagtactacaggctgtatcctaactcaatattttttttgaaatgaacgacttggtcttaatacatatagtttaatattaaatgacatcactgatgaatttgcttaaaatctatcaggtatctgtatactcaccttgtctgatctttagagacatggatattccacacagacaacagtgctaagaaatatgttggctccacattttaaaactatatatatatatacatacatacatacatatatatatatacaccccaagaatctgttatgtaccagatagagtgttcagactggaggacttaaagagcaaatgatctaacatcagaaatcattttaaattttgccctgtgcatgctaaattctactcaaacctctttatttgtgtatttgtggatgttactatttgctaaatacacacctcaaaaactgtgccctgtctgatgaacataaagttttcagaaccccacaaacaagtttcagctcttctagagaatcctagaagaccacaggcccctttatcagtaagcctttaaaatacactctacttttcccttgtctcaagaattttttgcttctacttcatttataaaagaaaacagacgatgagacttgtaatttaatggctgttattaatcaaatttacttgtggattgggcatttccccataagtgtatggaaagttgtttattttcctccacttcacagcatggattaacatgtcatcagacttattggttcaaaacgtagttcataaataggttagcagggtaccccctttcctttcaatattggtgcctcttcccttgtgatatgctctgaaaataagtgaagcagaggagaattaaaggctaatttaatccgagaacctactttctaatactggtttggggtcaggctgaacatattattctaaaaaaactttttttaaaaaatcagaagcaaggacagacagctaattaaacagcgagattttctattctaatgaacggctcctcccaagtctcaagtctaaagcagctgcactgaaagactttgccttttctgaaggtcaaactactattcaagagtgcccaagttaacagttaaacgtaattagcaaagtcttacaagactctttcttttcaaagaccaaacaaatttacttactattaaatggagtattttcattttgccatgcaatgttttctcccttttggacagaagagggtactcagacccttggggttgaaagggcctttttctaggagttgaagtctttgggaaacgatcatcatgttttcttaaaaacccttttcacgatacgagtatcatatgcctgtttaaaaacttcttcttctttacagaatggctcatttgattatggatagatgatgtagtctctttcttagagtgtaccagatgttgagtaaggcttagtctgtctttaaagagattcacttttccctcccctcctcacatctgccttctccccctccttgtcttcctccactcctggccccctttctcttcctcctcctaacaggtactacaagaggtacacacacaacacagcacaacagaacaaaacaaaaacaaaggctaattttgaaggaaaagttgactgaaaatacctgaactgccccttcactcgctgtattaaagttaatataaacggttgagtgacttagagccatgtagtatgtaatatattaatggagaaacatggctgcatgaagggacaggtgcctgttggaggtaagaagctgaggcaggcagagggcttgaaagcatctgggcggtttgctaggccacagctgcatactctgcactccacacctggaaggaaacccagagtatggggtgaaagaccagctggtgactgtggtttgtgagtgccaagcagcaagtcttggaactttgtgagttccaaacagaatgttgaaatgaagagaaaggcagacagcaaaagctctttgcattccactggcttccttcttccccagtgctccacagagctctgggtaaaacaggaggcgactcatccagtcagtaactgtctgatagtgatagcccaacattaactaaccaacgcctacactcccagtcctgcttctctgggctgttcctatcttaatgatccttattgtgaaccatgaacctcaagtgctgcatctgggctgaactcatcatataggttgatcatagcctgggaaggtaataattggagagaaaagcaagtagttgatttgcttcaatctgaaaacatcaccataggacaggaaaagtagaaaagttacaggcttcacttgattggtgactgatttaagtaaaatttaatgctgggttagtgactatatttactgtagtctgcaaaagttctcaagttttctactatcttttcctcatgcacaataccttttgcttttctggttgatttgggacacataaatagctttaagaagtattgccttaagaagtcttattgaaatacatagaattctcatagcctggagactattggcatgaaagttgctaggttattactagcttgtaagctaaataatttttaaaaaacaatttattgaaacctaactgtcttcaaaataactgcaaaaatattacaaaagagaatccactatcaataaatatttcacatagggttctcttcatggctttttaatgagattgttatatataaataaagaaatgtatactttttttttttaggttacatgatagtgtaggttttgagattgagtttcaaataccctgagacataactttgtggcattctaacctaaataaatcatttccctacaagctgcaaaataattaatttttaactatacctatatatgattttttaaaaaaacatggattcctgaattcttgcatacagtagagctccaggcgaggcatagtggaatatgactgtgttcacataaggaactgagggctcctgagttcaggtgagttgggttatttcgtgagacccccatctcaaaacaacaaagtagcttcccgaatctcctttgacaccaggatttcatttctgctgtaataatgatagtgtgataataaaaagtcggcaaggcatttcaaggctcctggtccagttcgcctgccctagcatgttaggataacagtcttatagatgggaggcaggaagtggggctggatggtctactttgtggtaaactcctaactttgcatgtttcacaggaaaataatgtgtaagaaattaataatccttatggttttgggattccagacagcatggacaataataccatcaggggtggcacagctgccttttccatatggaaaaaaagcagtagcaaatagtttttgtctatatttttaaaaagcatgctaagtgaatcctctactacagagctacaaacccaacccagtttttttgctgacttttgtaagttctgtgttgcctgcttggtgtggtcactgatacttcatcccagttccctctagtccccaggtgactaagtagcaggctcttctaaattctcgagatcagacaacaaacgaagagcctccaatttgtgatgttttctcttggcggaacaggatgtcctgggcctggatacaggaaatgccttccctttctaagcttcagactaacttctcctctttcctgttttttctttatttgtttttttaaattccagctctgtctcgtcttgtgtagactattgagggtctgcaggttatcgcttctcctggccatccttagaattctaagacctcatgactcaataagtgctgaacacccctctctttacccagtggccaagttagagctacaaacggtacacaaatactcatcttcaaagatcgtatcttagcctgtaagaacaaaaaccacacagaacgctcaaacacaatcgtcttgtgagtgtgcctatgactgagttttgggccattcagtgcaaaaactccaaggactgatgctactactatttggaatatctggtggtgtttagacatgtgtgtccaagagttttataaaattatccaaaagaactatatcctctttcttctaccatagaaggttaaaaaatggccaggaaagacaatctaggaactacatagacaatatcgatttctctttactgatatttctcatgctcaatggtagtccatcacaccaggtaaaaaagaagttctctccaggacagaatgaattccgatttgagtgtcagcttgttgtcttgccatttaagggggacttgaagaagctatttactgaagcattcaaggctcactatgatagtcatgtatgactgggctttgtgactagaggaaactagggatttgtgttccaacaagctgacacttggtttgtggccaggcacggtctcagggtgagctgctctattttcctggccttggtgctcatgtttttgttttggtaaagctcaggtaaggtttggaagctctttcgtgtcctgtaactcaatgactgtctgggccgacaaggctggagaggattagtcacatcactctctccacaagcacacaccttggatattaatggtgcagctggttgtcagccttgctttttctgaatcctgctttccttggcacatcttgctttctttagtaggaggggacctgagggtgggtttctcagcagatgaatttagaatttagtccaagtctgcagccatggactgctgacaaaaactgtttctatttgtggggtttccctggagtaagttgctgtgctagctttggactttcttcagactcagtctctaacactgtcctgactgcaaagtcctctgacctccctacgtgggcatttcaagggtaaagttacacatgggtacttttgtggcagattatctttttttttaaactaggcacatgtatggtatgtgtttatataaacatgtttgcatatgtatagggatatttgttcatggcacatatgtatgtataagcatgtcaaggcccagaggtgctagttgcagattaaatttttagtcaatttaaaaagtaaaaaaaaagtcaggaaaagtcatttcaagtgtgtggtccaacatatctgaagccttgcgtttgaagtttaggtgcttgaaactcactgtgtattttataagtacttcacatcttctttagaactagctgcatcctcggtgcatacatggctgatagctcctggattggagatgcatgtctagaaaaattcttcccaagaaaaattataacagagaagcagcagctcaccccccacagacacacacaccctctcttcagctcataaaggagtataagccactcattctagcatctatcaccgttagcattgccacacatcaactgtctgacacaaagaatctctttgagccatagtagaattagcaaaagtattttcctgtgatctggcagcttccagaacttgccaaacgttgaacagcactatgtgcacacactgacaaagcaaactgatctgagcagctaaacggcccaaatgctcagaaagacatgcttctgttgccttctgtatgctcaatgcaccttccattacaaggttgcaggaaactttttttttttttccaaatctgcaaaaatgtgcaaacagaagggtaagcctttttgagtcaaggggactggagtacacaaatgtaaggaagacatggtctctcattgaaacttccggctggggagggaagaccatggataaactacacaaagggcttgtgtctacagtgtggcgaggatgaaaatgagctgccggtgcctctcaactatggccaaggattcttttgcaaatccacattagaatatcatgaagcaacccccacccgttttgtgggctgatttgttgaaattgcttgaaagttagggtcaaagggacatggaaagtggatcaggttgtttttatcggggaaaggaaaaaacaacagatatgaaaggtgtggattcctctgtggtgacaagttggggtttttcccgaggacagacaggcagcttgaagcatccccacttgcctcctagattgccaacggtgccttttggatataacttaacctgcatgcctttagctttccatgtgctattgctgaaatgatctacttaaattacttagaaacaatgcctgggccacaggacgcacccgtgtgatgcccctaatggttaggttgagcactaaatatgcaataattgttacctattttgccctctattgttcttaaagtttcacgagaggaggcaaggctgttgaatcacgtaataggaaaagagaacaggcaaacattaatgagtatcgaatccctctctagatggcaaacctggggtaaagagttcaaggtgatttgcctaagggcttagaggctgctcctaaaataggaggggctcctttaaggaggtggtgatggaggtcccaatgggcaagtgcttagtataggtacaggttggagttgcaaaggagaccaaagttaacctgacttgtcctgttctttggccttatacctgctgtatacaaagaggttacaaacccagaatcagtgacactcaatagcatgctgtacagaaagcaggtaggctgagctctgtagaaccatttgttttcattacaaggattactgttaacaggtctttagcggtagcagacagacccccatttaggatgttatgatatattttggcgcgctctcatatcctggcacagtgcctggcctggcacccagatgacacccggggaacgtttgtggaatgaatacgtgcagtctagtttgtagggtgggatggggaaggagacagtaggataactttgcctgtgatgcaagctcttcttcccaagaccaaagttctatgcactttgcagcctggagcctacactattttctggtgtgtggaaatccatttcagcccagaggcttgggttgaagactcgcagcacgcctcgcctggacgcactcatcttagtataagcagttttctctgaagcccttatttttttggtttgcggtttatttactttagcgtttacagattccaggagcataggggtcttagaagcggggtcaggaccgaggtcgcggtttgtatttctttcctgcttcgcgatcacaacatcagcaagtcacaacatggttcctttatttgctcactcgtcagggtagcgtttcttttacctcctaccgggcgacgaaagacagacccagctcgaattcagaaaagggctctcacacgattaccccgcatcctcaatagcagggaccaccccatttccagacttagtttttcatgcagacactagcaggatccaataaaaaactagaccagatttaataaagacaaacttgtttctttaatccttgaccgcaaacactggcgtttttgtgcctcggatttctgaaattcttggctccaggacacagggcgcgcgggggtgggtaaatagcttgtaaaaacttcccgaagcagtaatccgagctcttcctctctctccggaccctagtgacacctgactttaggaagggaagatacaagtcaaaagagaagggttcacagaggtaggggacatacccagtgggtcgggcttgccaaacctggggagtccggtgttcagacacaagttcgcaacccgagccttcagcctgggcgcctcttccccctcccacccctggtcagcgcgcgggagtctatttagaacccagccccggagcccaggggattctgggacttgtagtccctctgcgcagccccaggcgccggcacgacctgggactcggactacattgcccagggagcttcccggcctatataagcggtcggcgctgcttcaaagtgcagtaaccatgtggatgttctgctgaagcgtttcctcaagcctgccggggtgggaggagaggaggaggtggtggtggtggaggaggtggaggcagagggtggagagagagaaagcgcacgccgagaggaggtgtgggtgttccgctcccatcctaacggaacgagctccctcttcgcggacatgggattgcccagcggctgctaacccctctcctggtcctgatcccccaaaccggcgtggctccccggtcaccaaggtagctgctggggccgggcagagggcgcggggagttggcactagctcccgtgcgcagaagtttttgccctgatcaccgggagttcttggtggctttggtggctttgcatgcacttggcgtgtattttggggcttctttccctgtgaacagttttggggggaggtatattttttttttcaggcttaagtaaccccaaacgtcctcgactctagtgaccggtttcaacctccttccccgtattgaaatggcattcccccaagttggaaacggttggagtgtctgcaggaaatagtttttttttccccctggggggggtatttgagggggtgtcatatgagttcgctcaaggaaataatctttctaaaaatgtagctagccctgttgcgctgctcagctggtaggataatgcatgcgtgggggtccccgtgggttaaaaaaaaaaaaaaggaagaaaaccggaggaaggggggggggcgatgaggaaagaagtgtggacggagctcgtgcccaatgaggacgcgggtttcacatacttggcctccacgcggggaaacaagtgctttgggatctcaacacgtcccttacttccatccaccttcaatccccatccggcgtgttcgaagtttctgcgtgtctgatctttctggccagctactgacgggaaataagcatgctgggtttgcttttatttgggggaaagagatccctctgacttagctgctaaatttggaggggagtgggatctgcaggaaaagcggaggctataaaagtcaaaacttggatttgagaatttctgatagaccctcgcgagatcccctactcagtcttctttctttgttaaatatttaggagctgattacaagggaccaggatttgcatccttggctgggcgtccattggctacagagtgcctgacctgggtcaggtgagtgtgcgagccgagtgctgtagtcaaaaatgggtttttgtcctaagcattttctaagtcctcttgtagctgccatagaggtaaagtagggaaaagaaagacaccgtggtcaaaattggtcatggtcttgggtgagtaaaggtctagtgacagccacttttgaaggtcgctcagaagtgaagcatggcgtggtgaggggggtggggtggggaagatatcggtaagcgaccacaatgtgcagttaaagggactgtaaagtgggtggtcccttaccagcctgagaggagccctcattagtttaattcccaaagatgcagaacttttcatctgccaagatccctaagcaagagtgagatacccctccctttcacaaactgtcactttgttctgttcggttgtgggcatgcctgtacccagagtgggctgggctgcaagaaatgaaagtgacaaattgaaagaatgagaacttaaaaaacgggaaggaagagcttaaagaatactacagtcgcttccagggtttcactggagccacctgaatgtcaaggaacccagcgggcttctcttgctttgggacctgttcctggatgaggagctgagggcaggcagcatttctgtcagtataatggcatatttaaaaccatcacagcccgtttctagaaaataaagcttctgtaggtacaggtgccactatggtttcaggtttggccattggattttgtttttgtttttgttttcctaaaatgtctgggaattgagtaaacaacaagttaataggggtgggtggtgagctgtgggcagctggtccttggtaacttctttaatgtcctaaatatttagctgttccctgggctacaatctttgggcttttctaattagtgaataaaagccagatacttcattatggtagtagaatgcttttgtttcctgttgataaggtcctcaggaatactggcagagcgggaaacatttggaagggaaggctagttcttctgtggacttaagtctatgttgattaaagcttggggtcagccttctctttgaagtacattacagacgaggttaactggtccacagactcttctctatcttttgcctaaaaataatgaggctgtcccattaggtagtagcaagccagctgcagagctgtatcacagaagaccttagatgtgggtaaagaaaccaagatacagaatgaagtcactgggcagcccgggcagtaatgtgtaccgcttgtgtttaagtttatggagaactgggcggggggtggggggagatgctaggaaaaatagtaaacatattgatcttaatgcattaacttatttatgtctcaccaacaatgtacaagctattcttagtttgatgtatgaagaaaattatagcgccattggcagggataaaagactgtaggtatttgtaggaggatttgacgttgggctgaattcattttggaaagctctgtgttgaaagcttgaatcaggacagttaaggaaaaccagaggaaagccagtgtctccgtgcagccttaggcctggctcatatctgaagtatagcgtggtcattcacatcacggcacctgagcaggtttgaaggagtcaggtgtgtctctacgtgaataattggagagcttaaaccgctttagttttacctgtggaatgttggtagcttgtcctgtggcctctggcttgcctggcaactagttgtatgcagtggttttcttctccattcctttctttctttccccatttctttcatggatgtgtgcattacatgagtatacggggcaagcacaatctgctcttgactaaatcaattcggaacagaaaatctcatcaagatttccttctaactaagcaagggaagttctttatgttccaaatgaatcactccggcctctccatcgaagcccgcccaggaaagtcactgaggcattattacccatgcaaaaaggtggctccttttgccagcctcccttgaggaatgggaggagcagtggtggcttagaagagaaataggttagtgccacaagaacaatctgttgactttgccctcaaagtggtttcagctgcaaaaacactagaccgtggaggtggggtgggaatgggacactctggaactaattcaatggtgtgcaaggaaaggacttgagaaaacttcacatggcttcttagctaataatgatctcatggagattctgttctactttttttttttttaaatacaggcagctcttttaaaacaaaccaaatgaaacaacagataccaaatacgaacaacagacaaaaaaaaaaaaaatcttccaaaatgaaagcagtcctggagttaggtttttaggtcaagctgtccttggatacttctaattaaggaatctacacaaggacagtgttctgtcttgtctgctattggtttgatgttttaaaataaaatgcattgcacttacagatccctgatacctagaattgcatgcagttgtgttagctttttttttttttttttttttttttttaatgttttgctgttgaagtttgaggactacacttaggcttgaagtcaatggtatgaattacagtacttgtgtgggtccttctacctgttagagtgtccaggagtgttctgagaagattcctagtgggaaaggagctaaatgaacacctgaagccgccacctggtagaccatgagattccctaggctgctcagagttgaaatcaaagctgtcggtgaacccgtggacctcactgactttcaccctgctacaattgttaccattcgtgtgtctctgtgttgctgagtccacagatttcttgaatacctgctacgtgccaactgtgctctaggtgccttgggtatggcaatgagcaatcaagttggttcctcggggctttagtaggagccagtgggaagtgatcagcgaaaacaaacaggtattgtagtatggcaggtgcagagagttgtggagcaaaagtcaacaaggaggggatgaacagagaataagcgagtggacaagatgtggaaaaatgggagtgcttgtgtattgttggtgggaatgcaagagatacgtcttagatacaacagcatggtagctcctgaaaatatgaaacagaattattatatgatttgacggttccatgtgtagttctctgaggaatttgaagcaagaactgaagcagttgtttgatattgaaagtgacctcactaatgttagcctaaaggccaaaatgaaaccccaaagtatctatggatatatgagcgaaaaccaaagtgctctttttatgttcagggagctgttagtaagcccagaaaaggaagaaacttggttcccagtgtattcaaaccaaggacacactttgtaactgaaagaagccaggcatcagcaggtacacattgcatgatacacatagtgtaaagtggccctcatgaatattcagattgatagagccagaatggggactgatgaagttctcaggagctacagaaaggggaaggtggattaaaggacacaggctttctgttttaaacattaaaaacgcctgcaaattgatatgtattatctaaataaaaaatgaaaaacaaaagtttgaagggtgttaagggtgtattagggttgggaggtaaggcagggttcttcactgtggtgacattgaggacagcgctgaaggaagtgagccagataaccatgtagatgttctaggagtccagagcagaaagtgcaaaaaccctgaggtggatggaggtgggcatgttggagacagggctcaggaggctggagtggctgcaggtaggcagcagggggaaggcttgaggtgggaggatggtcagggtccaggggcaaaggccggattttgcagatcagcgcttctgaggatttctgaaccctgacagggtcctcagtgtggttttcatttgcagcattgctgaactccactgtgctctctaaagggactggccaggctggcaagaccacataccagctggaaacttgatacagggggcatgagggagacctagatttctagactggtctgtcatgtgacatttcctggcactgaagtccgcttaagtaggaaaggagtctcctctgctgaagaatagagctggcctttgctttgctcatcatgtcctaagacccatctggtgggcctggggttcctgtggccgtgtggccaccctgctgcccaccagacttcacttggggaagtcctgacaatgagtgccatgttctcaccatccctaggtgtgagaagctccacattagtggattctccttgaaagagtcaccctcacaggggcagaactcaaacccctcgcttcatcactacagagattacgggttcattgtcaaacactgggaagcaatggccaagccacacagcaaaacaatgaatctgtcttagccatctgagactcagttcccaggcttttcaccatgtgtagaaattagggctggagagatggctcagcagttaagggacccaactgctcttttagaagatccaggttcaaatcccagcacctacatggcagctcacaactgcctataacttcaagatctgacactgtcacatagacaaacatgcaggcaaaacaccagtgcacataaagtaaagggaaataaataaatacatatttgaaaagttagatgagtgtttgaatctcttaatcacaacacctcccacttgctgctctctttccttttgttcacagttgcgcctcttttctcactagccggaagatacctgatacctgtattttttttttcctccaaaagtctgtccctctgatggtattttatttcattaaaaaaaaaaattgtattttgggagttttgcctgcatttatataagtgcactgcatacatgcccggtgccctcagaagccagagcaggcactggagcccctgaactggagttccagatgctgtgtgccatcgcgcaggtggtgggagcaaaacctcagtcccctggaaaaggagcaagtgctattgactgctgaaccatccctccagcccccgggaagagaatttaagttatgacatatatgggatgagtagagtacaaaaatactacatcctccagagttcgtcattgttgcacaatccaaattgtcctttggggaaaaagaaatgacagttgaaatgtatttcacttgtaaactctctcagttgttcagaataacctaatcctgtgaagtaaagaggtactctcttctgtttttttgtttgtttgtgtgtttgttcggtttttaaatatgtgtgttctagagattgaactaagaacgccatgcttgcaaagtgactattttcagctatttccctaccactgtttacttctaagaaaacttttaccatagaggagttcaaacataatttagcagtatgtgttgtggtgcctgcaaggactgggaaaggcttctggatttaatggaactggagttatcggcagttgtgagctgtacagtgtaggtgctgggaactgaacttgggtcttctgtaggagcagcaagtgttcttagccactgagttgtctctccaatactcgacagtagcttcttaccgcatggaannnnnnnnnnnnnnnnnnnnnnnnnnnnnnnnnnnnnnnnnnnnnnnnnnnnnnnnnnnnnnnnnnnnnnnnnnnnnnnnnnnnnnnnnnnnnnnnnnnnnnnnnnnnnnnnnnnnnnnnnnnnnnnnnnnnnnnnnnnnnnnnnnnnnnnnnnnnnnnnnnnnnnnnnnnnnnnnnnnnnnnnnnnnnnnnnnnnnnnnnnnnnnnnnnnnnnnnnnnnnnnnnnnnnnnnnnnnnnnnnnnnnnnnnnnnnnnnnnnnnnnnnnnnnnnnnnnnnnnnnnnnnnnnnnnnnnnnnnnnnnnnnnnnnnnnnnnnnnnnnnnnnnnnnnnnnnnnnnnnnnnnnnnnnnnnnnnnnnnnnnnnnnnnnnnnnnnnnnnnnnnnnnnnnnnnnnnnnnnnnnnnnnnnnnnnnnnnnnnnnnnnnnnnnnnnnnnnnnnnnnnnnnnnnnnnnnnnnnnnnnnnnnnnnnnnnnnnnnnnnnnnnnnnnnnnnnnnnnnnnnnnnnnnnnnnnnnnnnnnnnnnnnnnnnnnnnnnnnnnnnnnnnnnnnnnnnnnnnnnnnnnnnnnnnnnnnnnnnnnnnnnnnnnnnnnnnnnnnnnnnnnnnnnnnnnnnnnnnnnnnnnnnnnnnnnnnnnnnnnnnnnnnnnnnnnnnnnnnnnnnnnnnnnnnnnnnnnnnnnnnnnnnnnnnnnnnnnnnnnnnnnnnnnnnnnnnnnnnnnnnnnnnnnnnnnnnnnnnnnnnnnnnnnnnnnnnnnnnnnnnnnnnnnnnnnnnnnnnnnnnnnnnnnnnnnnnnnnnnnnnnnnnnnnnnnnnnnnnnnnnnnnnnnnnnnnnnnnnnnnnnnnnnnnnnnnnnnnnnnnnnnnnnnnnnnnnnnnnnnnnnnnnnnnnnnnnnnnnnnnnnnnnnnnnnnnnnnnnnnnnnnnnnnnnnnnnnnnnnnnnnnnnnnnnnnnnnnnnnnnnnnnnnnnnnnnnnnnnnnnnnnnnnnnnnnnnnnnnnnnnnnnnnnnnnnnnnnnnnnnnnnnnnnnnnnnnnnnnnnnnnnnnnnnnnnnnnnnnnnnnnnnnnnnnnnnnnnnnnnnnnnnnnnnnnnnnnnnnnnnnnnnnnnnnnnnnnnnnnnnnnnnnnnnnnnnnnnnnnnnnnnnnnnnnnnnnnnnnnnnnnnnnnnnnnnnnnnnnnnnnnnnnnnnnnnnnnnnnnnnnnnnnnnnnnnnnnnnnnnnnnnnnnnnnnnnnnnnnnnnnnnnnnnnnnnnnnnnnnnnnnnnnnnnnnnnnnnnnnnnnnnnnnnnnnnnnnnnnnnnnnnnnnnnnnnnnnnnnnnnnnnnnnnnnnnnnnnnnnnnnnnnnnnnnnnnnnnnnnnnnnnnnnnnnnnnnnnnnnnnnnnnnnnnnnnnnnnnnnnnnnnnnnnnnnnnnnnnnnnnnnnnnnnnnnnnnnnnnnnnnnnnnnnnnnnnnnnnnnnnnnnnnnnnnnnnnnnnnnnnnnnnnnnnnnnnnnnnnnnnnnnnnnnnnnnnnnnnnnnnnnnnnnnnnnnnnnnnnnnnnnnnnnnnnnnnnnnnnnnnnnnnnnnnnnnnnnnnnnnnnnnnnnnnnnnnnnnnnnnnnnnnnnnnnnnnnnnnnnnnnnnnnnnnnnnnnnnnnnnnnnnnnnnnnnnnnnnnnnnnnnnnnnnnnnnnnnnnnnnnnnnnnnnnnnnnnnnnnnnnnnnnnnnnnnnnnnnnnnnnnnnnnnnnnnnnnnnnnnnncctggaggatgcctgcccagttctattagtggccttttttagttgctgagttttcatggctcgttcttacccgttgaagctcatctttgaacatggccctggcagccttctctctttcagggagatagaaagacaggctaactcaccaggcagaattctgacaaaaacaacgccaagaccaaaaaaacccaaaaaccccccaagaaccctgtgtttacatttgaggatgcttttatggctgtggacctagaggtacaaagagaccacaggctacctgtgggccatgaagccacatggagaaacacgtgcagctgggttttaaacctactgttgttagacacttgggggaactgacattttagaaagtttgaagacttctttcctcacagaacttctgaactgctgggtagaaaaatgttctcatcagaaaaatctgagcaaggaaaaacagcccaggcctcctagtgtcctggttcatttgcattgggggaggagctttgtctggggaatagttttattttgtaaaggcagcttaaaagcattccatatctatttatgaatagaaaaagacttaggaacgttcatttatttgccttgtctcctgtgtgtgtgtgtgtgtgtgtgtgtgtgtgttatattctgcctgctgtgtacttcaccagtttctatatcttcaagtcgtcctcttccttaggatcttggccaaattcctcctcctctgagctgcttttccttttcctggaggcttctgtcatttgaaaactctgcctcttgagctcggttttcttcgtaggggttttttgttgttgttgtttgcttatccctcaagagtactgaacatattggaagagctcacaaaatatttgttgaatgaagtaatccatacttgagatccgctctgtctttgaaggttgcaggttacctctaagaagaaactaatgtttagtccctctctgctgattcaaccttttccgagttgtcccattactttggaaaacccttttggtgcacaaagagatgtgaaaaacatgtagaaatatattacgccgcacctttgggaggattttaagctgttgttcactacagctctctagaggatgctcggttggggaatgtctagcagtaggtagcagcagagtggaagtgagaactgggtagtgaaaccaactgttctcagactggttggctctgctctaccacaggatgggggctcctgcaccacactcctgtgtactgcatcttggatatcaccaaaataggcaacatctgtgtgtctttttcctcttttgtagactaggtataaaaatgcaggctgaggggtggggtggggctgggagacgcctcagtcagtaaagtgcttgctatggcaagaaggaagacctgagttcaatcccctgagccacacaaaaagtgaggtatcatgcttcatgttggcattcccaaagctggggagtgggagacagctcccaggaactcactggtcagtcagcgtgtcttggtcatcgatccccagattaaatggagagagcttctctcagaaacaaaacaaaacacccaacaaacccaaccagattgagtttcctggggagcagcactcaaggttgacctgtggcctctgcgcatgcgcacatgtcctttcttcccacctgctatggattgttgtgaccaacgatctatgtaagcagactgggaaaaaaaatgatttaaaaaaaaaaaaccaagataggtctcagctaggaggctcatttggccttgtcaggagacatttttcctagtcccaccggtggatcttgaggtgaggtgcgtgctagtacccaatatagaggcctctgttgaggttcattctgctatggtgctgaggaaaatgtctctattgtgaaaaaactgctccaaaagtcagtcatgccggggttgaggaaccaacccatggtctgagtagatttgtagatatagtaaaactcatctcttaggaaactgacttcactccatggctcaggttagacaggcagaggactttcttctgaggctagtgccaactttaaaaatgtttaagtcacatttctttcttctttccttcctttcttccttccttctgttctctttttctttctttcttttttctttcatatctgcatgtgcgagcgcctgcaatggcacgtgttcagaggtcagagaacaacttgaaataatcagttctctttccctgggggtctaatttgagttgtcagttgtggtaaaggcaaaaaacaccttgctaaccctttatactggctctacttgaccgtcgtaccaaaataaacaccctttctctcttctcccaagagctcatcttggtctctgaaggtctgaggtctggcactggcttctcataagctatatgaatgacatccataaactcactggacagttgaattgactggctgctttttcccatataaaatgaggactgttggctcaatgcttctacccacaaattctctgggactttaaagagccaagtctgagcttgtggctgccttcttttacagcggtccttgagggggcattagaacagatacgagtacaacatctttcttgaaaaataactttttgtaggaggtgtaccagtttccagtgtagactactttagcaaatgtgtgtggaaggccaaatagatttgtgagtgaaatatccgagggacagctcactggagatggaatccaggaattggtgtacgctaggaactgtggtgtagcctgggccctaagggacatcatttaaacttaacagttcctctgagcttcagatagagagtaactgtttctgagataatcttaaaggaccttggaacttctgagatggtcacttcctttgggatgggccaaaaacgaaagtatttgaatatggtttcctatgtcctgaacagtgtttttttttttttttttataacagaataaattctatggtggcaggaatgtggtgttcccaaggatggtttttgatgggacaagcctacgtgtgaatgtgtggtgaggctggggtggcattgtgtccaactcaaaagtcttctgaggctggttcaacgttcacagtacaaatcacattcagcatctctgcccagaggatgttcagaaattaaccgggagagagcccagaaacagaaacagaaaggaaacattttcctctatcttggggaaannnnnnnnnnnnnnnnnnnntcaaccataaatatgttggggctttctctaccctgggtttacagtcatattaccatatatgtacctgggtaaggacatggcggggagacttctgctcctctggacagagtttccttggcctctggccaggagattgatcacaggccagccactcttccttcttgggacattcccttttcttccctttcagagtccttatggcttgtctttgtctgattctgcccatcctttatccctcccacctggagactgcttaacctaaaagtgacatggtgccttttagtactggtccctgacctcagttctgagagatctgcttgcattccagatgctcttaaacatgcctttatgcaaaaggcccttcttaccgacctaccattagacaaatttgttgatgttgttattttttttaaatgagacaacaggaaatcagtgctagaggattttggcaagagctcattattttttgtgctgcagaagaggtatacaagcatcttccctcctcttctgtgcatggtacctttggttttattaggaatagcatggagaatattctgctggagtcggtgctggcaggcttttatatgtgtaacttgcagtgtgtccctttcctcagactcctcatcatttgaagttgcacggaaggacttatcctcaaccagttctaagaagcctgtaagcaagcagcagattagaaaggacagaaaacagagaccagcgctgtctcccctgttctctctgccgtgtgctaagcacacatgctattttcttcccttggtttaatctgcagcatgtcaccttcctacaggagaggaagctgcgggccaggaaactaagtaactgtcaaagtgaccatgagtagaggcaggagtggggctggactgtgcacaagggaagaacctgcaaaaaataaataaataaataaaataaaataaaataaaataaaataaaggcccatgcttcatgctggcttatgtccctgtggcctggctccattcgtctaaccttccccttccccattatagctgcatgctttatggccggctgtttggttttgaaccaccccaggccctttcctgcccctagggcctttgtatcatcactctttccttctaccatgctcttctgcctgactcctacccctccccctttccctaggatggcctctgtcttcactttaggatctcaacctaaatgtctcagctgggttttctctcaccagtcagaattaaactgctgccccattcgatgtcacctggttttaatttctgttctctctggaggtactgttgggggtgtgacccagggaattgtgactccgaggcagctgctctgctgacctacccccaaggctggctcgaattctttgcatggatgtatagtgaccaaattcaccctgttttgatcttgtgtgtttactgtctgcctggacttggatgtgtgccttaggacaggatcctaacgtgcgtgttgaatgtgtatgtctttaggacaggatcctaacgtgtgttgaatgtcaggacagagggtctttctaagttttgaccgtctttcattgtctttgtgggttgagtcacagccaatgtttggccaatgccagtcaaagagaaattcaactcagtattgttttcaaattcttgggtcccacaagttctttacatgcttaaaaacttttgagaaactccaaacacctccatagatatgagatatgatatatgttagcctatatctatcatattagaaaacatttttagaagttacacatgagcatagtaagattttttttaatgctaaaatgataataccctctagaacaaaacaaagcaaaatttaataagatggctgggtgtgatggagtatacctttaataccagcactccagaagtagacaggtagatctctgttgagtttctggccagtatgctctacataaaccccctctccctacgtctctggtgttgagtagatttatagagcactttaaggcctagttgaatggaagagtcacatagtgcacatctgcattggtctccagtctgtagtgatgccatgtcttacatcttctgagggtctctaatgtacacacaagggactagataaagagacagaacaaagaagtgccttggtaatattgtgaaactgattttgcccttggatcttgagagaaagggtcttggggaccccattgaagccactgaattatgggacaaatgaactctttgagatgttgggtatggcagggaccttctgaaagagggaggagctgaaggctttggtagcatgatacaacccaacatccctaaggctggaggctatatcatttcttccttaccaggaagaagtactttttagcattcttagcaaaacaaaattgctctgagttcttgtaagggggtagcgtgtgtctccgttcagtttctaaggagcagcagagcaaacagcctaggagctatgcagtgggcgccatcattcggggactgagaatagcagcttgaaaataaaacctcatcagctgccactccacagcgtctactggactcttcttgcagctctgggctacaatagtagtctactatagagattagattgtcttcgctgtaagtgtagctggctggtagggtgcttgccaacatgcatgggtcacagagttctgtccccaggactggggacaagaaatccagtgggaattaaatcgacttgaggttttgtgcttctcagtctctgctgcagtcggagctagaaggatcaaggtggacgctgttgataatacagtggcctgctgagatgtttaagaaggtttagacttgtgggggagtattttatgtgtctctgggctaaagcatgcaaggctgtcactggggaggtgcatatcagagcatctgtgagggacttggtcaccaggaaatgaatggtgtgctgaggaagcttctaaaagccccatgtttaaggtcaggttgtcagtggacttatgtcctccccagttactgaaaggcaactgttcagctccgatagccaggtgccttcatcttagcatagaaaatgcttgctattcttggcacaaatgtgcaaatatgtggttttttatttttttcttgttttgaaagtaggccttattttgtagcctacgtagacctaaaactcgtgctaaagtccaggctcgaacctgtggttttaaagtccacggactggtgctaagttggcttctgtgttccttgagcttcctgtccacttgtaaggatcttatgacagacgacaggtgtggtgttctggtgacttcgcggttaatgaaaagtgttctaatttagacttagtttgaggagttcccaacttttaaattctgagttgtgtgtgtaggcgaaagttaaaaaaatttttaaaggaaaagtaatgtaagtgctattaatttaagtgtgtgcaggagatgggaaaatgataataaatgagttttttttttgtcacccccccccatcccccaattggagcttttagaaaatgaaatgtaaaacctatctggagctgcttaaaattaaaggaacatagttcttctttcagtggggctgtgcttcagcctgtttttactgcaaaataggagaggtttttaaataattaaattatcagccctttgaagagctctctcccatccccccttcccagcagggcctctggtttgatgtgggaagaagagggagagggagtggagttgtgggttgactctctgggtggtgtgaattcgggtacctgggacatgctgtactggcaacagacaccccatgggcttgcagaggatttaaatattttcgggcctgtgggtcctccccccccccttgcattttttcttagcactagcagctaagtaagaagtgtatttcaaggggaatcatcacaaggtaagggcattggagaaagaacgttgaggtcagtgtttctgtttcagcttggttccgagatgcaagagtgactatcagagccaggcggtatgcttgagctcgttctgtggattgttggctttatgccccaaatactatggaaagttgcaaagaattcctccctccttccacctgcttagtataagggagctgtggatcagagaagctctattgcttaaggacacacagccagagtgctcgcatttgagctggtgtttctaagcacactcttgccagcactcaggagccattttggactcgaggagtagaggtcaacagggcagatctgagagcagttgtcccagattaaaaagaggttggtttcttgttcttttatttctcacagaaatctaaaaagtgccactagatttaagttctgtgtatcactgatccaagagtttacaaacttagctttaattaactttagaagataatcgcccccaaagagtatcagcaggcaactttggccacagatgagaggccaccctggtgacatggaatcccagtgaggctgatcaccacattccccggtgctaggctgttacagagtgaggccattgtggtcctctccttgtgagtttgcagagctgagagaacaagtcagacaagtgatggggagacacccaggaaggtgctcgggtgcagtggagggaagtgtgtatatgcaactcaggtttgggaggagagtggtagcagggcagcagaggtgtgggagttagccatgttagggagggaagggagtgccataggcagtaaggattctgggaaatgtgcattctgttgagggtgggcgggagggcaagcagggctgcagtagatttggggtatttgggtttttttttgaggtgggggtctctggtctaagttacaaggctgtctgcaaaggcttgcaccctcctgtttccgcctcatgaatagtttggactacaggtgtgcacgctgcacttgtctctgattttggagagttgtaagaaatgatctagttgctgggtgtggtggcgcacgcctttaatcccagcacttgggaggcagaggcaggcgaatttctgttcgaggccagccttgtctacaaagtgagttccaggacagccagtgctacacagaaaaaccctgtctcgaccccccccccaaaaaaaaagaaaagaaatgatctagttgatgtacctacaagattatgttgactgcgttcagaatagactaaggggaaacccatgtctttcgaaagataagtagatgtccaggtaagttggatccacatcccacatgtgcctcaagatagttatggctcaacacaaaattgtaaatttacttaaaacatgagggtttttttttttttcagttttgtttttgctataactcaattgtgtagttttggcatgtgaattttaaagatgccaatcataagttgaaatgtcagaaggctagacctttcaagaatctagttaagaaataaaagggacggggtctggagagatggctcagcagttaagagcactgcctattcttccaatggactcgggttggttcccagcatctccatggcagcttgcacctgtccttaagttcagttccaggggatctgagactctcacacataggatgcaagcaggcagaacactaatatgaataaaataaaaataagtcattaaaatgaaaaaaaaagaaagaaatgaaatatggggtggagggatggctttgtggttagagcacttgctgctctggcagaaaacccagtttcagttccagcacccacatggcagctcatgactgccaggaactcagccctagaggattcattgccctttcctggtctctgagggcactaaacgcatgtagcacacatgtggacaagctgtcacacatacatgcatattaataaaaaaataagttgaaaaatggtatttgggactggggagatagcttagtagttaaagtgcttgccattcggaggtacggatggcagttcaggttcctggagcccacatagccacctgcctacaactgcagccttgaaagatagagacagaagatccctgggcacagcttgtgagactagacatcctggagactctgggcttgatggtgattcctgatgtcaacctcatctgtggatgtgtacacacatgcatatgtgtgccctcacagtgctcccacatactcaaacttatgtacacacacacacaccccacaggcttacacacaagtgaaaatggggaaaaaaagaaatgaagctggctgagactgacggaagcgaggcgaggttaggagaaatgaagggcttagtaatgttgagatttaaaatcacgaggagtggatgttcaagccaagctcttcagtctttcatctgacagcacctactcttattctgtgagcacctactgtatgcaaggcattgctgttggagatacagttgtgtagtagagagcagagctctagaattgcctatccctcaagggtgtcagacaagcatcacaccgatagatgtgagcttgtgacagaagcaagctgaggagagaagatctcacaggcagagtttgtggaagttgcagaaggatttgtcttcacccagtgatcgtgggaataatgattgaactgagagccgaagggcttgctttcactgaagctaggcaggtgactgtgaatgccataaaacttgtgatgatgctgtgggcaaccaggagcagaaccctagatgctgttgccagtgacagatctgtggagatcctagttaggcaaaggggccagcagagcacacagagagtatctgggaggcagagaacaacatggacactgagtgccactccctctgctctgttctcagagtagatctctgtgtttgtgtgtttgttcttgccctgtccctaggagtgcagccaaacacccccttttctttacccatttcttaggcagtgagaagctcggacacagggggtgggaactccatctggctgctgtggccgcagtgtgcagaagcaccagggcagctatcctctactctggccagctattctggaaaaatcctgttctgacaggtgccttaggcagcaatcagccgggggtggtgatgggtggtggcgcttgtaggtcatagagatggtgacacagctttataccaggggcattgctggtgcttgtcacagtcatgtacccaaacctcaagatgtatatagtgtagagcgggggacagcagggtttagggaagttgtgaattcctacactgagtaactcgcagaactgggagtcagtgctggtgctttgagcccggagccttctgtcttcctgtacgctgagctttggagaccatactgtgtcagagtggaaggaaagtggtaagccattgtgagagagctatgcagccctcacagatttagaagccattgaaacttcagaagacaggtgagaaggaaaagttttgggaggtggctgcctccctgtggggacagcagtaattgctgtgtacttaagcaggagctgtgagcttccagaggagactttttttttttttttttttttttttgctggattccagcagtgcacaagagacatgcatgatgacatgcttagccagtggttcaagccactgtgtgtattcagtctatagttctgtgccttcagaaaggcctgcgggcctcatgattgggagttgagagtcgttctgtaccgttcagctttttcccagtagaggaattaggaaggataattatctttccctaaagtaaaatggatcatcacaggtcttacaggaggtcatttgtggcaacgcctagctgacattttattacagaggaaccccccccccccccttcatggaggtcgagatcttagattctttcagaattagtctttatcttttaactgaagaaaagagctagcagtgaacgctgaaagcatgtcagctcgtgtctcaggcactttgcattcatggcctcatcccttccctatgacatgtctctgaagtctatccccagtgtagagatatgtacagaggtccacatcagccgagaagtcttggtgggcttagcatacaaaaataccttacacatagagagtcaggatggagtcataggtcgacttagtcgactactaagcctgttttgtagagctgttggcatggagccctgggtgtccttgtagtgttgggagctgcagttatgacacagttaggacagcatggcaggttggtacctgctctgtttttctcacagtgaccgggtcattgtgtttgaggactactgggagccctgcgtgtggctggtagaggcatacaggcagaatggtcctcaatcagataaagaagtggcctcccacccagctccctaacaacaggaagtcttcctgatgattgctgccaggcctacttcctacctagtccctccagccccaaacgcctgttgttttgactctgctagccccggttttccctttcagtacacaactgataattgtttcagagtctctcctcctggccctctcctatccctgtgtgccattaaaggcagagcagcgggagacccaggtgtttccaatcagacctggaagtggttcacttactcaacttatccaaggagcaaatcactgcctgatgcccctggggatgaatctgccctaatgatccttaatttttttttttttttaaagttgggacctttggcagatggcccagttgaggatcattaactgtggtgggtgtactggcctctgttttcaggggaaatataaactatggcaaaaggttacttgttcaattatcttgtctacttaataagcatatgggcaagaaagaagacgcgcaacctttcttctgacttaacaaaagtgttatatttgactaaggtaggaaaatgaggaattcagcagtaggaaaaaaatgaattagaattgtccataaagaaaaaaaatgtggagggaggagagggtgtggcaggatgtattgtatgagagaagaataaattaaaaaaaaacattaaaagtgaacagttctccactgccacccagagaataagaacagtggacattttccattttcccagggattactgttgatgaagaagcccatgtaagaactcagtagatctctgtgcctcctgtctgactaattatctatgatgaacatgtgaacctttctgttcttcagtttccccaacaacaaaagaggggtggacctatgtcacgccgtgccacatgtctggaggattctgagacaatcttattctcagcacagaggtggacacgatagtccttgacaggcgttagctattcagcttaatggtggggctgaagcgttcaagctccaagctactcagagagtttctcatctgctctgatctcagaagctaagccgggtggggtcaggctggaacctggatgggacaaataggactgctgtagattcttagtgtcaactgaagtccaggaacctgttgtgattgtcaggttgcaggttcactcattctgtcatgtcttgccattgctgtcatgtcccaggccttacaggttatgtcacactctgctactacagaaccctgggttgtatctgctgctttacagtgagagaaactttcagtaagatacccagaagaggatgtagatttgaaggacaatatcatgctgctgctgtctggcttggccttcatcggagccaaatgccctttagaaggatacggcctgggaggagagctttagtcactccgaattggccctgcttgtcttgcctaagcacattcctgccctcctgcatccagcagctccccgttggtcctctgggaggcccgtatgtacagacacaaatttggcctgactcagaagtcagtcaaacagaacttcttttctaataaccagtcctacagccctacagccgggagatagctacataacagagcactggcttagcatatcaagatccgagattcgatcccctagcgcagaggaagcaaaacaatcatcttgtgcttttattatacatggtctctggcctcttcatgtaaaattatcacagtgtagggtggaggggatggcgccgaggtagagcactagcccagcatacatagagctctgggtttgatccctagtgaggtatggagtgccaactttaatctcggcagagaatctgagtcagtagtctctcttgtgttcacggccagcctgggctacgtcatatgatgctatctcaaaacgtttataacctctctctctcttcttttctccttccttccttcctccctccttccctccctccctccctccttccnnnnnnnnnnnnnnnnnnnnnnnnnnnnnnnnnnnnnnnnnnnnnnnnnnnnnnnnnnnnnnnnnnnnnnnnnnnnnnnnnnnnnnnnnnnnnnnnnnnnnnnnnnnnnnnnnnnnnnnnnnnnnnnnnnnnnnnnnnnnnnnnnnnnnnnnnnnnnnnnnnnnnnnnnnnnnnnnnnnnnnnnnnnnnnnnnnnnnnnnnnnnnnnnnnnnnnnnnnnnnnnnnnnnnnnnnnnnnnnnnnnnnnnnnnnnnnnnnnnnnnnnnnnnnnnnnnnnnnnnnnnnnnnnnnnnnnnnnnnnnnnnnnnnnnnnnnnnnnnnnnnnnnnnnnnnnnnnnnnnnnnnnnnnnnnnnnnnnnnnnnnnnnnnnnnnnnnnnnnnnnnnnnnnnnnnnnnnnnnnnnnnnnnnnnnnnnnnnnnnnnnnnnnnnnnnnnnnnnggaggcaggcgcttctccctaacggtttcccttgccgcatctggcattcctgccgaaggaggagagtgcttccagaagtttgcctgccgaggaaaacttggcacccagagaagagctgaaggggagagaggacattttccccttccgcatcattacaactcttgtggcctgtgcagtaaatgatttattggagtcagtagaaggggaaaggtttccagagggctctgggctgagaggaaacccccaacacttcatgcatcaacatcccagatgcagaggaaacgcagggaagctctgcaagccccaccagggccgctgctctcctcatagctgagcgcgtttgctaaaggtcagttcaacggcttgcagttggctcctgttcctccatggtcatggccggggtgaaagatgttgttaggaatcacttcaatatttttgtatatacattgtgtgtgtgtgtgtgtgtgtgtttaatagtttctgggctttgtagagatttcctggaatagaggaatatttttcttgaattacttctacctaatcccagccagggaatcttagtattgattagtgcctgaatcggcatgtttgggcctggacctggctgggcaggggtcttactacatccaggagtgtttcctggtagagaaggcaaaactgatgcagcatttgtgtggagtgtgggctatcggcctccgaggcattgtgattatcactcagtcccaggtttccttccattaacgtcatcttgttgctttgattccttaacccagcccccatggctttgccagagctaagtttttaccaggtgcttcctttgacttaccattccctgaggcacgttgaatatgttaatgtgtcacacgtcagacttcccagctccttaatcactacagagttcttggctgggttccctggtgtctgggcagttcagtattagggaagggtcctcaaagcgttgaatctgacctgggcgtggccttgttagaagccagtgctaatgtgattggaatacccagaactttaatatgcaggacagaatgtagttgcagatgtcctcacttggctcatggaatcgcctgccagtcaaacgcctatttaaatttgaattttaagtaatgcgctgggggaaattgagctaagccaaatcttagtgacattttttccccctcatcatgtctcttctgctaacagtgttgcatgttttactttgtctaggctttccaacacggacatgtctgacaaaatgtcgagtttcctacatattggagacatttgttctctgtatgcggagggatctacgaatggatttatcagcaccttagggtaagagcatggaagtcctgatgcgtcggggtttgtttaagacatcataacactgatttgtgtaagataagacagttatcacattaagtggcttttccaaggctgcttgaaagcacagttagcaaatcctgcgttagtcacttcacctttcacacagagacatttctgtcagtttcgaaagaacaaaacctttttagttaggtctctattcactttgaatgtattataatctactcttcttatgtaagagggaacgtacttaagaatagagaatttaaaaaaaagaatagggaataataaatatattgactaatatacacagatccaaagaagtgcctctggctttgtggaaaagccttttggcttgtcttttcacacaagtgcccgggtgtaatcggagccaagaccattactgctcctctgcccatctctcacctttgaagcagacccttttctgctaagtaaccaagcgcacttggaagtttcaaattgcactaagttccctaaaacgttttctcttcatttgtgcttcctccaatcagtcatcactcaacctgggagaatagaaacacatgtgtgcctctcggctcagtttcccttctccctcctgttcctgccatctgagggaggaagtgtaaagtgtagtagcccctgaagtcacgcagaggcagaatgcagcatcaagatggctcattccagaataggcaggagtggcctagcgtctttgtgtaggaaggagtagctaggcccgggtggcattgttgattttggcaagacgtagtctcaaataaatgggggcagaaggcaggctaacagattttccaaaaacctcattcttacagcagccagaatgtccgctgtaattacagctattactggaagcgtgcttattttctggtatttgtgcagagtgagtgttgttaagggctcattcagggtactctatccccactgaggaaattatttcagataacagaattatatctcagttagacctgtgttctcattctagagagtttattttcagaagtcaccatggcttcttcctatgccgggtctctgtgtgtagttgaccttaccctgaacgtttatctactgtggcttggggcaaacaggcttcctgctactctggcctctccagtgatggccatcttggctcccgccttcctctttttattccctgtggttaattcaccccgttcttatttttcagcattgacttcagtactgtacagcagtggtaagcactctgagcccggtgggtgttcactgtgtgctgttctgagtcctgggcctcccttattcccctaactcccaatcagccctcttcgtggtgagcactggggtcatctgtcatcagtgtgtgtggaaacgacacctgagtgcttcaggcaggtgcctgcctgcccaggtctcagagctccaaaggctcgggtctccaaggccagggatgctaacacataacctttgtagggcaggttttttctggtttccctgtgtgctccctgaggtctgggtgcctgtcagacctcagctccatcatatacctgcttttcctctggggcctctgaccttatagttaacttggctcagatgctgaggtcccccctcccccagcccctaaaatcttagcctcggtcacatcttccctttcagctccattattttattatcacattattattttgagcctagtctgaccttaaacttgtagtactcctgcctcggttttctgagtgccatgattataggtgtgcaccattcttaaaattcttaggtgtacatactctgctttgatatttttctcaagaatcatatgatgactccctcataaagctaggatgtatgttttttaaaactttggatgctaattcttccttcagtttttaccttcaggaatagcttgcataaaacctggcttggtttggggaaaaaaaaaccattgatttggaaagttaaatttgaaccctctttccccttctttgaaatgtgcttaacatttaaggaataccagtcatagacacaacgagtgactgtcagtcttagtgggatgtggtgtctggctcccagctctatcctgtttatatagactattgggggttgcctctcagtaacttgacgcctccattgaactttagaattctggcaggaccttggagagccagtgtatgtgtgtggatctacactaacctttggtgtgctgctgaaccacctctggagcttgttaagaacccaacttcttagatcacttcctagagcagagcttcagtatgcctgggcaggagggatgggttttgatggggccccctggaaccggtatatttagaatcagtatctaaatgttctctgagttgagaatccctgagaacaatttgttcgttttacagatgaaatattgagacaaggggagagtgaaatggcatactgtcatgccattagctggtatctcagtgttatttacaagctgtgatcaatgaggctgttcctcctagcatttcctcttattaggacttaaccattagtccagctttgcattatgtatgtcctgaggggccaagtccagtgtctgatacatagtaagtaagtattctaccactgaactatgtcactagcactggaatccgggcccaaccttttaaatattgggtcaactttggtgacctttctgaacttatgttctaattccagagcccagggtagagatttttcatatgtgcacattatacttttcatttttgtagaaaaccctcaggctgcttgctgaccacactgtatcctgtggctcttgtaggtgcatagtttgatcttgtattttgagggcaaaggtgggatactcttcatacttggattcacgtcccttgacagacactgagcatcacgatgccttgggcatcttctgagccacaaagtagggagcccattgcattgtctccatggagcttggttgggacagtggaggaggagaagcaggccatttttaggcaagaaaggcttgtgtggggtatagtttcctttctgaaatgaggattagaatcagggctttgaatgcagggcagttttggaggaggggtcaaagttgaatatttaatggcccctggcatttggaataagaggcagcataggccgaaggaagaagttccaaagatcctagcatggtacctgggacaaagtcccttggtaatgtgtaaaatgagctggctctcacagttttaggaacttggaaaagtcatgtaacttcatagtgtctcaaaagctcaatgatgtgcatatatttttagtgattctcctaaaaagaattatgcaaggtaaattggtttttagtgaaatcagaatttgagttatctgtctttatgtaatctgggactattacttatttgtaacttgattgtgcttttgaaactccaagctcttccaatttgcactgggttccctccacctaaagatgctctactcactgggtactctccacctaaagatgctccactcgctgggtactctccagctaaagatgctccactcactgggtactctccatctaaagatgctccactgactgggtactctccagctaaagatgctccagttttcatctccccacctttgttttggctctttcaacaattccgatacatcttcttccgtccaaagcttcagaaggcatctggcacagatgactcctgcctgttctttcttccttcctagattataccttatttatcagtttgcttttatggcttctatacttaggccttgagctctttcagggccgaggcctggctcactttagtcctcatgccaggacttggtacagtccctggcacagagttggctcctcgccaactgttaggcaaatgcattaacgtcttcctgtgtcttccagactcagcagtattgtatgctgtgcgcaaatctcccacagatgtggttctggggaaagtggctgcagagaacagtaacttgacctgcctatcacagagtgctggcccttgggttacgattatttcactccttgcacaggaaacctccttgtccaagagctccctgccagagggacatggcagtatcaattttgcataggaaaagccctggactcctccatttttacatactgtttattgagggttttattttcctaggcttgtttttgatacagcattgatttgtttttctttttgcagcttggttgatgaccgttgtgttgtacagccagaagccggggaccttaacaatccacccaagaaattcagaggtaaagttgtggctttgatggagcggtcaccttcacttacttgattatttagaaaggctgctgctgtgcctgtgaggccagctgccctctcccccgccttcgctccgcgcttccagtcctttatccttttctgtagcaaccttagggttatttacttgaaatctgattttgaaaaagatacttaagtcctggctttaaaacttctcgaaaaaatgtgtaaataaattctcagtcaagattggcatggcttttattagggccttagtttgtctacagaataagtattgccaagttctaattcatctgaaagcttttcatcagcatagctacgtctccaaaaaaaaaaaaaaaagggatttaagggtccagtcacaaggaacatgttttttttttcagcagatctcatgatccctcttggggccttgctaattcttagctgccttacctggaatgagacattcttgcttagtgtacttccacttgagctataaggtacagcagggcagtgttcctattaatgttgccttctatgaccctgaacttgtagtttttctcagaaggtatctcagcttattgcagggagtatttgaatggcattggcatcttagctgccacggctttgtttctgtctcctgttgtgacagtggtaggatgtggtcctctgttcgagccacatcttagaattatctggggaaggttttcagttctatagatgctctggactgatggtcgggaactgtttttgtttgtttgtttgtttgcttgcttgcttgcttgttttcagagtagaatgtcactgggtagttctggctgccctgaaattcactgtgtaggctagactggccttcaactccaccgccctcagtctcctgagtgctgggattgaaggtgtataccattgcacctcgctcagcactgacgtttttaaggcttccaaaatggtttaaaaattacattgttttgtttattaattttgcgtgtgtgcacttgtggccatctttgggtgaggccagaggacatcttgatggagttggttttctcctttcaccatgtgagtttcaaggattagactcaagtggttaggcagaaccagaaggcatttttttttaaaaatcccttacaaaaaggagaaatgcatgcttattggagtcccactgggagtgtatggttcagacccctgcagactaatgtctgttctattttgagtgcaatgccttaaccattgggccaccctgctgacaaaactgattcttcttgctagtgggcctacgcaccgacttgactggtggcctggtcacagagagttcagcttttgctgtttgcagactctctcatttgagttctagattctccatgttgactgatttagaaaatgtttgactcctctggatgaaagctaaagaaattaggatgcaatggaaggcagacgttcgggtggaaaggagccatctggatgcatggtggtgttgcgctgtatccagttggcacgaggctatcaggagaatattttcacctgaagatgagggaaaactatttttaaaaaagtgaatctcagaaacttgaaggagctcttgcttctgctgagtttttcttcacaacccttccccgtgtctccttctaaaacaaaatcttcagtggcgccgaaatgaaagatgttatctaacggccataatgtcacttagagagtcaattccccacccagtgttgaccatgttggtcactgggctgaaagaggatgctgcctgtgttagctcggttggaggtcagatctcctctctactgggaaaggattggctagattcttacctcgtgtgtcacctgaggtcacatggctagaggcaggagcgtgtaggggtttggatctcaaatttggctgcacagagaaatcacccagagagctatgaaaagcactgataactgctcccacccaccacgttcctgagttaattgggcattgggattttttttaaagctccctgggtaattctcttgtgcaaccacacttaagaaccattgctaatagctacaagctaccgacttccttgctgaggaaagggctaatctaagcttggcttttgcacctgggacattgagaagtgatgattgtcagagcaggtgctggatccagggggacctcttattccatcctagcctcgggggtcaagcaggaagagaatttaatgtaatgactaaagtaagccaatggctattcagtattgttttaaaaatattgttacatattaatgactttcatttctaagtcatcatgtatgatttgaaattggcagaccttgcagaatacctgatttggtctaactaacataggtttcttcaagtcacttttgtgttgtgaggcgtacaagtattcagtttgtgttgatgactattgttaccatgctgtgcaataaatcctcccatctaagtgagatgctgtagcttttgaccaatacccttgccaacctgccatcttaaccccaggtcttggtaacctctctcctactgtctgcctctctgagtttaagtttttaagatttcactaataagtgagattattatacagtatttttctatgcttgcctcatttcatttaacatcatgtcccccagggttggttggttggtttgtttgtttgttttatcacaaatgatcaagtggctgtttggatgcagggtgaggacattaaagtaaataggactgctgcaaaggatgtcagaaggtgtgtgtgttccctggtactagggtcagtgtgggtctcacttggatgtgtctctggtgtctgatttgaagagactgttttgaaatcaaagcattagtctggtggaggccatttggaaacagtcaatctcctttcatgtcttgacttagttctacaggtaggaaccaggcagtgacttggcttattgactttctaggtagtttctaggctgtgaactgctttgtgatagtagggacatctggttcaaaatcagttgtgctgcaggcatcatgaatataggtcagaagttcctaagctctgagtgctaaggttgattgccctgcatgtaggtaagaagcctgggaaatctgcctctgcaggctgtgggagtgctggagtcttctccaccatgggacttgggcaggaaacattttcaacgtttttgaaaacatctcttcagctgtggtgtagcttgtctatgtcaagaagtcctccacgtccccacatgaaggaaaaagatctctcttttggaagagattgttgtctttctaactataagtacattttgacgaacgagatcattttgctggcttagaaactgcgcctgggcagatgagtcgtttgcagacggatctggtcatggtttcgctcatggagcctttgcaactgcagttgaaacaaacacgtatggaaaaagagatgctggcgagcagcttgatgggatgatgaagtctttatccaagtaatcagcagagctatgctgagtcacttgggtctgtgctggttctcattgctggctcaccaactgatttcccatcctgagaaccattataaactgtgctgcagtaaatggggattggaaggagcctgtctgttgtctgctccccttcacttctgactttggggagttccttctgagatttgcagccctgatgtttatccatacagaaccttagaccaacgagcctttctgggttcagagcaaagttccaccgatttttgcctgtatgaccctgactaaagtcacctctgtgtacctggctacaacaattttaataaaagatagatgtgtgtgaagaatgcagtactagtcagaatgttaccagttgtgacaaggtaggtggacctggaagacactggggcaatgaagcaagccagggacagacagagagacatgatgcttttactcatggggaatcctaaaaaattacctcataaaaatttagtgtaatgagctgttggagggcaacccgggagggggataatgattggactgttaaaaaaagattaaagataatttttaaaacattgagagtaaaacagtggttaccagaggccgcagaggggttaaaggaggaaagatgagagcgattagttagtgggtacaaggttaggagaaacaggttctgttgtattttagcatagactagggtagctatggctaattatcacatagaaagcatttagaaccacctagaagagatgattttgaatatttgcatcacaaagaagttataaaggggtagggcatgaccccatggtagaattcttgcctcagatgtgagggcgtggatttgacctgttgtagcacaaaaagaagagagtaaggaaaccataactatgtaaggtgacagataagctaagggcactgattagagtcctataaacatgagttgaaacatcacattgtatacctgctaggtgtcaaagagaaagcaaagcagaaacataaaatgagaagaagaaaaaaagagtaatgcagtacttagtaagtcttcatcatgcttaccttgtctgtcttaccttatccagtccctagatggaacccataatcataaatggcatcagaaggcatgactccttcagtgacatgagcattgtctaccattcgtctgtctgtctttccctgtctcgggcctagggtgtacacaggacttcccagcctagattccagggccattgctgctgtacaggttgagtgtacttgagagactaattttctgagcttgtttgcccatctgtagaatggggccgtcgatgtttccttccttacaaaggtaatagaattgaaggtagtgtggctaaacatagtgcgtaggacggatggtcccctggtccagtcccatagcttctcttttggacagtagatgcagaaggagttaagcacggagtgcccttgcttctctctgatgctttcaagtacatttccaaaatgaatttctcctttcatgtagtgatttccttgtccatatctcctgaccccctccccaacccccaaactgtgtgtgtgtgtgagggaaacttgtacatctgtttcctattaggcaaatctttctcatcatctgcatgattatgaattgtgtcattctctgtgatgacaagaaatagctgagatctggagtcgttagggtaccttgtttttgtttttgttttgttttgtcagtatgctaccatatgaaagtgctagagtctatgcacagtggggcagaatcactgttttctctgatgggagttagctttgcccataatatagaaagaataaggaagacaaacatcagattgaaaccaggaatagaaactttgtggtcagtgaattcctttctctgtattatcttttgctcttcccatccctccacatttctcccccttgaagatactaaatataaaaagcactttctctaagggaagatggaaactgacagccagaccccattttcctctcaggcctctgctcctttcacagtaataacctccagggttgttggagtagaaagaagggattgcaggctttgagggaatcaaacaggcttgtagaattggttacaccatctattgtgtaatctcttttctacactggggcaatggtcaagtttttgtccttaaacttttcactgtactggaaccaccttggcctcagagccttgaccttggacatatgttaccgtatcagcatcaactgaactgcagcgtttagatttctagaaactgttgagcttctgaaagaagctgttagaagtttacatttgaggtgggaagccagccatggtggtgctacatactggactccagcactcaggagactgagggaggaggatggtgagttcaggcctgccaggactacagagggagaccctggcccacagaaggggagggagaagaaggacagccgggtaagaaggggtagggtaggagaaaggggagttggaaagggaagagttgtagtgaaggagacaaactcatatccatgaatggggcgggggggggggctgcatcaggctgcagtgtgcaagcaggttctgggtgtcttccctgcccttgggttcctttgttgtcccacagtgtcacagatctcaaaacctgttattccacctaagctggtgtatgactaaggcaacattgtgcagcagctgatggcttgcctggtcgggtcaggtggtacaaacagcaagttgagttgaacagtcgttgccttagctgggtgtgctagtgcaagttttaatcccagaacatgggaggaagaaggtagcaggtttatgtgggtttgaggcctacctggtctacaaatcaagtcctggatagctagggctgttacatagagtacatagagaaacccagtctggcagaaacaaaaaaatacccccacccccaaacaaacaaaaccaacccaaaaaagagccttagggttttctggagagactgacccactacatttatcacactgatagatcatccagttggtacaaagcattgtcctgatgaatgacttctttctaatcttgctgtgcaatccacttccttgcggcaggtctttatgttcccattatgcagatgagaagatggaggctccaagaagttgagtaactgtctcatagacagtcacttgcccatcctaggctggttatcatttactccacaaacatttattggtttccttctacatgcagctacaggccatttattctccagggacaagagttaccagaattctctgggaaggcatctgttcccacaccacagcagttatatatgcaaggggaagagagccggcagagtactttcctatgggacgggggcagagtagatgatgctctacatatgtgccttctctctggctctgcagcacctccccagatcaggacacatctgtttcatacctaatgctatttgggttaacagatgttaggaactggtccagtgtcatgtcacgcctgaatgccagagtcctgagggctgaccctgtcctttcccaccatttgccctatagattgtcttaaacccctggcctgagggttctgtaagggcatggcctttgtcactggcatagcttctaattgagactagacaaaatgttacttctctgttcttgaattctacctagcttttattcagacttatttcaatgaaaagctaagaaggaaggaaaaaagaaggaagggagggagggagggagggaggcaggcaggcaggcaggcaggcaggcaggcaggcaggcaggctggctggctggctggctgccttggaccctttgttacaatgaatcttcagctgttcccaacactagctcaggaatatgcataatgtccacatgattgggacatgtttgtggagccattaagggtctagcccaaggcagtgtaaccagtgtctgagcatttcaagttgggtgtgagctgaaagtctctggttcctcagcctgggctccgagacacgacagcctgcgagtctagctcttgcaatgagcatgggagaagcgttactttcctctgtgagttggactgaggcccagtgcatagctatggatttgagggctaagcctctggcctttttccttttgccagacctttgttctccttttctagagtgcttgcagaatgtcagtccctctctgaggggtcttggagatttaataagctgtcttaatgggggaaggactgaagtgttttatatttggtccatccactttgtaattagccttgaaacttcctggcaacgttggtaggtgtctccaccagggagtggcctatttcagggtcagtgatacaaatagtcaaaacctacttactggatcatagacttgcttgtggtttaggcctaggtaggacactgagaaaaggatgtcatgtgaggccagagctggaggctggttggctactgcaaacggcttcattatcttggagaaaccaccgtgtctttatgtgtctgtttccccattcgttaagtgcaggtttagtgaaatatctccccatatccattccagctctagacactgcagccggccgggactggaaatgggcaggttcatatttcacaagaaagcattggtattcaggagcctggagctgcctagaagtagatctccttttccctgggattacaagttgtctctgtctagataaaaaggaaacagacagactttcaccctgaggccagaaggagacacagccaggatcttgggtcacaaaggtctttcagggtgactctaacaagcctgctggcttagctttctttcaaaccctgttcctttgctgcacattgttttaattgttgctaagcaacattctctcctaccccctccccccccttctttttggcaaggcatccaaggaatgaacccatatcttatttagttttaaatacccacatgcaaaggggagggcctaacttaaattttgtttgttcttctgattttaatccatgacaggaatgcagagcttactctttgcctgtcttgttaggtaagggaaaaaaaaacccatcagtctgttgaaggtacgcgtcagaatcatgccgtggggcatattgaagatattgcctatgtgtgaagctgccttgcaggagaggctcttgcaacgtgttctttattcacaaagtcaattcaaatttaatgaaaagattagtaggtttttataatcttcatttcagatttgctggcttatctcaatcttgcaccaacagactccattgaaagggaacaaagctgtaatttaaatcaattccctgggcaacctagaatgcttccagggtgttacacaatcagtggggctggttcctgtagcttgattattgcaggagtcccacacacttcttccagtagctccctgtgtgtttctgcccactttcttgacgatatgagatgtgtgcctgtggcctctcgtataatgaatggacacaagtactctcctgctctgagtccatttatttttgaatatttgagtcacccttggcaaatagaactcaagtgtctgtttcacattcacttaccctaatagttaatttacttgttaatgggattaattttcagctgttttatcctgaaaatgttcccagcaaaataaatatgattaccgtgtcctctaattcaatcccgctgatgtgatgtggcttctcccattctagaacaaatggattttgaaatcccagccagaagtaattgggtcaattgtcatatcattgtatggtccttctgacagcagaatgtagtggttgattaaggacttttcttttggcaaagggtttttatagtcctgtcttaagggcatcaatgaagatgaacatgcggtgaatcacttgagcctatgataactttgtctcttcctcgtttgccaagtgagaaaatcggactgggataactagggtgctggagacagagaatgatgctgtgtcagaattgggattggattgtacccaaagcttccctttgttctttggggtcatggattaaagcaaaataaagttttgtcccgttttcctgtgttaataacctgccttctgtaaacacaaataggtggttgtgaatactttgttcagtctttacttaaattagttaaatcaatttattgaatcttatagtttcctttatatacatctgtttatttagtcttagaacaattctagaaggaagttgctcttctatggatggagacgctgatatacaagaggtacagtgcttggtttaaggtcatacagctagcaatgatagaaccagaatggaaatccaagcagtctggccccaacacaactactttgcccatttttgtgtccttcccaaatatgtcaatcagagctgcgttcatagactagagatatatgctaactataaccctgaccttctagtgtggtgtttattacagctgccttctacttttgtcttttcacctagacatgggacatgtagaagtaccacagattgccctgcctgtctggcccccacgcctgtagtgttgatccttagcaaaagccagttgtagaagagtcagtgtttttcctggtatgatattttgtggttcccagcccaactgtgttttcattgatgacatttcaagtcaactggcctctggtcttctcagtatgctgtctcatgctgtaatctttttccaaactacacaagtctggtactctataagaaggttgtcttctccctggaactttgggctgtgtttggtctcattttttgctacatgttggattttgattagcccccaaaggctcatatttgaaaggcttgggcaacaagnnnnnnnnnnnnnnnnnnnnnnnnnnnnnnnnnnnnnnnnnnnnnnnnnnnnnnnnnnnnnnnnnnnnnnnnnnnnnnnnnnnnnnnnnnnnnnnnnnnnnnnnnnnnnnnnnnnnnnnnnnnnnnnnnnnnnnnnnnnnnnnnnnnnnnnnnnnnnnnnnnnnnnnnnnnnnnnnnnnnnnnnnnnnnnnnnnnnnnnnnnnnnnnnnnnnnnnnnnnnnnnnnnnnnnnnnnnnnnnnnnnnnnnnnnnnnnnnnnnnnntgcactctcctttgtttcctgctgagttgactgtcccaccacaagctcttactcttactggaaagtactgctccgctgcagggacaaccaaccagtcatgagctccataactgagccaaacagttctttctctttataaattgattatctcaagcatttcttttcatgagaggaagttgatccatcctcagaaggaatttgtttgtttgtttggtttttcttctttttttgaaccattatgttgactcttcattgcccctttgatgtttacagtttcaagatgtcttggctgccttgtatctggtctgatatggtcataggtgcaaccctgtgattgttgctatttgacagctgggcagctgttgagagggtaaggaaaccaggccggacttggatttgaacccacatctggaaaactgcagtgtctgtctgtagagtgaatttatagagttgtgtttctcagggactatctggggcctcttgcttacctatcaaattgagcaggcatattgctcagtgaaaattaacacagggccatcaagaggttaggtctcagataaactctagcaacacttctcattcctggccacacacccctcccttgttgggcgctcccaccgttgtgcctgtgggtggaccctgtttcattcctcccccctgcccctagaggagtcacagtcgagctgagggtgcacttgggtacttggagctagatggttacttgctaactccagtttgaattgatattttgtgtctcaaggacagtatatctgaagtgggacctggggctttgtgtttttaacagattcttgagctcctgcaggatgcctacagagacagtgataggtgccttcccctagtcgggtctgtgggacttggttaagagtgagcagagtgctttaactgtacagagcttgggcctgaacaagtcctgatttgttattcctgcatccagttgtttcctttgattcaaaagggactgaacatctgttgaggatgcagaaagaatgtctgctctgggacagaggttaggtagttgtcctcttttgacaggctctgtttttgcaccaaaggaccccagctgtttttctgtttggcttcccgtggaaaccctatggttgggacatgcgtctgcaaacagctggagagagtgcagatcgagcggtcatgctgagaggctcttgggaaaccaaatgggttcagtctagtggtggagagggttgcagaggaatggagaggtgggattactgaggatgtgaaccgataagcgaatggcagagccaaagccttccaagttaaggtcctgctgagggtgtttgtagtgagtgagaacgttgctgtggacaccagtagagcagagtctgtcggagtcccagcgatgggctcagctgtggattcaagcctttgccttgactctttaccagccaggtggctatggacaagcctggtaagctttccaagccttggcttccctacctggtgttggtaataattaatagtacagacatagtggtactgtttcaggacgagctagttagtgtgtgtgagatcctgtccacgtgggcagcacgggttaagtgtcacatacctagaaatgaccgaatatgtggttagcagctttcaggggatctctcagaatgacccaacatagctcttgctgtcttctaaaacactgatctgttttaaaggctctattcatgaacccatagaccaaatttttttttttttttgagacaggattttctgtgtagccttcgctgccctcgctctgtagaccaggctgggcttgaattcacagagatcctcctgcctctgcctcccctgtgctgaaatcaaaggtgtaccaccattattacctggctatgcagaccagctctaatctttctgaattttattgatttttattgaaaatggcagtcgataggaaggacattttagacggacactggcctttaggaaagaagtcaactggcatttccttccacaagtcttgatcagcctcagtacatgatacgtcattcacttgtggcagtaatcctgtcttctttgtggacttacaaacttagcagagagagaagaggaagcagaatttctcttgtctgagcagcaggccaatctgctctttctccagagccaccaggggctgcaaatttagagaggtgtaggccatttggcttgctctatctggctccaagggcaatcacacttctaaaagggttgttgactgattacttcttctgcagtattgaccataagttgacaactctctctcagagctgtgtgtggctcatacacgtggccaaacttacgctcctctcaatagcgttggtttggagatattttaggaagagcatccaccggtgaggaaaacaagccccagctcttcggagagccattcttttctccctttctccttgtgagaccaatagctggtcatcaatatgaagaaaactaatctgagtagttgtgcaaattacgacaataaactcagcaattattccttttactaatgtgtaatttttttcctggacttgtatttttccaggtacatttctgttctactttgggtgcctctgaaatgtctggatgttttatgctgctaaaattatatgggtctaaaaatgttactagtgatgacacttacatagaagctcacttgggctcatgctagcaaattgctgcaactgggccctctacccacccctctgccatcccactaatgtggtatttgaggcaaagggaagaaagagaattatcgagttcaggtgcagccagcaagcctgtcatgagaattttgttttagtcttgtcggcagaaaagtagtggggtgttgttgccatagtttcagtgaaaaatttgaccttcgctataataacatacagttagagagaaccagctaactggttttctaaaattagtattctctagtacataaggcagtcagaacagagtttttaattaaatattatccaaggccataaaagcccgagggaatgcagtcctctgacctgggcaggggaggacggaaacccgtaatccctcttgattggtcttttggaagctaggagaactggagtggggtattgggttgtttgtttttgtcttgttttttgaatatcctcattggttttattcttgagagctgtcagaagcgagtttatacagcttgttgagagagcccaacaacaccctacaactcacagagcaacccggcagggtctggcagtgctgccgggctggactggggtgctggcaaggtcactccttcaggtcagggagtgtttgcagtgaaggttgagacttcctgagtgaaatcttggtgttttgagcagttccaacttgtttctaaactcatactcctttgaatgcttaatgtgtcattaaatggagtcagcatctctgtgttctaagtagagctgtgttctgcctcctccagctctgtagtccttccctcactgagctgtgatccagtcccaaaccgtgatctgtacacagattagataatatttggtatctctcaccaattccagttaagagctacacgagtttgtttgtttatttatttatttatttattgaacttgactggaaatattgaaaataccattattccatgttttgtagttcagaatgaggtttctctaatccgttgctgcctttctcgccctttctccttggcatggtcatcccagtgtaagcctagcaatggtggaagtcggaccttgagttcacaggcctccctattcctgagattacggcctaggccagcaggtccagaccaggcgcagttgagtgctggagttatccccagggtttgatgaatttctcttgtgaccgaccgttccacaccagttgcctttagtaagttttctcccctatactttttatggtttagctttgtaattttaccttcggatggttattagtagaatctgaaggatggagtgtacatgtgggaagatggatcacctgtttgcctctcctctctcttgcgatttgcttgtttctgtactggtgtctcagctgtggtaatggcacattcatccctaggaagacttgcagaaaagcagccccataggtgagtggattgtaaaagcgcctgcctgctcctgaggctgtctacctgaatcgttcggaattgcctctgccctgcaggaattagagtcttagggcaagagacaagccggaagtgctcagtggattgttcttgggagtgctggagctcaaccatgcttttattccattaggtcattgtgtccaaataatttgaatccatctcagtaataatagcttaaaaatgcaattagagcgctcactggaaaagctaggcatgcattctaaagcacttcctggtttccattatgcacacgtcctcaggcccttctgttaatatggataacagagttgctattccgtaaaccatccaagaggtagcttgtaacaggctggctggtggaatgttcaactagaaagcactcttgatttgagggtgataggcctgacccagagactttattggctcagataatctccactgagtgacatgaggtactggaagttaatgatctccccatacacccttactttctgtggccttactctcttcggtgtccttgtccaacttttcctttgttcctttgtcctgtgtgcttgtggttttggggaatggaatcttgcaggtaagtccaaagacgcctgcctcagctgttcagtttgaccccatgtgaagacttactactggctgagagtctctctgtctttaaagggctgtctcattttaagtcaatatcgtacgtttattctgctttttgaaaatgtactgtcatcttaagcgttatttctttaattcctgaaggaacttgtttgttccccaacttccctcaatgacatcctgctaccaaatccccagagcctgtgattatgtctctcctgtggtaaaagaaacgtcacagatatgataaggaccctgagatgggaagttctctcctatttccagttgttctccggaaatcacaaggggcgctgaaggtgtagagttggtgaggatcagaagtctgaagtttgtggccctcaagcaacagagtgagtggtacacagaaagcctgaggaaactttctcctgaagcttcataaggaactcccctgcctactttcaaatttaatgtgtgtgtgtgtgtgtgtgtgtgtgtgtatgtgtgtgtgtgtgtgtgtatgtgtgtgtgtgtgtgtgatgtgcaccagtgcatgcatgcacttgggaaaagcagaggtcagatgttaagtattccttggtagcttcctaccttatggtgtgagatgggggtctctcagtgagcccctgggatactcctgcttctccggctctgttctaggattacagctgcagcatgcagcttgagagactaagtagtctttcagcctcttaatgttctctcaagttgaataattaatttgtaaattaatttactcttcaaattaagttgttaagcatcataaactatcaagtgccctctaaatatcgctttannnnnnnnnnnnnnnnnnnnnnnnnnnnnnnnnnnnnnnnnnnnnnnnnnnnnnnnnnnnnnnnnnnnnnnnnnnnnnnnnnnnnnnnnnnnnnnnnnnnnnnnnnnnnnnnnnnnnnnnnnnnnnagctgcccaacatcctaattgcagtagtgatggcatggtatttatgtgtgtgctcaggttcacaaaactatggaccaagcaagaacagtgaatggccctacacataacatttgtaaaaagttaaatttcaacagtggattatgtcagtttgccctacagttttttttttcttttatgtatggggaggttatactaatgcctgataagactgaaactgtttgtcattgggaaggctgtttgttgttgttgttgttgttaatgctttatatactaaagcttattttggcttatgctaaataaaacattggcatcaaccctttttgtatttttgtgggtaaaacttaaatggcctgccagattttagaaatatgtctcataagctatatctgagcaaatatttagacgccatcccatctttgcctgctcagtaaaatctttagttcatttccatttgttgaggacatcagcatatttagagttaactttttgtatgtgttccctttgtttgttttcttgctctccttctttgaagattttttttaaaattgctatttcacctattccatgcgtttaagctgtgttggatgggggtttagactctgtgtgtttgccttagagattgcccaaatgttttactgtgcacgtctcattaagccctgaagttggtgggcagtcactctttcctacaatgtcaggacagtgaggacgcttatgctactgtcccccactcagaatatgcttttattgttcctaatgatagggcttgttgttgtttgcttggccttgcagagtaagtataattttgttttatattgccattttaaaaagttggcctgacttttgtttttactaaagctgtgtctcagataattcttttctgcttcaagaagatcccacagctctggggaatcctgaaagtacagtcatttctttgtgtctttctcttttatccttaagtggcagtttgcttggtagagatttgtagattaagaatgccccacaccccccccccatcgcctctcccagatttggcctagaacctcccttgtcttttctctttgctgaccttcagagcttctctcttcctgtgatttttgcagtcttcctcctgcgactccaagggctcacttccctccatttgttatgtacactgctggggagatctccagatcccaggttggtttttgtaaacaatcctggagaactaagaaccatgcaaatgctctctagttttaggatatcttttttttttaaatttctcatttttgctatctagtttgaactttcctatttcacataatctattcttgtttactaagtctatcctatgatcattagagaaattaattttgtatatatttttatttaaaaaaaatacatttttgtcttctccagatgttgatcattcttgttcctccatgcttcaagccttcactttattttctgttccataaagatttcctaaagtagtttatttgtcacagttgtactagttaatatagggtatttatgttgcaattttaaagcgttgtgttgtgcttttgatcacttgcttgtgcattttttgcatttcatctatgagccctggcttgaacttatactccttcagaaggaatgattttcttcgcctgttgcctgaagtgctgccaccaaaagatttgttgaaatcaagtttttaggtttttaatgtttttttttattttgtttattttctatctaagaaatctacagatttccaatggggcatgaattcttgtgacaaaccaatatgagggcgcactctggttctaaattattataactgttgtccccccccccccctcgtgggcacactgaatgtaaaaagtaagttactattatatacggcagacttgtttggtatttatcatataaactgagtctatatactcaagggttgctcctcagaatttgaccttgagtggggctgaagacagccagagatacctagggtttctagaatcccttagaagtaatgcttgcctaagggtagacttgagcccctaacagcttctctggatgcttttaaagtgtgttttactatttcctcaagctttttgtttgagttgagaggcccattcagggttccccatctgttacactccaaggaaaggaaatgcaaacctgtcaagtcttttgttcacaacaagttcgttatctgtatgaaggaaggcagagttaccaggatcgcctccaatgaagcactgtaaagatagaatctttagaaagagtctggtctcttgtttttgaatattcaaattataggaaagggactcaagttagtcttgggttagatttactccactaaatcagtctcacttcaggctcaaggattatggtgttttgtggtaatatggaagctcacatggaaactctgcactaataccaggtcaaactaaactaaacaagcagataaaagagtgactagcttacaaaaggtgctatgcagataagatatcccctgccgtggattagggctctagaaggtttcttttatctgctaggggtgcttttcattacagtcaaagaggtctatccatctaactatagcagcataggggctgttaactgttaggcagaaagctacagtgataccctcagtattcgttttaacttctctattggccaggtctgagttcttttcatagccttgtcacttcgtggcttacagaatggctgtggcaggtccaggttgtgtttattttcctggcaaggagtgagaggggagagctgcagcctgagttctggtctcactcctctctcttccgaggcccgtcgtccgtccatccgtccatccgtctgtccgtccgtcccgccctccctcccagccagctacttccacaggtcaaagctgtgtttccttctctctctctttcaaagagtgtgggggaagtgaggtgctctttctctcacagggttaagaagccacgaatcagaaaggtattggaagtttttagcatagacaacagggtacatcttgttacattattgattgcacacggaggagcccacccgagtttacaggttttagtgtttttcttttttcctgttgaagaacagtggcttttagcagcagcatctgttaggaacaagcagttctctatctagttgaagctgtctgtgaaaagggatcataaatgaatacaggcaactgtatgtttccccagtggttttgtcttgtcacttttctattgctgtgacaaaacaggatagcaaagctttgaaagaatgcgatagatgtgggactcatggctcaagagcattggagcaattcgcagcacatttgaatgtgcggtccccactcagcaatgaccaaggtgatcatgaggttaatctccccctctctttttgtgttcttcctgagttggaagaaggaactctccaacgggctcagaagggctcaggtagctagcaggagtatcgtgtctaggagctgttagaagatgcagttgctgatacattagagcatgcgtgtactggaaccttccacttagctctctgtcttccagttttcctcatctcagcttggtggaatttccccctactaggtgtggggtgatggtgaacaatattttgtgacacttgagtcagctaaaaattataacaaaaacttgagtatttgacccatgttccgctgccctgcccggcagtggcgtgcgtgcactctgccctcagcaccagaagccttcgggccttattgtgttctgctgttgttgccttgtttcaaacatcacacactatctaaaaagattgtgaggtttttctaaagaatggaaaattaattgaatggtgcatgtataggatggtgtttaaaagtcaataaaataaaccagtcccggagaggactaggcctctttgttgtcttagacttgctgtgtgctatattctgatctaagtcttgcatgactaccccaaggaagtgctatgtgaggaagtatgagcgtggcagataggacaaggaaaccagagagctgactatcagtgttctggaaacagttttgcctcaggagctggacaacttgagtccatactttgctttgcctgttactaccaacttgacctcctggaatgccattgccctatctggacccttggttcttcatccatgatgtgatagtctattaggcttgatagtaaagcacagcccagcttcctgcaagtctatgccatgcaggcctgagccaggaataatttacattgtgatagtatttacagtcattcttatctcttggtaaaatttaatctctggattatgaaagagtaggcctgacattttgttcttgtttcttatctttaagaatcatacaatcagatggatagtggtggcacacacctttaaactgagctctcagaaggcagaggtagagaggcaggcaggtctctgagttcaaggccagcctgctctactgtgagttccagaacagccaaggctatacagagaaaccctgtctcagaaaaaaaaaaaatcacacaatctttaaattagagtagcccatttctcttcatatttatgtatatgagtcaccaacatnnnnnnnnnnnnnnnnnnnnnnnnnnnnnnnnnnnaagttaaaacatttttctatacttacccacaatgggaagctctaacataagcaacgaaaagactggttaatgctctcagaagccctctttcagtttttctctaaatagcatggatttggctttcttgcttgtatgtcaattcatggcttcaaatgacgtttgcatgtagggaggcgaaacgacacagtaatgatatcatggtaagactcagttaaattctagtcaccacttactgtaagcgagggctgttgaagagtagtcaccctgtaaaataccattcccagcagagttggtcttttatgtatcttataggtacacagtaattgttcattcccgtataattacactagcaatataattcatttacctgccacgggcattagctttgatctccccagagttggggcagtattttgatagatagggccgaagaaaaggtacaagaccatttatttaaaaatattaagttcatgtttttaatgaactcattaaaattctgcatgtgcacaggagtgggcatgtgcacctgtgtacatgtggcagccagagaggcttttcattggttctgcaagatggagttagaaacactcgcaggaagcgtgtacgcagatctgaactctggtcctcacgattgtgtagcaagcattcttaactgctgaaccagctcctcctgcctaattagaaaattaaaatttatgtatgtgtctgtatgagtgtttgtgtttgtgtgactagcacatttcttgacttgctattcttctcagtgccaggcgttgaatccatgactttttagatgctaggcaagcacccgaccatggagccacttccttagcccagctatttcagggcaaggggacaaattatattgttttgtttcattctgctattttagattgtttttcaatactccacctatgaagtaaagctacaagtcttttttttttttttggttttttgatacagggtttctctgtgtagccctggctgtcctgaaactcactctttagaccaggctggcctcgaactcagaaatctacctgcctctgtctacggagtgctgggattaaaggcgtgcaccaccatcgccctgctcaaagctacaagtctttgaccttctgccaaacgcactcagttacttctcatttgaattcaaacatcagactctatcttgactcccagcgtaggtcagaaccttgaagagtgattgaataaggataggcaaaaaggcttttagaagtcatcattaaaaactgtttgcggatggagtctctccttggctcagcccaggtttgttttcagtagtgggtaaagttaataagactttaatctgactgtaagtggaaagacactgccaagattaaattgaagttgaattaaaaccagggcaattgaatttgtctaattaattgagaattacgtctcagtctgtgttcgtcttcagttttttcacctctgtgccaggcaaacacccagtttggattagttacacatttggatgaactttcccagaggtatctgtagcaacgtcatccaagaactgcatgagtatctagttgtacgcgtgtgtgggaaataaggatgttcttatcgttttagtaaatagtcagccccgcatctctcatcctttgatggtgtttaacttagtccaccaggcttagcagatgtttaatttccgtcacgaagaaaataaggttcagtacctttccctgcagttatttacctcttcatgaaatgtacaggcagcgatgaatgcattctttgtcctgttgactgggccagtgccagtgactatattccatgtcctctcaaggggacgtgaaaggcatttcatggagggggaatcttacttaggttatgaatctcattttagggctatggctaagtggactttcagatttggttagagtttagagccccacattatctctctaaaaccagagaaacagttcccagctgcgaaatttgcacttgacagtggtgggtagctggtccagttctcaccaccccttgggacatttgggttgtttatttcccctctcagccaaaaaggactgctcaattcagaagctcctgtctgctctcctgttgttattcagacatcacttgcagaaacacgggctggcttttcctagagtgcagatagcgttgctgaggagtccgggctggaaagtcagcatataaaaccttagtgtgcctgagttgtttgttgttgtttctttgagactaggtctcactatgtagccctggtagggctcaaactctgtatgaacaccaaactagcctcagactcagagacctacctgcctctgcctcttgactgctgggattaaatatgtatgccactgtgtctgatttaaacatttacttatctatctatctatctatctatctatccttatagaaacggttggctgttagaagaagtatagtgtgtaaatatttcatatgtttattccaaatatcagtttgcttaactagtttaaataaatatcatgagggctgctaagatagctgccttgggtaaaggtacttcctgccaacctgggctctgtcgccatttctcacatggtggaagaagaagatggactattcaaagtcgtctgttgacctgtgtgtgtgtgtctctgtgtgtgtgtacacaaataaatgtaaaaataatggagtttgctttttgtgtgtgttaacatgcttatatgtaggtttggggatgtgtgtgtgtgtgtgtgtgtgtgtgtgtgtgtgtgtgtgtgtttctcagttgctctccacctttggtttttaggacaggtctctcactgaacctggagctcatggatttgactggactaactagatggcgagcttcaggcatccacctgcccctgagccctcagagctgagctaacagatgcatgctgccacactggcttctgacatgagtgcttgagatctgaactcacaggtcctcctgtcctgcaggtactctacagatagatccatctctctagctcccaaagcaatggctctccaccttcctgatgctgtgaccctttaatatacttacttcctcatgtggtactgatccccagtcccaaccataaaattattttagttgctgtttcgtaactagttttgctactgttatgaatcctaattaaatatctgtgttttttgatggtcttaagtgacccctgtgaaaggttgtcgctccaccccatccacactcacagaatgacaaccataggatgagacccactgtcctagattaaatatactggcttaatgcattgacaggaaaagtttatgacatttagttgtgtatgaggagattgaaatcaaagtcacaagtgaccttcaaagtcactatggctatttaaataaagggggtatgtatttttctttcttctagctaaaaaccaaatcaactatttttctttagtatgacataataaagaaataataaaaaacaattaaaagacccccttgagttgttaagcccctaccagttccatcctgaatgaagcccagaagctttgttccttgtgagcatcagtgtgccttttgcctccttccctcttgccccatcccgactttggagcctctgaacaggtgattttcttaagggtcttcttaaagtgttgtctttcattactccacaaaatagggttcttgcactcccctctgttgagatttgaaagtctaatcgaatcaaaacataatctcgctcatcctgggttttcatcaatagcttctggctctttcttcgccacggggtagtgtcagttgccggagaagcaacatagttttaactctcactctgtttctctccacccgttgttgtcgtctctcctcctgtgaagtgggtgatttttatgtagaaaaggtccagtgccacgatagcctgggtctttctattaatggaaggtccagactgagtctttcttcccttcccccaagaaaacgatgtgcttccctggagacaaccattccgtgctctgcttttccctggagggctgctcctactcctctaatcaaggctgaagcatttccggtgctctctcaatctactgttaacagccatcacctgccggaggatctgctgacagcttggcaccagcaggcctttgtgggcttcattgcctgtgcttaagttttttttttctaagaccccaggtccctttaagaagatactggagatatctagcccatgggttatttattttaaccgatttattttttattatttttccatactatatattcatatgggctatttaaagacacccagaggctgcagcaaactaggcccttgagcaagaacactatctgtgcatagatcccagtgtaactgccctacttatagacatactgacatgtacctgctaccactgtggtaactatgttattgggggctttgtgtaaatcatgtagtctctggtacataattgcaaaccaacattatctttgtgctttggcatgtcgtatatgttcctaaagcattaaatgaaaacaacaaaaacaaaaaatgaaaacacttgagactgtaatgagaccaattaacttcacccatgctatgacttgcatgttttgccaatacatgatggaaggggttaacaggaagccctgtttggctcaagagtaaaatgactccacaaagacccgaagtggctgaagaagagaaagattgctagactttgtgttcgcatggtctctggtgttgcggtctactgcacacagcaggcagtagaagtgctgtgtggaagtgctggcctatggagagggatggaccacagcagcacgggggatggaccacagtacgggagacgattccagctggggcttctcacagtggatgtctggaggccaaggctgcagggaaggaccttatgtgctgcatgtgtttagctgctctcctgattttgttctacatgtatcaaaaacacaaaaaagaccatctggtgtcttgaaaggaaaaataatgggaacagagggtggtaggatcgtgccagcattgctgtatttatggggtggactcttttactcgcctctcgtttgggggactgacgttgagggttgagcaatcatgaacccagaaaggttattttttaatgaacacagcctcatgatagcttttatgtataggacttttttttttcacttttaaaccagaatgcttagctttgccaagaactgcccatgcttcttatctcgagagcatagtttgcattttagttatgaagtgtctagtagatgtctcagggttggactaaggtcatagcaaagctagccttggctttggtcagtggcttaacattcctttagcaaaaataccactaacatttgcaatatctatagactgtgctctttgtggtgcggtaggcagaaagataataccccacctatagtgattttgatagtttgtaaatgtttcttctcttatttaagtgtaaaccctgaaaactgggaaggtcaggtcatggctgtgttattcctcctcttcgctgtctgacacgtggattgtactctcaaacaatttttagtagaaaagacaatttggtagatccaactgaactcttatcgagtagattttggaggtgctgtgttgagatagatttgccattgtatcctaacatagcagaaataatcccatgtatcttttttgaaaaatgttttaaaaattcttttctttgcatgggtatagttgttcgtatatgtgcatgtataccacatgcaagcagtgcccatgagatcagggtaccctggaactggagttaaggagtggttctaagcctccgtgtggggccttgaaatcaaacctggccttctgcaagagcagcttgtagttttatacagagtcatatattcagccctctttgaatcttttaaattctgttttaagttgcttattgtaatctaaaggaagacattgtttgaaggatgctttgttctttcctacctcccctggtagactgtgggcagagacgttatctttcttgttgtcctctgcatctccgctacaaaagggagcatctttctgaaaactctggcagtcatcaaaagcttgttgaatgagtgtgctataaaagcaaagaccagcactatttcattcatgtatgaactgtcatagaacatgcctaaagtctacttggagacagacagggtcattattagagaacttacaaagattaagttgggccatgaaagatgagtaagagataaagataagaagagccagtgaggctggaatgagggaccattctcatacagaaatcttttccttcttctttcttcttccctccttccttccctccctccctccctgccatttgccctagttacccgagattaaaccttttaggcaagcattcagccactgagctatattcccaggctattataagactatagtcacagatggatgaagtacaaatgtactatattttaccaataaactctgtgtgatgctgaggttggagcaggtgatgggtgtcagatctgaaggctcttaatggataaggacaatttgcttttgttgataatagtattactgttaatttaaagatggcctttcatggtaagttcttatgatgaatgaattccatacaatcaccttatttagccaacagagcaatcttattacagtgagcatgtcctagcttaaaagtttgacgagtgtgtgaaacctgttcagcctcatagtcagcaatggattctattcttggtaggaacagaggtccactgagcccagggtttctctgtgactgtggaagtgggatgtatccccctttgtttgctgttgtatgcatgtctgtgggggtgttggctggtatgtgtttatgtgtttgcatgtatgtgtgtgtgtgtgtgtgtgtgtacatgggtgttactttaactatatgtgcactcctgcatgtggaagcctgagactaataccaggcatcttcctccatcactaatttattcattgaggcagggtttctcggttgaacttaaagtctgaaaatacagctaatctagctaaccaactggccctggggatcccttttcttcctctgagccctgaatttcaggtgggttgttatgcccacctggcaatcgtaagtaagtggtcatgtaagtgtggtctttgctttcctcacatttgcgtcctccggctttagggtgttcttcatactgagataaatgggcaccatgtttgccacattccaggtgctctaaggtttgggaagaagaatgttgcccacttacaggtctggtcactgcatctcttttaagatgagtctggtgtcataagcattaactctattgataaatttggtgaggcttggatcaatgaataattctcgtgtcagctgaatgcaggcagtgttttggagctgatctacagtgatgcaatcagtggtagattgggggaggggcaggggaagaggaggaggtggtgagaacaggatgctgattaaacagtaagttcttgtgttcctgtttgtgggttgctgacttggattgcctgtgtttatgaatgataggataaacatgtttctgatgacaatccagagagggagcaaaaatggcagcaaaacaaggaactgttgctcatgcatcaactggtaagcagcgctcctcggtagcagcgcatggcagtcttgtgggcgttgggaaggagggaaggaagagtctgttactgagagcacggtccgggatggagctgtacccacgcaaagtatacccaccatctggcctgggctgtgcttccgaaacaatggcccacggcttatagagtctgataaatcctgagccgaatggcagcatcgagtttttagtgtatttagttatagaatgcactggtcctgttagggagaatggtggcagttacaggaattgctgaatcctagtatccctaagatgcgtgagccaccttaagcaggtctaagttaggggacttagccaagacagacagctagttagtatggagacaggactacggcctttgagagacatctgatgatcatgcttagcagtttgctgtctacctttctcaaagatctcctgcccatctgaaggctgataggaatcagcctaagagcacagttttaggagttttcttgccccgtaatgactcttctggaccttgctcttgacacgacagtacttctcggccttccccgtctctcttggagttggtatctgtatctacacgtttactacctagctctttttaagtgttgcagattattcgttttatagtataattatgccagagtggaattgtctacactcggtggtatatatacatttaagttattcatttattactgttaggagtagtattactaagttactaagcaaaaaattgtacagctcttctcttcatgtgctttgcttttctaaaggctggataaatattaactttttttttttaattgcatcatgatctttgttggtcttacaggaaaataagttgagtcagggaagaagttaacgaattacctaatgtcccataagcatgctgttaggatttcaagccaggctgatttcagcactgtcactgtgccctgagcattgtgctgcatttgagcagtcacagccttcccctagctctttgttcactcgtccaagtgctgatatgccgggtgagtggcacagccatggagttaccaaagctttgttttcctaatacagttttaaaaaaaatgaactctgttttgtcaattcgagttcttaggaaaagagttgagagaaatttacagtgttttctcattgactccgtgccccacaacccctatgcagtttcctgttgtgctgacaccatctaccagagtggcggaccattaggatagatgagtgacatcattgttactcgaagctcatagtgtgagtatttcaccctggacacgatgtatagaaagtggtgttgggcatatttgtgatagtgtgtccactattgcagcatctcacagaacacttgaactgttgtgacagcccctctgctcttgctgtctagcctcccaagtccctgactcttggaagccatcagtctttgaactgtttctatgttgttgtttcccaccaggaagacatgtagttaggataacaatgcttcttccacattgacttttttttagttactaatacactttttaatttcctctttatctcttcctggcttgataggtcatttccgttttagcactgaataatactttggatagacccaaatctctatccttatctctatcactctctaaagacatacaggctgcattcaagttttgccagttgtaaataaagctgctatagacacccataagcaggttttgtgtggatatgttttcagcacctttgggtaaacactcagaaacatcaagatggcttctgttgaaaatcgtcttcaatggtgtactccttacttagtgcatccagcctcttgtcagatagaaaccatcaataatttagtaaagtgtttggttccagtttactcatttagtgagtggcagttagtgacttgaacccagagcctcaactttgaaatcacccttcagtttctttttgactgtgttcagttccttctcattgggatgaactatgttagcaggtggtttgatgagacctgcaaatagtgaagtgtttatttccagctgaaagaagagtgtgtgtgtgttttgtttatgtatgtgtgtggaggctgaaaactgaagttatcgtcttcgaatttgctttttttcttcacattaatttgacttatggtgtccttttctcctctaccagaggagccgtacaggactgtgactcagcccaggaacggtgggacagtcccggttctaaatgtgactctgaatttggggtttcaagtggtgattttggcctgagtgtaatttcagcaacagtcacacgttcacagcataaactcatctaaatttatcagtcactgcatcgtaacaaatccatgtctcattccgttctctgttttctttcctacaagaatattctgcactcctgagtaagttctgagtagcattggactatcctcaaattggccaatttattaattcatcttgaaaacttggaaaaagatgcttcggagtggatgttctgaatgagatttttcttttatttggcaggcagagttatgtaaatacaaagatagtgtaactgaagtaaagtaattctaatagggtaggcgatcggatgatgagtttcaacaatgctgaggacgcactacggcagatgggacaagaagaactaaaagcaacagcaaactcagggcaggggtcaagatggagctaaaggaaattcctgaatttattttatattaaaatatgtgtaaatattaattgatttaaaccttataatttgaaaaggaaatgtactcacattatattcctttgtatacattaagggaaagcggccagattcagaacaataattgccacatttttttccctttatatatggaatctaatttaaacaagcaaaaaagcaaaaaacccagaaggtaaaaagaggaaaccacgtgggatggaggaggaatgagggagggtaatgatggcaggactcgaaaagagggcatggtgcaggcacagggaaatgccataacaaacctgccattttgtccagtgaatgcacaaacttaatatacgcaataaagcaaatgttgttactgaaaaacagaaatgtagccatactatattacttgatatgcacagaacaatactttcatgatgctagttatataaactaccaaccagctcatggttagaaagcagtaaatcagccttgactatgaaaaagaaagacacagacttgagataatcaggcatagaaggatgtggagatgtgtgtgtgtggtggtggggtggggggggaggggcactaagagcttggagtttagtggctgagagttactgtaccacaggtaaaaccctatgagttacatgggctcctaaaaggctgttaccatgttaaacttcctctgaaattatagctgggtccgtgcttttctgtcagagagagcagcagaaacttcgttctcctaaagccctcaaaactaacaagagtctgggtggacagagtagctttacctcacaggttggacaaacaggagatttccttgccccgtgtaaactatcccatagtctctgcagaggagaagtggtggtggattgtggcaatatggccaagcgactggtggtagctccagattccctatcttggtctaactgttgatattgtggttgtttaaagttcagcagactagagagcttggagacctggaatcacttggcagctttgaggattcagggtattattgtcttagctgtggtattcattgatatgactggaaatgtccacaggatgaagtggacttgttccaaatgcctccccggacattttctgcacctgacctggttggctacgatgtgctgattattctcctgtagtggtggttttggttgaagagtctcaaaagagtggagatgctctgccgggctaggtattggattttcttataacgataagtcagtgaaattctgttttattgaagaacttccctagttgagaaggactgtgtcaaacttcctaggttctcttaaaaattttcagccagttctagcaactgataatgataatggtgggtcaagaaatcttggcacgattttttactttttaatctagatatttgcaggtgaacaatttgccagaatttatgtacctttgtgatccacaagtcattataatacctttttgggcttaaatgttttgattttgggaagatagtgtgataaccttcactgactgtaacagagggggaaaataatctttattacatacttttatttctgacttttgaatccgaaatgggttttggaaaatgctatattttcctaggagtggcagctataatcactattgctgccttcccacccctcctaccctacctgccttccttcccgttcccaaccacccgtttctgtcacagcattagattataatatttatcatctagcttgaataacttaaaggctttaaaaaatgaacttggcttaaaagaacatgagtaagcagataactgtttgttttcctgtaaaggtcacatccaaaattcagtgctcctgacttttagaatggccatttttcttagaggaataatttagacaagttgaattgaatagctctagcatctttggcatttattcaactttgtctttaactcccgttgtctgaacaaatcttttacagagaatggatcgtaaatacacatcacaggatccctaaaagaaaagaaaagaaaacaaaacaaaacaaaaagaaaacctatttcattttgtcttttgtaagaaaaattatgagattgtaatgttaagttgcattaagtaggcttgcattttgaatgatgataatcccattcgtcttaaaatcttgacttgtggtaaccatagatttttagttttcgttttactgatagtgtgtaggagtagggggaaggaggaggcactgagtgggtgcagcagttggcctaattgtttaaactgagattacttaggaaaagatatctgacatgtttactttacacggagcaagttgtttacagtagagatcatttaaatgtgagttaccaatatctcaagttttacatttgccaaccctgtatgttgagattttccagaatcttacagtgacagccggtcctctaatagacagtaggactttgcacttagctaaaaatagctcacctttggaggtagaactccttttccaaaaaatatttagcgcccacagtgaagtatgctaagcatgggagaggcgagggtaggttgtctctgccctactagggcttgctctcttggcaggtgggataagaaaccatacaagtaaacagtggcttgtaagatcgcacccaacacagacaaatgcctggagtgtggagtatggagatagtttacagtggtgctggaggcaatgtgctagaccagcactaacttggctgatgagggaagtcttctacagaggtatcacctaggctggggtttgccttaggcagctgcccatatgagcttatataagaaggatgtgcaaggccccacgaaccacaaacataaaagccaggtcatgaacacattagcactggagaaaggaggagagcatcagggaaccaaacggtgactccaactcagtcatactgcatggagtccagctgtgtccagctgttttcctcctctagtcagggaatcagaatcatttgatgaatttgagttttctaaagccatgtaaagttaaggtgaagaaaatcccgatttcctcttggtctcggagttgtacccatgctccacacatttatgctgctcctccttcccttacctgccctttttgtcatcatggatctcacaggatcctttaggctcctgcgtgcgggccaataaatgaatacgcatacacttagaatgcgggtgcatgtgctcatgtctgtttgttaaatggaaaaaaaaggtattgtttaggtgttggttcacttgcttatgctgatagaaggtttgaaagacagaaaatgtctcgaaggctttgtaggcaagcttgtactttagggcagagagcatcaccggatcctggctgtgggctggctggcggtagtcccggtggcggctttgttattcattgctttgcctacttttaatcatcatctacccttgatagtcatgtgacacgtccacttactaaagaattattaaagacttcattaagctttttttttttttgtaatttttatttttgtgtgtctatgtgtaagtcagaggacacttggctggagtgcattttctgatttccccttgcaccgtctgagtcggggattgaactcaattgttgttgggcttgatgccaagtgcctttacccactgagccgtctcactggccctgcaactatttacaaagatttatttttattttttaattgtgtatatgtggatggatgcgtgtgaggatgcccacggaagtgttggattccctacagctggagttaaaggaagttgagagctgccctgttctgggaaatgaactctggtccaccacaagaacagtacaagttcgttaccatggatctttctctccattcccaattatagttattttaaagccatcatataaagtagggtgtactctgcattggtgtacactcatctatagtgaccctgtaatgtcacatttttatgtactgtatatagttttatatgaagtaattctttctatggaacttaagatctgtggcatcaggacaggatgcctttgggaagtgattcggtcatgaaggttctgctgtggtatgggtgagattggtactcagtgtgcttgatgtgacggaatacctgtttggttcattggctttggctcctttgtaccattagtcttcttgatattcatgtgacatgttactctccaaatgtacctcaaatatggaattatagctaaaatcgtattacaacttaagggaggaagagtttgttacgatcattggtgttaaggaatagagtttgtccttgtgggcaaggcatggtggcatatcatgttggaaggaatgtggtggtaggaactagcccttactgtgtgtcacatcttagtaaattaggaagcaaaatgtgtgggcaggaacaagaagcagatatcagtactaagacataggcccatgaaagaactcctcattggcaagattgacagagcttctataaccttctaaaacagagctatactttgaggacgacaagttcaagcacaggagcctacggggacatttcacatttataccataatggtcttcattataaaaagaagcctgttggtttagagttttcaaaatctacttcaataagggttcttacatgctttaacctcccttctagcctaccgccctgcagaggtagtagaaaagagaggttattagtccctgggggaagtggacctgcttagaactagttcttctggagatgccaatctttgatatcaaaatatcagcagttcagtctactagcaaaccagcaaacatgaatcagcagcttcattccagtccacttggcagacaccacacattagccgcagtccactcaacagacaccatgcataaattggcagtggcagctggatccagaataccatgagaggttcattggcaagttactgtctatgaagtcatgtcaagcaaagatcagcaatggggtataagactccgggacccagagcatcattatcagacactaacaagttggtgcaaggtgaaccaaagcacaagccttgttccaccagctgtggtcatatttatattctttctaagcatcacatatcctttcacgtgtctgcttcagcaaaacattatctcacctgtttctgcttcagtaaaacaccctttcacctctctgccccagcaaaacatcattatgacctaactgaatctccaaagaaaccataaatttccacttcagagacccatggggatggagtagtggctcactagttcagagcactggctcctcttctagaaaacttgcattagattgctagtacctacatggcagctcacaactgctgtaactccagttccaggggaatataaggttctgacctctatgtgtccaaagcacacacctatgcccatccacagcttcccccaccctacacagaaagaaagagacagagacaaagaaagaaagaaaaaaagaaagaaagaaaggaagagaaaggaaggaaggaagaaagatagctacattgatcgataaggtaaagcctgagagagaaaccttgtcttttttttttttttttagtacctagcaaagaaggtcctttgtgtccatgggcaactgggctctcagtaaactaaaatttccagcaattttattgtacacttttcagagtttgcttatcaaccatcttgaatatggtgttttgttgtgtggttcaaccttcaaccaaagcgtgtgtaatctgacagagttcacagtttcctacaaatacctgccaattcctcggagcccttgatcctatttttgagggtaagtatctgggaaataagtctcctttctactcagtagcaactaatgtttactgcgctgtagcagactcaggggtccttggctatttgtaaatcacccaaagcatcctttggaggtggctctaagctctttgtctttgcacttgagggaacccagcctgacttctgtgaggaaactttgccctcaccaccatatggattctagtttcaacactgttcttcaagctgagctttaattggtaggtggatgaagtatccaaaactactagcaggagagtccgtagtcaccaatccattaagcgttagagaagaagtttcttgttctgcccctggcttctttagtgaaccctgtggaccttatcccaggaagataatgtgatgtatagtagcactgtatgacttaaccttcaggttatgacattactatttctgaagcactctgaagatgaaatacttgtgatcacttaaattgaattttgtaccctactgccaagaagtacacaggctatctccatccttttgcagctctcttacatgcaggacagcgttctcccaaggtgagaggctgcattgctcatcctccctggtgctcagtagggacacttctgagtggttactgcttgactaggcaggattctgtaggccattgaactgtagatactatagactggagatgtgctgtcgaaacaggttttaaattcaaacttttaagaaattaagttgaatgtaatgagatttggcgatcaatgccaaagtcatttgaaaagcagttcttaacattttgctaggtattttaacttggaaattgatatcagtattcaggaatgttggggtaggggaggtaatttcctcactcttctcctgtcttttcattttgtcttaatatgtgtaccaggaagtccagagttgcctatcatgaatccaaacagcataatggctgactgtatcctgtcattgctctggtcgacaaatccctgcacaatagtttgtggcatgctctcagtgaacttcgggaaagtgtcttggaggtaggagaggataccagaaacccacaggacaaatacataaagaagtcaatgctttataagaattatgaaccaagaggatttctgagttcgaggccagcttggtctacaaagtgagttccaggacagccagggctatacagagaaaccctgtctcgaaaaacaaacaaacaaataaacaaacaaaaaagaattataaaccaaattggaaattgatcttcaatcttttaaagtttgttcatccagttcgagagagttaacaattgcttttcaaatttcccattaaggaacaccgactgtgtgtgtgatcagggtgttgtgacatcatacttgctttctccagaatgcaggaaccatcattcctgtctcccctgggagtgggcttgtgtccaattgcattcacgtctagaacctcagctccaaataaatacagctgaaaggtaggatacagatgggccatttgaggcaagaatgagcctagacactgttatagttcaaggcaggaagggaaagaaataccattgtctggtccaggacacacatatgtagaacttttaaatacactaaagaagcagagctgcttcctaagttacttgtgcccaaattatcttccctctccactccgcgtcctgaggtgatccatctctcgggcctgcatgactatggaccggacagtaaccagcctgaccagggccatgagtagtgctaggtgcttttctgcaccaggagctgcggaggtggttttcttttctccatgtcctctgttgtcaggagacttgagagtttagcaggtgacatcttcccctccattttcccctcctttccaatctcttctttcaggatgtgcatttcgagcagcaagacaaggtagattacatctgagtgtctacatttgaatcctgcctctgccactcatgacccaggaaggtatttcatttcctactcatctgtgttggtatgaagtattgataccagtaatacctatttcgttagtctgctgtgtaaagtgagttagcacatggcgaactcttaaaccacacttgctaatgtcttcagttagcattacgtgaagatgagaagtactcttgtcagttcttccctgagtgacagacgagtgagtatctcaccctcattatttttgctcatcattattctatagtagagtggtaagacataacagagctggttgccaacagaatcgttcctggttgaacttcctgagatgctacaggttggaggtagaaagatggaaaagtataatgagataaattcctttctcttggaacttaaactgttgtaggaaagccgactaatcaacaagagattgcagtagagtgtagagaatgttaggcatcatgaataaatcaagattcaagccaggaaaagaagaacagattagctaaatggaatgggcttggtcacaggagccatcacagaggagatggaacttgagagagagcccgtgaaaggtgtgtcaaaagacaaaattaacaatgaatttagttgttagatctgataggctttttatctctgagtcataactctgggcagcatccatcctacaaatagaatgccattgatcaataatagaacaatggcttttacaaagtatgaataagagaaaaataataactagtgattatcattatttaatccacgttgctgcatgtaacagttaagatagagggacttgcttataaagtcagctataattggcatggctgggaatttggccattatttctcctttagcatgaatgactgtacaattggcctaggacaggtgcttagaccaaaccaatttttatttgttttgtctgtgttgtgtgtgttcattaatcttaattcttaatgagtaagggcatagatagtggaatatttccttgactctattgctcctaacaagtcaattatgttgagataagaaagctgactgttggttatagcaggtacatggtcactggaaatctgcaaggtcaatgcagtgggtgggatgaatcagagccctaagaagagttgatcctgatgagatttttacaataaaatgaccagtgatgttgcttagggtaactagagagcacaaggcagtactctacctgtggtccccctctgttgctggtgtccacattgtccctcagggtgtgtgcacacactttctttttctagttcagtcagggtgtgtgtacactttcctctttttcaatttcagcttctattcttgtccttttcacttcccgttccacagagctctgctgttacctgccactcctgtgcaggcaaagatcccagcacagatgaaggtgcctttcctgcctcttccccaggcagggaggtccctggtgagcaagttcagtgttgactgtgggtggtcatggggagaacagcgtgaggaagagcttgaaagggcctttggctgagagatgggcagagctccaggggcgtgaagtcctacacatgcaccaggattattctgttggataaagtcactctagccaacgcagggagcttacaaaaaggagatcgaaaaggccatagctgaagtgatgagtgttctcagtgtgtggctggagtgaagggagacccaaggattgggcaggacacggtccagatgagactggaaatgttgatgaaggctctgtagagaaaggtttttttttttttttttttctttctgtatttaaatgatatgggcctctatgttattctggggatggtgaaagatgtgtttccttaccttcagtttttcatgcaaaatccaaattttgtttttaacatttctttttgtttaattctaatgttataagagtgttggagcatatctatatttctaatggtatactgtgaataaattatcacagtgatttttagaaatgtacaagcaaatcaccttttaggttcctagaactactgttacttttgtgtccatactttgtctgggatagagattgctgtcgtctgccactgaccagaacttagtgtgtgagaaggtttgctttacttgtcgtccatgttgacccctccagaagctgtagggcaatagtaaacccctggtcccttctaaacgcatctctgagaacacactttcttgtgtatcagtaggattcatggactctatagtcccccagccgtgaattccagatgagggaagtctacagagctgttttacagcatctttcaatggagacgtggatattttggtatttgagaataggtcttgaagcttgtcatgggagtttccaaagaccagctgttgaatgcatttatacatacttaatgaggatttttatgaatggctattaaaagatctgagggcagttatattcaggttcaaagaaaggatgtcctatgggaatttaatatttttgaactgttggcagaccacaaactggtatttactggcattcttgtgttcacgggtctaacataacagctgaaggttgcattgccatgcatttcctctcctcttaactctacttttgtgttcctttttaatgtgaagcatcaaatatttccacacacttgaaaaaaatggaactctttacgttttgtgcctgtaatgatgaatgtacatgcctgatagtttgtgtgggtgcacacggagctcagcatgtatggaggttaacggacagctttgtggagtcagttctgtttaaccttatgtgagcccccaaggattgaagtcaggccactaggtctgtgtggcaatccctacgcccacagaacatctccccagccctgcactcacgtttggaggcttgcttactgtctcactgtacaacacaagatacagttggtagaagaacgtgaccagatgcccagctctgtctcaggtgactctgaggttgttagttaggtgacttaactttcataagctcagcagcacagtaaccattaaatgaatgggccagctcactcgtggcagtttattgacaattttaacacttcttgaggagtagtggcactcttcaaaatttgttctagtgtgtgagcagcatttatgaaagctgtgctaacacgagcacatttagcacggtctgagagtcatgtcacctaaaaggacaagcagggctactataagcactctttgaagaagaatgatgtgtctatgaggtaagaattaaagaccttttaaaagaaaagaaaggttttgaatattctagccacttggatagcaagtcttaaataggagagagtctgaatgcctgataggcttttgcttcattttgtttgtctattacagtgattgatcaatcaactgtatcttgtatcatctatccagtatgcccagccttttgacgttgtgacatgaccctgtcatctacaaagttcatgactgagaactgcccagttgagttgcaaaacaacaataacaaactaaaatacaaacgaaactcaaaatcttatataacagtttaagaattttgtgttggtctacctttatagtttaatcttggctgcaggttagacatgttcatattcttgtggtgcaaattacttttagcccatatggggaaaggggtttgcctagcttttctgctttttctacagagtaataaaactaaatattaaaaatattatcccatagaggtgtcaaaagtgcatatgaaatataaatttctataaaatctcaaaattataaaaaattcttcatgacataattacgagtaggaaacaagttaagcacatccattcactattattatctttgacatacggtgattacaaaacgttagtagtgtgtagtgttaggctcattgttaaagtgtctgggtttgcagaggctctgctcagcttgcacaagtctgtccatgtgccttggggttgactgactacttaccaggtgacctattcaactgatccaaagcatgtccctttgggcagaacacacagtcaagggcagacaaggcactccacccaatagcaatttggcactgaaaagttacaaggcaaagggcatggacacaggaaggaatgagacctgggaccaaaagcagttcattgtacaagagccccttttcaattttatgttatagtcttggcggtttaacacaggcctcaaacatgttagacaagttctgtatcattgaactgtaccccagtctatcttgtaagactgacaaattttatacgtacagctgatttcatatcttaatatcatacttgcagtgttgcttttccttagctctttatcaggaattatctgatgatcagaaaaagttagcttcaagattactatatacatgatagataaggtaacaactgtatggcaccagagagtagacggggaacaccagaaaggacacagatgtgttagactccatcgattgtctcttgtgcagtagagttcatgaacattcttttctttctgctcttggctcttctctttccatctttattgtatgtaggactcaacgtggtcgcctcagtctcaattctgtcaagaattgagctctggggaaaaagaaaaaagaaaaaagaatttgagctcaaccctcacagttacctcattgtctgggtctaaattcatatccccaactccacatggactttttatttcccagtccactcttgagtagagcagagttttgtcttcatctttttctttttagtcactcattctatagtagaagacttttgactttatgttaccatgatgacaaaggcttacaagtttctgcctctagcctggacttctccctccaaccacagactcagcatacagtaaggtgcatatcttgtagacatctcaaacttataccttacctggacaacttgaattcctcttcataaacctgcatttatcagtcatgtcaatgttttgcttgtgtaagccttgggattcttggctaaatggtttttttgttagattggttctgtttgttttgttttgtttgtttgtgctgtgtggctcttgagtctttcccagtcagtctttattaatatcaaatacaaaatgattatagaaagagcaacgaagtccagtaataggaacatgctgtgccccaaattttgttcagccttcagccagctgtggtttaagaaaaaggacatctcagagtggctaagaggattacgactagttttggataattcaaacactaaaacgttgctaactggaatttaaaggggcataggcttattgtgatacttcttaaaggcaatttcaatgaatgtttacagaaaaaaaaagaagttagcaacttcttttcccatttattgctaaatcatttgtaatatgcatatattatagtgttaatatactgtgtatgtattataaaggaaaacagattggaaaacataatctaatgcagatgaaataaaatagttttagatttctgttctttaccatgttttgtgttctcatttcctggcatcttaaacaaaatggatacatattatcatcttatttatatttgtgttgttttttaaaagtatgttgaaattttccagtttgtactcaaaattccatctaacaactcggttttctttattctttttccttgtttgagtagccacagttctgcttctgtttctatgaatttgcttactttgtgtttaggcaggattttgctatgtggcccagaatggcttctaaattccccttgctgctccagcctcagcctcctgagtgctggacttgtggttgtcacagaatgcctagctaatttaggttccacgtgtgcctaagatcagaaaatatctgtggtttatgactgattaatttcacatagtaatcctgtggagcttatctatgttgtagcacataacaggatttcttcctcttcatgggcaaattgctttcattgtttattcatctgccagtcacaccatttaaacagtgtgactattgctgctgaggccatggtggttacacagatatcctttcaaagatatctctcactgcatcctgctttcaattatttgaacatttatccagaagtgggctttgcaggatcataatttttatttttaattttattttaaaagtagtcttcatagttcttccatagttgttttataatcccaataacagtgtacaaggattctaacgtctacacattaagccaaaccttgagatcttagctattgtctgtctgtctgtctgtctacctatctatctatagacaggctctcgcatagaaaataggatttttttgtttgtttgtttgttttggctttctttttcttttcttcctttttaactgtcaatgccagagctcacacagattgctttgcacatacaaggtagtgcaaaactgtatccctagtcccctccaccccttcacgtttcctaaacttggtccataagcaagcccactggctttagatacatagtctatctgtcacttgattgctttttatcctgcacatacatcactgctccacttcccccatccccgtcaactctttttggactgctaccctggtcttctagctgggactttctgtttgcacccttgcacagtgataaattgaacaaatagtctggcactctcctgtcctctatttaaaacccagttgacaaccatcactctgcagagaaggcctgacattttttccttggtttgcagcattcaaagcatcccaccccataagaacttgcttccttgtcacctgccttaagcatagtagataagattttttttcctgcttgcatctggtgtgccctcaatgtgaggggctgtgttcatggacattccttgactcacaccttcctacaattcaagtgctactgagtttaacctcttcagagtgttcccaacccccttctctgaaaagacaatgtctgtgaactgcttctagcttctctgctttctttggtgtaagtactttctcccttcaaagatatcagactgtttatatttgtgactttccttgctgtgttcccctgagcaaatgtaagccttacatatgcagaaattccatctcggtatctgaaagatggcctgctcagaaaatattcatgtgataagcgaataaaagaatatatgtgtgtgctcttacacctgaacagcgcttggcatagaggtagcgatcctgtgggcacatgtgcgattgtcagtagtgttagttttcagggagaacgcctttcactgggctccacttcttgctggactccacttcttggtgatttctgcagctcatgagttctagaccattgtcaagaactttgagcagaaaagtagagatgcctcatctaactgaaaacaactcagggattgatgacagctgtctgtctaggttcccttggccccagatcaccttacctaacttgaatcttggctgcttgttattacctgcaatcctgcttcctattgtcctgtgagagcagagcctcatttgtccacagattgcttgttggaagcgagcatcacagcacaaagccagaaattcctcctgcaggggatggttcattgacaagtctgtggattatacaatggaatttcctcttacctcccttttaatgacaccataatataaaactgtaaacaatgggcttttcttccccatttgtttgggatacttctgaaattctcccatctgctgttcagaactttggggggctgtgggattagaatcatgtatacttgcattgttttctcatggctttgttcactgatggagacatccatttagatatgagggcttttatggtgttgtgagaacagctcttctaccttacatggtcttccccactggggcaaaatgctgctgctgcctcagtcccagtgattgtgtcataggcctggagcatggtctctgcctgttctgcctcctctcggcatggagctatttcagtcttaccagtcctggtgtttaaaacagaactgcaggttgctagggccttgataggtaaccaggtgcctactgattgcaagagacccatggatgtttggacatcagagctggagggatactcctagggtaccagtgtcatttaacttggtctgggggctatttgtataaatgagtttcctttgaaaatcaatgctctctactttatgatgagtatacatgctacaaactcgttttgcctcagtaaacaaaaatctattccccctttaaaaatactgtatgattattgtgtgattattgtgtgtctgtgcatggtatttgagaatgtgtgtgatacagcacacatctagaagcgtgaacacaagcatacacgtctgtggagttggtcctttctttcctcctctgtgtggtttctcggcttgtcaggcttgcttgattacccactgaggtttctcaccactctcttcccccctctttctaggacaggagtcttaccgtgtagcccaggctatgcttgagcttacagacctcttggcttgtcctccaaaatgcttagatcagcatcatgcaccatctgattaaagacgttttcatgagaaaagaaaccaaccacagtccatacttacgaggtctcctgctgttgaagagaatcaaagctcatatgggctcagactactgttaagagttaaaggcagaatattataggaaggcaaattagatggcatcaaactcatcatttaaaggaggattgagagaagtcagctaaaatttaaatatgatttgtctgttcactaccttttcttggcctctacagtagaaagattgggatgatgaagccagaataagccagttacatttgagagctgtaatagtacaatacaatctcatcgcctgaaaggcatcctatccatgctccaggagtgtgttgcttgtcatctctccagacttcacgttagcatagacagcttagtgaatgtgtggataatagaaaccaagagtgggttttgactattgctgtactgtgttattagtgtattattgatatctttaagattgaatggtgggctgcagagatggctcagcaaggaagaagaagcgtgtttgctgctcttccagagtacccaagttcaattcccagatccataggtctatattgtggttcacttctggagatacagcttcctcttctgaactccatgggccccagcgacacacatggtccatataggttagaaaaatactcttacttatcctaaaatctaaaaatactcatacttaaatcttaaaaaacaaaacaaaacaaaacaaaacaacagccaggcagtggtggcacatgcctttaatcccagcacttgggaggcagaggcaggcggatttctgagttcgaggccagcctggtctacagagtgagttccagaacagccagggttatacagagaaaccctgtcttgaaaaaaacaaaacaaaacaaaacaagccaaaacaaacaaacagaaaaacaaacgaaaaaacccaaagcaattaaaagattgaacagtgactttgtattggagaagagtggtgttggtgtttctgtgtgtgtatcaagaatggtggagtggaaatgtctaaaacccctgctgctgctgctgctgctgctgctgctgctgctgctgcttcttctccttctccttctccttctccttctccttctccttctccttctccttctccttctccttctccttctccttctccttctccttcttcttcttcttcttctctctctctctctctctcttttcccccttttatttgatattttctttatttacatttcaagtgttacccctctccaggtctccactctgaaacctcctatcctttctccttccctctgcctctgtgaggatcctctcccacctacccacccactcccaccttcccgccctggcattcccctactctggggcatcaaatcctctcaaacccaagagctgctctcccaccgatgttcatcaagaccatcttctgccacataagtggccagagccctgggtacctccatgtgtattctttggttggtggtccagtccctgggagctctgaggggtctggcctcttgacactgttgctcgtgcccccccccccctcattgggactgcaaaccccttcagctccttcagtcccttctccaactcctccattggggaccccatgctcagtccaatggttggctgtaagcatctgcctctgcacttgtcaggctctgatagagactctcaggagacagctatatcaggctcctgtcagcaagcacttcctggcatctgcaatagtgtctgggtttggagactgtatatgggatggatccccaggtggggcagtctctggatggcctttccttcagtctctgctccacacttggtctccatatttcctcccgtgagtattttgtttctccctctaagaaggactgaagcatccacactttggtcttccttcttcttgagttttatgtggtctgtgaattatatcttgggtatccgagctattgtgttcttttgtgaccgggttacctcactcaggatgatattttctagttctatccacttgcctaagaatttcatgaagtcattgtttttaatagctgagtagtactccattgtagtactccgttgtgtaaatgtaccacattttctgtatccattcctctgttgaggatgtttctttttcaaaatggtgctggtcacagtctggggagatagcttataggcaaggtgcatgctgggcaagcatggagacttgagctcagctcctgagcaacgatgtataagcttgagctgttcatttatacctgtaactgcagtactgggccagcgaagggtaggaagagacagatctagggaccagctatggggctgaaatggtcatctcctggttcagtgaggaatggtctcagaaaatacggtgaatatgtatcacagtttcagctgaggaacatttttattgtttctatttcttatctactgtggattgtgaagagatgagcatggccgagcaagtacctgtgggggagaatgactagatctttggacatatgacaagaaatggtatagctggaacatatggtagattatatttttagatgatttatcattgctcaagctgattgaattcagaaaagggagcaaggtgggagcatggaaggggttgagggaggaaagggaaagtgatgtaattatatttgaattaaaaataaaaaaataaaatttatctccagggtataatagtagtaataataataataacaaaaacaacaacaataataattgaagaaaacatctcagtgtcacctctgacctcagcattctgctacatgggtgagcacacctgcacatatctgtgtatgcaacacacacagacaacacagagtgctggttgggtttatagtctagggtgttacagaatgttttaattgctcatattttgtcttgatataaataatattatactaggtagaggctagcatgtagaaactgaagttctttgctgaaatgcaaggaacaattgtatctacaaatagaggattggtggatgaacactgagacccttggcatcacccaggcaggactgagagtgactcgggggcaagtgagaaaaaaaaccctgctggtcataagtcaacagtgggattccagtccaagcagatgtgagtggatcatagataggtcatgcagaaaggatttctggggagaatccacaccagatagggaaaacacatacctgtcaggaagaacgggtggcattctgagagaaagcagataaatttctgagacagaagagggacctgaaaggagcaagtgcagaaggactcgtagggcaggtctggtaagaccggagcttgctgcccacccttcttcattgctccgctaatgtttttatctgaaggtgggttcagtacttaaatgaaaactgctcttggcggggatttttgtccattcgtaagatcaggaacaaaccttatagatgacttcttccacctgccatgtaggagaggcgtcttgctgaggggtgagcagaggctgctttgctttgtttggtgctttctttcttgagacagagttttgctatgtagcctaggtggtctcagtactaggattgtaggtgtgcgccaccatgctcacctttagaacttcttgatgggaaaatatttcagttaattcatatgttcatcaagtactgtttaagcatgtagctcctatgggcttagctctgggctcagccttgaaatgttgctgcagcaaggatcccttccctgtcagaaccacccttggctacctctcagagtctatacatcacaggggtttctactgcagtgagtgccgtttgcaagatgctagctaaatgtgacaaggtttgggttccataaatccctcctgtgtttttagtattactgaaatggggacttgaggacacagagagccattcagctgaactgtgtgagatgcaggctgctatctgcccttgagctctttcatgccatgtcatctgcactggtgttatttggatgatgtagactgttggtttgaaactttaccgtgcaaggctgtcttgttcacagtgtagattctgcagatctacggtgcgagttgaggtctcacatcttgagcaaactaccggtatcactgatgccagagagtgggccatccagcatagcgccgttatagatgcctaaatctgcaaggctgtctttggctcagtaaggagctctttggtggtagcttgattttcattagtttgggttatcttatttgaacttttctagcttatcatgaaaagatataatctaatacattatatacttatatctgtacattaagcaagattgcccacttgaatccagagcttgacagtttgcctagttcagacagaggacttattccaagcatcccctgtctgtgctccagagcactggattgaaggtggccacacccaccctgcatgtatgtgaacgctaggcatgtgcactctatccctcatgcttttctagcaagtgcttacccactgagcccctctgcagtcacactccagacttacagtagtaattaaaccattctgtgctggctcagagactcgaagggtggtaaccttcttatctgaagctcatacaataaccagtgacagcaaaattatacattttacaaacatcttgaaatattagcccttccgactcataatttgtttatggcatgtagaacgagaaaaattattattttcgcattgctctactccttgacaacccttgggccttttaaaggttgcaaagtacgtaggtgtgtttctttttacaaaaattatttgatatgggtttaaaaattttaattacgtaagagcttatagaaaacagctcttttaggtgattttttttcaaaaaagtttctaaagtgatttgattgttgttgttttcttttgagtgacagtattggggaattcagcaacgttggagcaaacagttcagattcaacctttttcagttaatatcctacctttctggtgcttagtaatatcacctgtctgtgaagtttctagatgaagttaactgtgataggaagaaccaccctaattgtgggtgaaactttcccaaggcagagacctcaaactatataaaaacaagaaagcagggactgaaggagctgaaggggtttgcaaccccataggaagaacagcaatatcaacaaccagactccccagagctcccagggactaaaccaccagagtacacatgaaaggatctatggctccagctgcatatgtagcagaggatggccttgttgggcatcaatgggaggagaagcccttggtcctgtgaaggctcgatgcccaagtgtaggggaatgtcagggcgaggaggcaggagcaccctcatagaagcaagaggagaggggatgggatagggggtttccagagaggaaaccgggataggggataacagttgaaatgtaaataagtaaaataaccaattaataaaaaaatcaagaaagcaaatttgagtgtcagcattcctccagcactgcatcttaaactgttaaagcaatataaccagattccccaaactgcatgctgtccttgacaggattggccccatgctctttaactataagcccaattacacccttttctgtttaatctgctctccttgggtacttttgtcacagctggaatgtaactgacacctcctgggcttacccgtggaagtccctcaaataacaagactgcaaattgtctctctagtccagattgccctgccagtgagaattggggagtttgagatctgctcagagctaggaaaggtagctctaagtacctgcagtctgggctgagcttctctagggtttgagtccttgttgctaatggagcctttcgtgccatgatcttcccttcgacatttgtgcatgaggtacaagcgttgagatgtccctgagacagttatggtgaaaggtagagttcctgtcctggttagtgtttggttgacttgacacaaatctagacatatacgggaagattgacatgacaaaatgcctccataagattggtctgtaggaaatcctgtattcacgtgtgatgtggagggcagtgccatcccttggcaggtggtcctggatagaatgaaaaagcatgctaaactagccatgaggataagccataagcagcggtcctctatgtcttctgcttcagttcctattccaggttcctgccttgagttcctgtcctgacttccctgatggtggattgcaaggctgtgagctgaaataaaccctttgctccccaagttgtttggtgttttatcccagcaacaagagaaaccctaagatgttcccaagaacaactgttacagataacgtatctcagaaggtttgctgtgttgaaggttttctgtctcttagattttatatgtaagactactcagtctttgtgtaaccttgtgctggaagacatttctgtgaactactgattttagcatattgtaacattatgtttagctccatgtagtcagtacagtgagtggctctatgaccactgctgtctgaactttcagactcaaatgcagtagctttgagagctttggaaggcatggtggggtcaaattgccatgggttagttcctggctgtgtgatactatgaaattccttaagttcttgcagtcttagattttgctaaaggatgtttgttttgataattaaatgagacaattactgtgaagtatttatatagctcataaaacattgccggaaataaattaaagtacaagtaggtacttttagcattgtaattattagttatataatgataataccttttaatgccaataactctttataaatagagctatagcttggtagccacagagaattaattctaggaccattagaggtagcaaaagcagccactgctcaaggctttatataaaatggcatagtatcttcatgtaaactaggcataatctcctatatactttaatcatctcgaatttatttgtaagacctaatatctcatcaatgctatacattagtgataaaatttagataacaataagcaaactagctttacatgttcattataagcacaactttctttcctcaaaggttgtttctgccagtgtttgatttatgcatatggaatccctggatacagagggctgactgcacttgttatttccattagcttaatgtgtgtatgtgtgggtgtgtgtgtatagtcatatcacatgtatcatatgtgttgtatagcaccaaagttaagaataatagaggaaggatcatatagattatgtaatgacccagaggtgactttacggaaaattactgggaggttctagggaggttatggacagctccagggagtgatcgccctcactgttacagctcgtgtctgtgatgccgctgccccataagtgtgttttccacaaccacccttgttctccttccctttgcctatggggtgagtttgggtggggcgctcatcacagaagcctctctcatcagacagcttgcagagactgagctaagcatgcacagacttggcagtcattggacagagctgcctttcactgagaagaattgagcagacgcacagaaaccaggactggtggccttgaaggtagatcctcctcactatgggagacgtcagcaaaaaggagtgaaggtttcctcttccagccagcaaaccccatttcctatgaacagcaagcattatgtcagctgccagagcagcttgaatttacctctcttccctggattacgtaacgcataggattcaactgtgaggaccctggggtgtaaagcagtctttttcagggtaaaaccactcagagtttcagaaaaggaaaataaccacctatatcaagtagacaaaatttccaagtaattctatggagaaactttggaaggggctcagcaaccatgacagcctggctaccttggagactgcctttgtggttgcagctagaggcaggttagccagaccagtgctaaaggcagcaactgcagtaaccagaggctccaaggtccagtcccaggaggaacccttgtatgggtgaagctcatccccggagaggatgcgtttgttattcctgagctgtgctgtctttaggattcatagctcctggcaccagggctctcggctcctagacaagcgtggtgtatgccgtttcttgtgttcagattgcttgccatgttctacataagtctcttttagaaagatgggagatgatagtggtaatctatattgggatcatctcaattcagtattaaataagtctgggacaacaagtaacgcccaccccattacaagctttatatgaagcaaacatctatttttgctttgtgcagactccactgtatgaagtgctaaaaataagccaatgctcagaaatcatttgcgatgcaaaaatgactgtggtggtggtggtggtggtggggggaaccatgttgttttctgtcctggatataagttaatcttacaggtcagaaatcgtgccctagaactgtatctgctaggtcattgcaaggctttgctgggttggagggacctacactgctccctgtggactagaaatgccatctcgtcaacagaagctgctatcagattctctttccgctattttttattatctaaaagaaatctacttgagtcttgggttttaaaggttttatttttgttattgttgttccccctttttgaaaagtaggataggagctagatgtttataagtagagcacaggttagagtcactgaacatcaggatcataggagcttttaaagggctctgttcatttcctaattctgacagtgtcccttaaacttatgctctatgccaggcctcaaaagatccaatcctggccttaatgcattgacaaatactgagctgtcaagtcagatcaagtgtgctccatgcagtcacacaactaaccttagataccaatctccgaacctagagattggacacctctttgcttttgtcaagtaccccttccatccccgtaatgagctttctgatgtagcaacgttggaacgcgccagagaagtagctgggtagtttacagcctgagggctgggtttccgctgagagtgagacacctcctacctccctcagtgtgtccagggtgagccagctgacccagttttgagtctatttaggagatagatggccactttctcctctcccaccagcctgtatatcttgctgcttctgccttcggtcagggtcaagatgcagatagccttgagcatcttcctacactgctgaggttggcaagattctttccagactcccgaaacataactaatgccggagaatgagtgagagagggcattgcacagaaaggaagtggataggccggactctgatcctggaaggcagacactgttaactaggtgacagactgttttctgagcacttaaccctttacaaacctctcttcccgactgatggtttgttaatggtttgttacagtttccagtgagccgctttgcttttagaaatctacatggctcaaggagaggaaaagcagggctaggtttttctggaaaaatctatggaatgtgctctcctcccatctgtctgggtgcttctgtcttctcttgtcatatgcccacactctggcttggtgacatttctaaaaacccacaggagacagtggcagaatctaagcttgaaccctgtattagagagttttgttttcctcccccacagccaacctttattataacaacagcaatcatcccctctgctatttattgtaaattttctcagcatataaaggactcttggcataagggaggaggaaaatatagtttaaagaaccgagttgtttcttctataaggagagttcctaaaacatgaactttggacttagtttggaaggaaaaaaagtgaaataaacacttagatgaaatcagccttgtaaatgtttttatttgaaagatggaaattgattgtgtaggttcatatgtaacacccgaggtcctatataagctgtagactaggtcctatttaagctgtagactatgagtctgtacttggggatttgaaaaaagcagttacttttgaattctagtgccagactctgcccgtttgcacagtttcacagggtctgtgcacagcagcgcacagtgtctgaaggttcccaggccaagcctgttccccggctggaaacagcgcaccccggcttctcctttggctccctccgtgttttcgcttttgtagctcttagcattttctcttcctgtccacaatccagacagtccaggctcgagttggggtgtgtgtccctgtcccttatccggctgctccgaggaagagcctccctggccttttgctttcatttgccttatatggtcagctgtggagttcgttattcctggaaagggccttttcactgtttcaagcactattgccctccaccatctcctgaggagaactagagcttgctggaagcttggggttcctggttctaatggggatcctaatggattctcactggttccagggcaggtgatgtttggacctcaggctaatgagatgtttaacaataggtgtatagttaagaataaacttccttttgaaaccagggactccagagtgttccggtgttttgtttgtttggtttctgttgttgtttgtttgtttggtttctgttgtttgtttgtttgtttttcctttcttccgagccccaagtgggctggtccttctcatttcccaggatcctgctgcctagattgcctttcccctcgttattctctctggctctgcttcttggagggctttatctaccacaggatagatgacattgatttcagtcagatccatgtcctcagttatcttctgaagtacggcttccggtgtcataaagaaacagtcatcttagtggttcccactcaggcggctgcccctccccttcctgctcctcttcctggtgggatctagcctcccgacctgggcaagccgagcagcagcactttaaaaataattagactgaacacaagagtgacaagaaggtgtggtttatctttcaggccatggttagtttgtgctttagcctaaaaaggaagtttgtagtgtgttgaatgcaagttagatgtttctggatgaaaggtggagctgaagatgagggtggagttaatggagtagtccttgctcctggctcagacaggaacatttctctaaaaaacttttatttatttttaaaaagggaagttgaatttggtaatggtttgaggcggctgcctagctaccctgagaccggtttttccctcccatctttcatggcctgcctctccatggtggtgaggattgggcaagctttgaagtcactttcgttttctagaacttgttggtgaagcctaccccccacaccccctacccccggtcacccctctttttttaaagcatgcctacatttctctcttccagctctgcctgtccaaaatgacttccctcttttcccaaatccccagcagttcactgtctggcaaaggagtgacatctggcagcttgctagggtagagggagagagatgtagaagggaagactgcgcgtgttcaataccacaattaccctgagctccatgctgtcaggatgtattacccacccacccaagccaggggaggcacactggagtgacccacctgcacgattgtgtgtgcatgcctgcgtgcctgcgtgcctgcttgcctgctct

SEQ ID NO: 128 - DNA, 9841 bp, Mus musculus
gctgaagcgtttcctcaagcctgccggggtgggaggagaggaggaggtggtggtggtggaggaggtggaggcagagggtggagagagagaaagcgcacgccgagaggaggtgtgggtgttccgctcccatcctaacggaacgagctccctcttcgcggacatgggattgcccagcggctgctaacccctctcctggtcctgatcccccaaaccggcgtggctccccggtcaccaaggagctgattacaagggaccaggatttgcatccttggctgggcgtccattggctacagagtgcctgacctgggtcaggctttccaacacggacatgtctgacaaaatgtcgagtttcctacatattggagacatttgttctctgtatgcggagggatctacgaatggatttatcagcaccttaggcttggttgatgaccgttgtgttgtacagccagaagccggggaccttaacaatccacccaagaaattcagagactgcctctttaagctatgtcctatgaatcgatactccgcacagaaacagttctggaaagctgctaagcccggggccaacagcactacagatgcagtgctgctcaacaaattgcatcatgctgcagacttggaaaagaagcagaatgagacagaaaacaggaaattgttggggaccgtcatccaatatggcaacgtgatccagctcctgcatttgaaaagcaataaatacctgactgtgaataagaggctcccagccttgctagagaagaatgccatgagggtgacgttggacgaggctggaaatgaagggtcctggttttacattcaaccattttacaagcttcgctccatcggagacagtgtggtcataggcgacaaggtagttttgaatcctgtcaatgctggccagcctctacatgccagcagtcatcagctggtggataacccaggctgcaatgaggtcaactccgtcaactgtaatacaagctggaagatagtgcttttcatgaaatggagtgataacaaagacgacattctcaaaggaggtgatgtggtgaggctcttccatgccgagcaagagaagtttctcacctgtgatgagcaccggaagaagcagcatgtgttcctgaggaccaccggcaggcagtcagccacgtcggccaccagttctaaagccctgtgggaagtggaggtagtccagcacgacccatgtcggggtggagctgggtactggaatagcctcttccggttcaagcacctggctacagggcattacttggctgcagaggtagaccctgactttgaggaagaatgcctggagtttcagccctcagtggaccctgatcaggatgcatctcggagtaggttgagaaacgcgcaagaaaaaatggtatactctctggtctccgtgcctgaaggcaacgacatctcctccatctttgagctagaccccacgactctgcgtggaggtgacagccttgtcccaaggaactcctatgtccgtctcagacacctgtgcaccaacacctgggtacacagcacaaacatccccatcgacaaggaagaggagaagcctgtgatgctgaaaattggtacctctcccctgaaggaggacaaggaagcatttgccatagttcctgtttcccctgctgaggttcgggacctggactttgccaatgatgccagcaaggtgctgggctccatcgctgggaagttggaaaagggcaccatcacccagaatgagagaaggtctgtcacgaagcttttggaagacttggtttactttgtcacgggtggaactaactctggccaagacgtgcttgaagttgtcttctctaagcccaatcgagagcggcagaagctgatgagggaacagaatattctcaagcagatcttcaagctgttgcaggcccccttcacggactgcggggatggcccgatgcttcggctggaggagctgggggatcagcgccatgctcctttcagacatatttgccgactctgctacagggtcctgcgacactcacagcaagactacaggaagaaccaggagtacatagccaagcagtttggcttcatgcagaagcagattggctatgacgtgctggccgaagacaccatcactgccctgctccacaacaaccggaaactcctggagaagcacatcaccgcggcagagattgacacgtttgtcagcctggtgcgaaagaacagggagcccaggttcttggattacctctctgacctctgcgtatccatgaacaagtcaatccctgtgacacaggagctcatctgtaaagctgtgctcaatcccaccaatgctgacatcctgattgagaccaagctggttctttctcgttttgagtttgaaggcgtttccactggagagaatgctctggaagccggggaggatgaggaagaggtgtggctgttctggagggacagcaacaaagagatccgtagtaagagtgtccgggaattggcgcaagatgctaaagagggacagaaggaagacagggacatcctcagctactacagatatcagctgaacctctttgcaaggatgtgtctggaccgccagtacctggccatcaatgaaatctccgggcagctggatgttgatctcattctccgctgcatgtctgacgagaacctcccctacgacctcagggcatccttttgccgcctcatgcttcacatgcatgtggaccgagatccccaagagcaggtgacacctgtgaaatatgcccgactgtggtcagaaattccctctgagatcgccattgatgactatgacagcagtggaacatccaaagatgaaattaaggagaggtttgcacagacgatggagtttgtggaggagtacctaagagatgtggtttgtcaaagattccccttctctgataaggagaaaaataagctcacgtttgaggttgtgaacttagccaggaatctcatatactttggtttctacaacttttctgaccttctccgattaaccaagatcctcttggcaatcttagactgtgtccatgtgaccactatcttccccattagcaagatgacaaaaggagaagagaataaaggcagtaacgtgatgaggtctatccatggcgttggggagctgatgacccaggtggtgctgcggggaggaggcttcttgcccatgactcccatggctgcggcccctgaaggaaatgtgaagcaggcagagccagagaaagaggacatcatggtcatggacaccaagttgaagatcattgaaatactccagtttattttgaatgtgagattggattataggatctcctgcctcctgtgtatatttaagcgagagtttgatgaaagcaattcccagtcatcagaaacatcctccggaaacagcagccaggaagggccaagtaatgtgccaggtgctcttgactttgaacacattgaagaacaagcggaaggcatctttggaggaagtgaggagaacacacctttggacctggatgaccatggtggcagaaccttcctcagggtcctgctccacttgacaatgcatgactacccacccctggtgtctggggccctgcagctcctctttcggcacttcagccagaggcaggaggtccttcaggccttcaaacaggttcaactgctggttactagccaagatgtggacaactacaaacagatcaagcaagacttggaccaactaaggtccattgtggagaagtctgagctctgggtgtacaaaggccaaggtcccgatgagcctatggacggagcctccggtgaaaatgagcataagaaaaccgaggaggggacgagcaagccactgaagcacgagagcaccagcagctacaactaccgagtggtgaaagagattttgattcgacttagcaagctctgcgtgcaggagagcgcgtcggtgaggaagagccggaagcagcagcaacgactgctgaggaacatgggcgcacacgctgtggtgctggagctgctgcagatcccctacgagaaggccgaagacacaaagatgcaagagatcatgcggctggctcatgaatttttgcagaatttctgtgcaggcaaccagcagaatcaagctttgctgcataaacacataaacctgtttctcaagccagggatcctggaggcagtgacgatgcagcacatcttcatgaacaacttccagctgtgcagtgagatcaacgagagagtggtccagcactttgttcactgcatagagacccacggtcgaaacgtccagtatatcaagtttctccagacgattgtcaaggcagaagggaaattcattaaaaagtgccaagacatggtcatggctgagcttgtcaactctggagaggacgtcctcgtgttctacaatgacagagcctctttccagactctgatccagatgatgcggtccgagcgtgaccggatggatgagaacagccctctcatgtaccacatccatctggtggagctcttggccgtgtgcacagagggcaagaatgtgtacacggagatcaagtgcaactccttgctcccgctcgatgacatcgttcgtgtggtcactcatgaagactgcatccccgaggttaagatcgcttacattaacttcctgaatcactgctatgtggatacggaggtggagatgaaggagatttacacaagcaaccacatgtggaagttgtttgagaatttcctcgtggacatctgcagggcctgtaacaacacaagcgacaggaagcacgcagactccattctggagaagtacgtcactgaaatcgtgatgagcatcgtcaccaccttcttcagctctcccttctcagaccagagcaccactctgcagacccgccagcctgtctttgtgcaactcctgcaaggcgtgttccgagtttaccactgcaactggctgatgccgagccaaaaagcctcggtggagagctgcatccgggtgctctctgacgtagccaagagccgggccatagccattcctgttgacctggacagccaagtcaacaacctcttcctgaagtcccacaacattgtgcagaaaacagccctgaactggcggttatcagcccgaaacgccgctcgcagagactctgtactggcagcatccagagactaccgaaatatcattgagaggttacaggacatcgtgtctgccctagaggaccggctcaggcccctggtgcaggctgagctgtctgtgctcgtggatgttctacacagaccagaactgctcttccccgagaacacggatgccaggaggaaatgtgagagtggaggtttcatctgcaagctaataaaacataccaagcaactgctggaggagaatgaagagaaactatgcattaaagtcttacagaccctcagggaaatgatgaccaaagacagaggctatggagagaagcaaatttccattgatgaatcggaaaatgccgagctgccacaggcaccggaagctgagaactccacagagcaggagcttgaaccaagtccacccctgaggcaactggaagaccataaaaggggtgaggcactccgacaaattttggtcaaccgttactatggaaacatcagaccttcaggaagaagagagagccttaccagctttggcaatggcccactatcaccaggaggacccagcaagcctggtggaggagggggaggtcctggatctagttccacaagcaggggtgagatgagcctggctgaggttcagtgtcacctcgacaaggagggggcctccaacctggtcatcgatctcataatgaatgcatccagtgaccgagtattccatgaaagcattctgctggccatcgcacttctggaaggaggcaacaccaccatccagcactcgtttttctgccggctgacagaagataagaaatcagagaagttcttcaaggttttttacgatcgaatgaaggtggcccagcaggaaatcaaggcgacagtgacagtgaacaccagcgacttgggaaacaaaaagaaagatgatgaagtggacagggatgccccgtctcggaagaaagccaaagagcccacaacacagataacagaagaggtccgggatcagctcctggaagcatctgctgccaccaggaaagcctttaccaccttccggagggaggccgaccctgatgaccattaccagtctggggagggcacccaggctacaaccgacaaagccaaggatgacctagagatgagcgctgtcatcaccatcatgcagcctatcctgcgcttcctgcagctgctgtgtgaaaaccacaaccgagatctgcagaatttccttcgttgccaaaataataagaccaactacaatttggtgtgtgagacactgcagtttctggactgtatttgtgggagcacaaccggaggccttggtcttcttggactgtacataaatgaaaagaatgtagcacttatcaaccaaaccctggagagtctgacggagtactgtcaagggccttgccatgagaaccagaactgcatcgccacccacgagtccaatggcatcgatatcatcacagccctcatcctcaatgatatcaaccctctgggaaagaagcggatggacctggtgttagaactgaagaacaatgcttcgaagctgctactggccatcatggaaagcagacacgatagtgaaaatgcagagaggatcctgtacaacatgaggcccaaggagctggtggaagtgatcaagaaggcctacatgcaaggtgaagtggaatttgaggatggggagaacggtgaggatggagctgcctcacccaggaacgtgggccacaacatctacatcctcgctcaccagttggctcggcataacaaagaacttcaaaccatgctgaaacctggaggccaggtggatggggatgaagctctggagttctacgcgaagcacacagcacaaattgagattgtcagactggaccggacaatggaacagatcgtcttccctgtgcccagcatctgtgaattcctgactaaggaatcgaaacttcgaatatattacaccacagagcgggatgagcaaggtagcaagatcaatgacttcttcctgcgctccgaggacctctttaacgagatgaactggcagaagaaacttcgagcccagcctgtcttgtactggtgtgcccgaaacatgtctttctggagcagcatctccttcaacctggccgtcctgatgaacctgctggtggcgtttttctatccatttaaaggagtgaggggaggaacactagagccacactggtcaggcctcctgtggacagccatgctcatctctctggccattgtcattgctctgcccaagccccacggcatccgggccttaattgcttctacaatcctacgactgatattttcagttgggttgcagcccacactgtttctgctgggagctttcaatgtctgcaataaaatcatcttcctgatgagctttgtgggcaactgtgggaccttcaccagaggctaccgggccatggttctggatgtggagttcctctatcatttgctgtatctactcatctgtgccatgggcctcttcgtacatgagttcttctatagcttgctgctttttgatttagtgtacagagaggagactttgcttaatgtcattaaaagtgtcacccgcaatggacggtccatcatcttgacagcggtcctggctctgatcctggtttacctgttctcaattgtgggctatctgttcttcaaggatgactttatcttggaagtagataggttgcccaatgaaacagctgttccagaaactggcgagagtttggccaacgatttcctgtactctgatgtgtgcagggtagagacgggggagaactgcacctctcctgcacccaaagaagagctgctccctgccgaagaaacggaacaggataaggaacacacgtgtgagaccctgctcatgtgcatcgtcactgttctgagtcacgggctgcggagtgggggaggggtaggagacgtgctcaggaagccatccaaagaggagcctctgtttgctgcaagggtgatctacgacctcctcttcttcttcatggtcatcatcatcgtcctgaacctgattttcggggtcatcatcgacacctttgctgacctgaggagtgagaagcaaaagaaggaggagatcttaaaaaccacgtgcttcatctgcggcttggaaagggacaagtttgacaataagactgtcacctttgaagagcacatcaaggaagaacacaacatgtggcactatctgtgcttcatcgtgctggtgaaagtgaaggactccacagagtacaccgggcctgagagttacgtggcagagatgatcagggaaagaaaccttgattggttcctcagaatgagagccatgtccctggtcagcagcgattctgaaggggaacagaacgagctgaggaacctgcaggagaagctggagtctaccatgaagctggtcaccaatctttctggccagctgtcagaactaaaggaccagatgacagaacagaggaagcagaaacaaagaatcggccttctaggacatcctcctcacatgaatgtcaacccacagcagccggcctaggcaaatgaggcagagggactctgctcagccctctgtatatcactgtcagggtgggtacggctcattggttctgatttgcccactaagggtacatgtgcgcttagtacatttgtaaatactcagttttgtattgtatgtatatgattgctattctcagaggtttggactttcgtattgtaattagctctgttggcatggtgacttgtcactcctgccaaaaatattaaaaatgccttttttggaaggactacagaaagtacctgatttgcacttgaaccagattatagatttaaaagtatatgacatgtattttgtatttaaaactagaatagccagtatttatgttttttataaaactgtgcaatacaaattatgcaatcaccataactttgtaactcctgagtgtcctaagggagtacacatctttgaagctgatttgttgatactcgtgtaataaatggttaaatatcaaatgctgctgctgctgccaaaattatattaatagcgagtttctggcccctgggcaattttgtaccttgtaattatcctatggtgatgctgtttctcgttgctaatggcattagtgcccctgtatcctagtgataactccaggtctgtgaaccattcaaacagcattcattttgagaaaagcaactttagtttcaaggataattttaagcttcaaaattaatcatttaaagtgtttctttaagagagccatgttagaggctcacactttagcttgaaaggagttgatgaattaattttttaaagggaactttttacatgacgtttggaataacagcatattgctgaccagtcagtgtcatctcccgggtgaattttgatgtcacgttatagtcaaatgagttagctgatggtttctagattttcttcctctgaaccatgatgcagtaggtaagaagttattatgcgtatatacatatatacattcatatacgacaaagtaggagctgtccccttaggatgcatagctgcccctagggtacgtagctgaacactgacaatggcgttcttctgaaagagccacgtttgggttttatttctttgtcacatgatttcttttctggatgggtgcaaagtatcacaggaagtgttttctctctgtcgccttgttttgtacctgggtctcgctttactagaccgtctctgcacaaaagtttaaaaactgaaccgtatgcagagttccgaagcaagtcaagtttgtaaatgcatacctaaaaatatttaataaacgatgca

SEQ ID NO: 129 - DNA, 8250 bp, Mus musculus
atgtctgacaaaatgtcgagtttcctacatattggagacatttgttctctgtatgcggagggatctacgaatggatttatcagcaccttaggcttggttgatgaccgttgtgttgtacagccagaagccggggaccttaacaatccacccaagaaattcagagactgcctctttaagctatgtcctatgaatcgatactccgcacagaaacagttctggaaagctgctaagcccggggccaacagcactacagatgcagtgctgctcaacaaattgcatcatgctgcagacttggaaaagaagcagaatgagacagaaaacaggaaattgttggggaccgtcatccaatatggcaacgtgatccagctcctgcatttgaaaagcaataaatacctgactgtgaataagaggctcccagccttgctagagaagaatgccatgagggtgacgttggacgaggctggaaatgaagggtcctggttttacattcaaccattttacaagcttcgctccatcggagacagtgtggtcataggcgacaaggtagttttgaatcctgtcaatgctggccagcctctacatgccagcagtcatcagctggtggataacccaggctgcaatgaggtcaactccgtcaactgtaatacaagctggaagatagtgcttttcatgaaatggagtgataacaaagacgacattctcaaaggaggtgatgtggtgaggctcttccatgccgagcaagagaagtttctcacctgtgatgagcaccggaagaagcagcatgtgttcctgaggaccaccggcaggcagtcagccacgtcggccaccagttctaaagccctgtgggaagtggaggtagtccagcacgacccatgtcggggtggagctgggtactggaatagcctcttccggttcaagcacctggctacagggcattacttggctgcagaggtagaccctgactttgaggaagaatgcctggagtttcagccctcagtggaccctgatcaggatgcatctcggagtaggttgagaaacgcgcaagaaaaaatggtatactctctggtctccgtgcctgaaggcaacgacatctcctccatctttgagctagaccccacgactctgcgtggaggtgacagccttgtcccaaggaactcctatgtccgtctcagacacctgtgcaccaacacctgggtacacagcacaaacatccccatcgacaaggaagaggagaagcctgtgatgctgaaaattggtacctctcccctgaaggaggacaaggaagcatttgccatagttcctgtttcccctgctgaggttcgggacctggactttgccaatgatgccagcaaggtgctgggctccatcgctgggaagttggaaaagggcaccatcacccagaatgagagaaggtctgtcacgaagcttttggaagacttggtttactttgtcacgggtggaactaactctggccaagacgtgcttgaagttgtcttctctaagcccaatcgagagcggcagaagctgatgagggaacagaatattctcaagcagatcttcaagctgttgcaggcccccttcacggactgcggggatggcccgatgcttcggctggaggagctgggggatcagcgccatgctcctttcagacatatttgccgactctgctacagggtcctgcgacactcacagcaagactacaggaagaaccaggagtacatagccaagcagtttggcttcatgcagaagcagattggctatgacgtgctggccgaagacaccatcactgccctgctccacaacaaccggaaactcctggagaagcacatcaccgcggcagagattgacacgtttgtcagcctggtgcgaaagaacagggagcccaggttcttggattacctctctgacctctgcgtatccatgaacaagtcaatccctgtgacacaggagctcatctgtaaagctgtgctcaatcccaccaatgctgacatcctgattgagaccaagctggttctttctcgttttgagtttgaaggcgtttccactggagagaatgctctggaagccggggaggatgaggaagaggtgtggctgttctggagggacagcaacaaagagatccgtagtaagagtgtccgggaattggcgcaagatgctaaagagggacagaaggaagacagggacatcctcagctactacagatatcagctgaacctctttgcaaggatgtgtctggaccgccagtacctggccatcaatgaaatctccgggcagctggatgttgatctcattctccgctgcatgtctgacgagaacctcccctacgacctcagggcatccttttgccgcctcatgcttcacatgcatgtggaccgagatccccaagagcaggtgacacctgtgaaatatgcccgactgtggtcagaaattccctctgagatcgccattgatgactatgacagcagtggaacatccaaagatgaaattaaggagaggtttgcacagacgatggagtttgtggaggagtacctaagagatgtggtttgtcaaagattccccttctctgataaggagaaaaataagctcacgtttgaggttgtgaacttagccaggaatctcatatactttggtttctacaacttttctgaccttctccgattaaccaagatcctcttggcaatcttagactgtgtccatgtgaccactatcttccccattagcaagatgacaaaaggagaagagaataaaggcagtaacgtgatgaggtctatccatggcgttggggagctgatgacccaggtggtgctgcggggaggaggcttcttgcccatgactcccatggctgcggcccctgaaggaaatgtgaagcaggcagagccagagaaagaggacatcatggtcatggacaccaagttgaagatcattgaaatactccagtttattttgaatgtgagattggattataggatctcctgcctcctgtgtatatttaagcgagagtttgatgaaagcaattcccagtcatcagaaacatcctccggaaacagcagccaggaagggccaagtaatgtgccaggtgctcttgactttgaacacattgaagaacaagcggaaggcatctttggaggaagtgaggagaacacacctttggacctggatgaccatggtggcagaaccttcctcagggtcctgctccacttgacaatgcatgactacccacccctggtgtctggggccctgcagctcctctttcggcacttcagccagaggcaggaggtccttcaggccttcaaacaggttcaactgctggttactagccaagatgtggacaactacaaacagatcaagcaagacttggaccaactaaggtccattgtggagaagtctgagctctgggtgtacaaaggccaaggtcccgatgagcctatggacggagcctccggtgaaaatgagcataagaaaaccgaggaggggacgagcaagccactgaagcacgagagcaccagcagctacaactaccgagtggtgaaagagattttgattcgacttagcaagctctgcgtgcaggagagcgcgtcggtgaggaagagccggaagcagcagcaacgactgctgaggaacatgggcgcacacgctgtggtgctggagctgctgcagatcccctacgagaaggccgaagacacaaagatgcaagagatcatgcggctggctcatgaatttttgcagaatttctgtgcaggcaaccagcagaatcaagctttgctgcataaacacataaacctgtttctcaagccagggatcctggaggcagtgacgatgcagcacatcttcatgaacaacttccagctgtgcagtgagatcaacgagagagtggtccagcactttgttcactgcatagagacccacggtcgaaacgtccagtatatcaagtttctccagacgattgtcaaggcagaagggaaattcattaaaaagtgccaagacatggtcatggctgagcttgtcaactctggagaggacgtcctcgtgttctacaatgacagagcctctttccagactctgatccagatgatgcggtccgagcgtgaccggatggatgagaacagccctctcatgtaccacatccatctggtggagctcttggccgtgtgcacagagggcaagaatgtgtacacggagatcaagtgcaactccttgctcccgctcgatgacatcgttcgtgtggtcactcatgaagactgcatccccgaggttaagatcgcttacattaacttcctgaatcactgctatgtggatacggaggtggagatgaaggagatttacacaagcaaccacatgtggaagttgtttgagaatttcctcgtggacatctgcagggcctgtaacaacacaagcgacaggaagcacgcagactccattctggagaagtacgtcactgaaatcgtgatgagcatcgtcaccaccttcttcagctctcccttctcagaccagagcaccactctgcagacccgccagcctgtctttgtgcaactcctgcaaggcgtgttccgagtttaccactgcaactggctgatgccgagccaaaaagcctcggtggagagctgcatccgggtgctctctgacgtagccaagagccgggccatagccattcctgttgacctggacagccaagtcaacaacctcttcctgaagtcccacaacattgtgcagaaaacagccctgaactggcggttatcagcccgaaacgccgctcgcagagactctgtactggcagcatccagagactaccgaaatatcattgagaggttacaggacatcgtgtctgccctagaggaccggctcaggcccctggtgcaggctgagctgtctgtgctcgtggatgttctacacagaccagaactgctcttccccgagaacacggatgccaggaggaaatgtgagagtggaggtttcatctgcaagctaataaaacataccaagcaactgctggaggagaatgaagagaaactatgcattaaagtcttacagaccctcagggaaatgatgaccaaagacagaggctatggagagaagcaaatttccattgatgaatcggaaaatgccgagctgccacaggcaccggaagctgagaactccacagagcaggagcttgaaccaagtccacccctgaggcaactggaagaccataaaaggggtgaggcactccgacaaattttggtcaaccgttactatggaaacatcagaccttcaggaagaagagagagccttaccagctttggcaatggcccactatcaccaggaggacccagcaagcctggtggaggagggggaggtcctggatctagttccacaagcaggggtgagatgagcctggctgaggttcagtgtcacctcgacaaggagggggcctccaacctggtcatcgatctcataatgaatgcatccagtgaccgagtattccatgaaagcattctgctggccatcgcacttctggaaggaggcaacaccaccatccagcactcgtttttctgccggctgacagaagataagaaatcagagaagttcttcaaggttttttacgatcgaatgaaggtggcccagcaggaaatcaaggcgacagtgacagtgaacaccagcgacttgggaaacaaaaagaaagatgatgaagtggacagggatgccccgtctcggaagaaagccaaagagcccacaacacagataacagaagaggtccgggatcagctcctggaagcatctgctgccaccaggaaagcctttaccaccttccggagggaggccgaccctgatgaccattaccagtctggggagggcacccaggctacaaccgacaaagccaaggatgacctagagatgagcgctgtcatcaccatcatgcagcctatcctgcgcttcctgcagctgctgtgtgaaaaccacaaccgagatctgcagaatttccttcgttgccaaaataataagaccaactacaatttggtgtgtgagacactgcagtttctggactgtatttgtgggagcacaaccggaggccttggtcttcttggactgtacataaatgaaaagaatgtagcacttatcaaccaaaccctggagagtctgacggagtactgtcaagggccttgccatgagaaccagaactgcatcgccacccacgagtccaatggcatcgatatcatcacagccctcatcctcaatgatatcaaccctctgggaaagaagcggatggacctggtgttagaactgaagaacaatgcttcgaagctgctactggccatcatggaaagcagacacgatagtgaaaatgcagagaggatcctgtacaacatgaggcccaaggagctggtggaagtgatcaagaaggcctacatgcaaggtgaagtggaatttgaggatggggagaacggtgaggatggagctgcctcacccaggaacgtgggccacaacatctacatcctcgctcaccagttggctcggcataacaaagaacttcaaaccatgctgaaacctggaggccaggtggatggggatgaagctctggagttctacgcgaagcacacagcacaaattgagattgtcagactggaccggacaatggaacagatcgtcttccctgtgcccagcatctgtgaattcctgactaaggaatcgaaacttcgaatatattacaccacagagcgggatgagcaaggtagcaagatcaatgacttcttcctgcgctccgaggacctctttaacgagatgaactggcagaagaaacttcgagcccagcctgtcttgtactggtgtgcccgaaacatgtctttctggagcagcatctccttcaacctggccgtcctgatgaacctgctggtggcgtttttctatccatttaaaggagtgaggggaggaacactagagccacactggtcaggcctcctgtggacagccatgctcatctctctggccattgtcattgctctgcccaagccccacggcatccgggccttaattgcttctacaatcctacgactgatattttcagttgggttgcagcccacactgtttctgctgggagctttcaatgtctgcaataaaatcatcttcctgatgagctttgtgggcaactgtgggaccttcaccagaggctaccgggccatggttctggatgtggagttcctctatcatttgctgtatctactcatctgtgccatgggcctcttcgtacatgagttcttctatagcttgctgctttttgatttagtgtacagagaggagactttgcttaatgtcattaaaagtgtcacccgcaatggacggtccatcatcttgacagcggtcctggctctgatcctggtttacctgttctcaattgtgggctatctgttcttcaaggatgactttatcttggaagtagataggttgcccaatgaaacagctgttccagaaactggcgagagtttggccaacgatttcctgtactctgatgtgtgcagggtagagacgggggagaactgcacctctcctgcacccaaagaagagctgctccctgccgaagaaacggaacaggataaggaacacacgtgtgagaccctgctcatgtgcatcgtcactgttctgagtcacgggctgcggagtgggggaggggtaggagacgtgctcaggaagccatccaaagaggagcctctgtttgctgcaagggtgatctacgacctcctcttcttcttcatggtcatcatcatcgtcctgaacctgattttcggggtcatcatcgacacctttgctgacctgaggagtgagaagcaaaagaaggaggagatcttaaaaaccacgtgcttcatctgcggcttggaaagggacaagtttgacaataagactgtcacctttgaagagcacatcaaggaagaacacaacatgtggcactatctgtgcttcatcgtgctggtgaaagtgaaggactccacagagtacaccgggcctgagagttacgtggcagagatgatcagggaaagaaaccttgattggttcctcagaatgagagccatgtccctggtcagcagcgattctgaaggggaacagaacgagctgaggaacctgcaggagaagctggagtctaccatgaagctggtcaccaatctttctggccagctgtcagaactaaaggaccagatgacagaacagaggaagcagaaacaaagaatcggccttctaggacatcctcctcacatgaatgtcaacccacagcagccggcctag

SEQ ID NO: 130 - DNA, 96596 bp, Homo sapiens
gtcagaatgtacacattcttcctttaaaaaaaaaagtgaagacaacaaacataatacaaagattttctatttttttaggttggtgcaaaagtaattgtgtttttgccattgaaagtaatggtgaaatctgcaattatttttgtaccaatctaataatagcaacttctcaccctacttctctaaccaagtgaagatttccaaaaccagatggacttaaactttttttttttttttttttttttttgagatggactctcactctgtcgcccaggctagagtacagtggcgctatctcggctcactacaacctctgcttcccaggctcaagtgattctcctgcctcagcctcccgaatggctgggattacaggcgcctgacaccatgcccgggtagtttttgtattttcagtggagatggggtttcatcatgttggccaggctagtctcaaactcctgacctcaagtagtcgacctaccttggcttcccaaagtgctgggattacaggcaggagccactgtaccaggcccattttgctttttctgaaggccaaatgagtgttcaataatacagaagttaaaaatgattaacaaatcccacccccccttgtttttttggaacaaaatcttgttcttctgaccagactagtgcagtggcataatcatggctcactgcagcctcaacctcccgagtagatggttctacaggtttgtgccaccacactgggctaatgtttttattttttattttgtagagagagagtctcactatgttgcctaggttggtcttgaattcctgggctcaagctcatcttggtctcccaaagtgccgggacagtatccttttttggaaagaccaaatctatttacatattaccacatggaaattttttcattacgccttataacaatgtttcctcattcaggctcaaaagagtatattcagaaatttagaaagaaaagccttgatttgcctatgagtgagattcttttggaaacaacaatctttttcttttaaatatctttatttatttatttatttatagagatgaaatctcgctctgtcgcccaggctggaatgcaatggtgtgatcttgtcttactacaacctccgcctcctgggtcaaagcaattctcctgtctcagcctcccgagtagctgtgattacaggtgcctgccacgacaacctactaattttttatatttttagcagagatggggttttgccatgttgaccaggctggtcttgcgctcttgacttcaggtgatctgcccacctcggcctcccgaagtgcagggattacaggcatgagccaccacccttatttatttttgattataagagtgctatttgctgtttcttttttttttttctaataaacactgatctttatagaatctttatagaatttgctttaagatagccaatccctctcctccccatccctctcttccccttccctcccctttccttttatttggatagaccctcactctgttccccaggctggagtgcagtggcatgatctcggctctctgcaacctctgcctcctaagttcaagtgattctcctgcttcagcctcctgggtgtgcaccaccacacccagctaaattttttaaatgtatttttagtagagacggggtttcgccatgttggccaggctggtctcaaattcctgacctcaagtgatctgcccacctcggcctcccaaagtgctgggattacaggcatgagccacggtctttttctgtttcttaaggtatttcaggtattgagtaagacttagactacttttaaaatcgatgcactttctgttgcctcctcctcctcctccccctcttccttctaagaggtaacacagttaaaaaaaattgaaataaaagggcttgtttggaggacagttgagcagagaaactactcagaagaaggtatttccctcattgactcgctatgttatattcaacataaatgtttcaatgacaaagaatcatcttgataatatggcctataatggagaaatattccagtgtgaatggacaggtgcctggatggtggtgaagaaaccaaggaagatcagaggaccacagcaccagccgtttcctaggtcacaactgctaggtctgcaaactcttacttgaaagaagaaacaaggagggaaatggcatgagagatcagctgatgacaataacctctgataaaaaagcagccagtcttcttatgtgtcatcctctaagcaccatgtatgaaattcctctgtaagaaaggtagtgatcaagaaaaaggcagatagtaaaagttctatgcattccgttcagtctttttagtgcctagtgtagcacctgctagggtaggtaggtacctattaaacatcagtttaataatgacagacatgaaaccaaccaaatgttcttaatagctccctctaccctattcctcaccagtccaatcccacttccctgggctgaccctacccaaatgatctgtttcataaaggattgactcaaattctctgtctggattgaactcatgatacaggttacctatatcctaaaactaaagttagagggggaaatactacttaaaatcttgaaataaaattaagtgggagcaaaacaaagcagttaatttgcatgagtctacactgatagagcatgagaagtgaaaaaagctataagttctacttcgctggtaactgaattacatagaattcactgctcagtttagtaactaagtctaatgatcattaaaaagctttcccaggagaagggaaagatgaagcctgcaatactcaagttttccacttcctttttggagatggagtctcgctcttgtcgcccaggctggagtgcagtggtataatctcggctcactgcaaccttcgccatccgggttccaggattctcctgcctcagcctcctaagtagctgggaccacaggcatgtgccacctaacctggctaatttttgtatttttagtagagatgtggttttgccatgttgccccggctggtctggaactcctgacttcaaatgatcctcctgccttggcctcccaaaatgctggcattacaggcatgagccactgtgcctggccttccatttcccttttcttatgcataattctttttgcttttctggttgatttgtaaagaccctaagaaggacatattgcaacaaatacaattactcctaacttggagactgacacaaaagttgtttagttataataagtaggttgttctgcattttacccaaaaagctaagtgtaaatttttcaatcatttgttgaaacatcactatcaccttcaaaggtaaaaaataattacttctccagcataactgtaaaactatcacaaaaatgggcacagacatctccacgaatgtggcaagattttagataattttttgaataagataggtaagtgtaatcatatataatttttagattaaattggcatgcattttatttttttttgagacagaatcttgctctgtcacccaggctggagtgcagtggtatgatctcggctcactgcaacctctgcctgccgggttcaagggattattgtgcctcagcctcccgagtagctgggactacaggtgcatgccaccacacatttgtggagagtgagtttcagataccatgagatttcacttcaaaatactttagtatacatctcttgaggacattttcatacataaccacaatgccatcatcacacctaagaaaattatttacaatttttataatatgcaaattgtttacagttgctcagaaatgtcttctatagattcattttaaaatttcttttaatccaaaattcaaaggtcacatgttgcatttagttgtaaagtgtgtttcagtctttttaaatttttaatttgcaattgacacataattgtccatattcatggggtaaaatgtgatgtttcaatgcatgtatacatagtataatgatccagtcagggtaattaccaaatgcatcactttaagcatttgcatctagataatcctcctgccatattttttaaatgacactgattcatttgaagaatccaggccaatggtcttgtggaatgtcctgcattctgagtttgtttgattgtttcctcacgaatatttttggcaagaacatttcatatgtgatgttgtgtacttcttatagaatcatatacatatgtaaatagtgtctagttgtcccagtattgctggtaataaatttgatcacgtggttatgtgggtgaatcgtgggtgattgccattatctctttactgtaaaggtccatttttcacttcataatttgtgtgtgatgtatggagtgatttttaggaccacatgactatcttattcctcatcaacattttccccagagtgtttggcatctattgataatctgcctaaataattttttacttatttatattttgagacggggtctcgctctgttgcccaggctggagtgcagtggcatgatcacagctcactgcagccactatctccctgggctcaggtgatcctcccacgtctgcctcccaagtagctgggactacaagtgcatgccaccacgaccagctaatttttatattttttgtagagatggaattttgccatgttgcccaggctggtcttgaattcctgggctcaagtgatctgcccaccttggcctctcaaagtgctaggattataagcttgaggcactgtgcctggcctatctaaataaattattatactggaagctgcaaatttgctaatgttattatttcttctacatgtattagctgaattattctgtaaggaagagctttatgttttttctttgatacacagatttcatttcagtttaaacactaggataagacaaaaaagccttttccaagatttcttcaagtccccagatctagcttgtctaccagagcaatttaggatgacagtcttgcagatgggaggcaggagatggggtagttaataatagacccctggctctgcatgttttacaggaaaataatgaataagaaaataatagttctctttacttgcttacatgattctagacaacactggcagcaatcatcagagatggtatagcagctacttccatattgcatagagtactaagaattcttaatttttgcattattttgtagttatcatgctgccttccagattttaaattattgacattttgtccatgttccctccactcacaaggtgactgaccagcagtttcttccgcacttcagagataggacaacaaaaataggccctcttgctgtgtcttctctcattctcacaggatatctagagcctggattcagaaaacatcttactttctatagctccataccaagtcgtcctctctcctgcccttgttcgaatagcaactccactttttccatgtcaagtagggttgattaagtgtctgtaggtcatttcttctggtcatctttgtaagttccaattagccagtaagtgctgaatgcttactctgtatccagagcagaacaagatgctgcaaagggtcctacatttataggacttagtccctatcttcaaagaggttatctgaatggtgagacaaaaatcaccgaaaaatacagctaaaagataatctagtcttgtgggagtatctatgaatgatttttagaggactggtacaagaaacttaagaactggtgcagaaatttgcagtatctgtgttgtgctggggcaagtgcccatggattttgtgagtttccacgagggctgtgactctatccctccaccataaaacattcacaatgaccaagagagactagttggactagctatgcagtagctatttgtctttgctgatgttttccatggtcaatggtagtccatcacattagataatatagtgtcagtgccaaaatatagattgaattctatgattgggtgttggacattctttcttgccatttaagtgtcatttagagttattaattaaagcactcaaggctcattgtgacattcataggtgattctgttctttttttttaaattttttacaggtacatagtaggtgtatacattttggggtacatattttgatataggcatgcaatgtgaaataagcgcatcatggagaatgggctatccatccccctcaaacatttattctttgagtcacaatccaattacactccataggcaattgaaatcttatgcctgagagaaaattgggaatagtgctgccccaataatctgaagtttggtttggaactgagtactgtatcaggacgcatcaacattatctccattcttgtcaataatattctcttactttagtatagcgagggtgagtttgcaaagccctttcatgtcctatgacccattgacccagtgagattgacaaggcaaggattgttagtatcactttatcaaacaaaacaaaacaggatataaatggtacagctgggtgtcaaaaccattttctccgatccctcctttctccagcttatcttgctctcttaaccagggcagcatttgaggtgggcttctaggcagatgaattcagttagagttttcagctgtgtactgctgatgaaacctgcttctatttgtaggtcttccctgggggtaggctcaagtgctagttttggactttcttcagacttctgctcagtctatgatactgtactgaccttgcaaagccctcgtagttccctgcatgaacatttcaagggcaaagtcataaatggccattttaatgggctggtcatcatctcgaattgtgatcctgggaatcagattcttggttttctagatcagtgctgcataatatatgatatgagctatatatgtaatttttaatttcctagtagctatattaaaaaaggaaaaagcaggtaaaataaattctaataatctattttatttaacacaaatatccaaaatattaccacttcaacatgtaatcactatacaaattaagatattttgcttttttttgtactaagtctttgaaattcaatgtgttaacatctatttcacatctcagaactagccacatcttacgtgcctaaatggctagtagtcactatactggaaaacacagggatagaaaattcttctagaaaaaaatagtgaagagaaagcagctcctttccctctactgataacagagaatgagttaggcagtgacccttatattctgacattaatcatcataatttatcagtcatacatcatcatagagaacctcttcacatcatagcaaaattactttctagtgacctagcagcttctagaccttaaaaatgttgaataggattatccatacatacaggcggagaaaataggctatgatagagatgggctacaaggtgttgcatgctccaaaaatatggtcatgtatcctgccatatgcctgacacaccttccattaaaacatcttcttaacaaacttttttttttttttttaacacatctactaaaatgtgcagaaagaagaataagtccttctgggtcaggggaggtagagagcacaagcatgaataagacatagatgctgccttcagtgaaatttgtggtctccgagggaagacagtggataatgcaggtaggagataaatgtccattatatgatgaaaatgaaaattgtccaactggatcttcagaaaaccgctgttaatattccattgtttctgagttagaagcacatgaaataattacccttcactatttaccagttacacaggcatacactgatttgttgaatttgcttgaaaagtagagccgaagatcctttgaaaatggaagaggttttcatgggggaagagatgagtgggggcgaatgagaaacatctcctttatatggcagatgcggcagtttcttgatgatggggagaagcagcttaacgtattaggcactagaccccagcgtccagtgaccaggggataatgctgacagggaacggagggcaggagtgaatatcgtgaacacaaactttgtctatttcaagagctttgccccttcctggactgacattaaatgcttatctgagcaggcaaatacagtgcacatgtttacattggggaggtagcggagactagtagtttaggaccagggttcaagactcagctatttgtgtgactttggaggaagtaatttaatcgctttgtgccccccctcagttttctcataagtaaaaaatggcttaataggatttaattaggtgctatacagaaagagtttagaccaatgcctgacacatggcattcacccaataagtgtcaataattatgattcgttttggcattattatgtcagtaataactattagctatgattctcctctaatttgttcctaaagtttcatgagactcgattttatattaaggaatcctgctaaaaagtagacatattctaataagaatttccttcagatggcaaaactggggcaaagagatgaaaatgacttgcccaagggctcagaggctgctcctaaatggggagagaggctatttaaggcaatggcggtggatttccccaaagacaagggtttcatacacgtagagtctggaacgggagtccaggctgtaccacttaactcgaggggtcatttgggaagttacctgatttctctgagccctggattgtgcacctgccaaatagatataataaatatacctacagttggtaaaactcaatagcatgacgcatgaaaactgcatgtggtctgggctcaataaaatcagcctccccattgattattatcattattattactattgttataacagatctttaggcggcgtcaggaagtgcctgtctgggatgctataatgcgtttggctcaccactatgccccagcgcctggcacctagtaaacactcaggaaacgtttgaggaatgaatatacgtcatttgaggcaagacagggcagtcggctgactgcctccgggcttagctcttcccctccttgcaaaagccggagccctaagcagcgtgtagcccgggagcccaggcattacttggcagcgggtgaaacccaccttgccccattcggagctcttggagagcgccccgcctggatgcgcatctctgtgtgagcggctctttcctaagcccttatttttctggtttgcggtttatttacttaagcatttacagctcccaggagcagaggggctgctagaggtacggtcaggactgaggtcgcggtttgtatttattttctgcctcccaatctcagagccggcaagtcacaacacggctcctttatttgtgcaccggagaggtctgcctttctttacctcctcacgggcgataaaagacaagcaactcgggctcagaaaagtgctctcacgcgacttgcctgtgtctccgcttgcgtggaccgtcgctcccaggcttggtttctcgtgcaaacccgagcagggcggagcagattaaataaagacacctcgcgcctttaatccttgaccgcaaacactggcgtttttgtgccccggatttctgaaattcttggctcggggaaccaaggcagggggagggtgggcttgtaaaaacttcccaaagcagaaatccgagctcctagcccctccccggccccagtgacacctggattccagggaaggggggcagccggaggagaggcgtccccaagggttgcgggcgcttcccaggggtgactttgaacggctggctccaagccctaccgaccccagccaaggaacaggctcagcagcctgaaagcctcgcaggacgcccctcccctgtccccgcacgcgtctatttagggcccagcccgggcgcccaggggattctgggacttgtagtccctccccgcagcctcaggcgccgccacgacccgctacttggactacattgcccagggagcttcccggcctatataagccacccggagccgctttaaagtgcagtaaccatgtggatgtgctgctgaagcgtttcctcaagctcgctggggtgggaggagaggaggaggagaaggtggtggtggaggaggaggcagggggtggagagagagaaagcgcacgccgagaggaggtgtgggtgttccgcttccatcctaacggaacgagctccctcttcgcggacatgggattacccagcggctgctaacccctctcctcgccctgctcccccaaaccggcgtggctccccgggcaccaaggtagcggctggggccgggcagagggcgcggggagttggcactggctccccgggcgcagaagtttttgccccgctctcggggagatcttgagggatgtgcatgcacttggcatgcatttgggggttcctttactgcgggcaattgttttggggggagctcatttgaagcttaaaaaacaaatatcctctactctagtgcgtggctttgggggctccccattctggtctgatgtggcattcccccaagttggaaactgttgctgcagctgcaggaaatagttctttttttttttttttttttgaagagaggttgtgggggtgtcatatgtgagtctgctcaaggaaataatctttctaaaaatgtatccctctcttgcgctccgtggttgggagaataatgcatgtgtaggggccccccgtggggagggtttttaaaaacggaagaaaaccggagaagcggtgagggatgaagtgtggacgaagctcatgtccaatgaggatgcgggcttcggatacttggccttctcgccgggaaacaagtgctttgggatctgccaaacacttcccttagttccagcctcccgcacgttcgaagtttgtgcgtgcctagtctcaattgtcagttacatcctggaaataagtaagcgtagttacctggaatcttcgcccaagcgatcccaccaacttgcctaccaagtttgggggcgggggggctgtccccagtgaaggaggctaaagaaggtggaaacttgtaatttggagcatttctgttagagctcatcttccgcggtctggtactcagtcttctttctttctaaatatttaggagctgactacagaggagcaggatttgcacccctcgctgggcttgctttggcaacagagtgcctgacccaggtcaggtgagtgtggaagcctgagtgctgtagtcaataatgagtttttgtcctaagcctattttaagttctatctaaaccgccaaggaggtggggagtaagaaagaaaaagaaactccgtggctcagtcttcaaaatttgcctctgcctttggtgagggcttttgggagcagaggtccagtggacagtccgtttcttggaagtagctgagaattgaaggagcctgaaagtttatgagagaggaggggaaaaggccattaaatggagcaataaaacggcggcccattgccggtctgaaaagcatgctgatgatttaaattctgaaggatacagtgcatttcatatgccaaaatgtgtaagcagtattaactgcctctctccttcaagaaatagtcactcttttctaattttgaacgtgtgcttaatcagagtaggttggattgcaagaaatgaaagtggttgctgcaagttgaaagaattagaactttaaaaagggaagtgagttattgaagcttaaggtggtagcatccagcccttgactcaagccacctgagtgtcaaggaatctggcaggtccctgttgttttggggcccgtggtggaatatgagctgagagcagcatttatctgtaaacacaacagttcctattttttccccaaaatggtcagactgcatttgaagagtgggaggtttcaacgggtgcacgtacatcactattgctgcagatttggctatcaggagttttttctcctgaaatgttcaggaacatggtaaataacagggtaacagaggtaggtgggggtgggtggctgggtcttaataacttttttaacattctaaatatttagctgttccctgggctacaatctttgggcttttctaatgagaaaataaaagtcagacacttcattatagtggtatagtgcttttgtttcctgttgataagatcctcaggagtactggcggagtgagaagcatttggatgtgagaactctagtttcttcttggagttctgttgactcacatggctgtgtgggtgctcatagagccaaggattaggcccagttccccttttcagaattagctgtacagcaaggaaaaactggtccacagactcttttctaactggttgctaaaaataataagatggacacattaagtacttgtaagccaggtccagagccatgtatctcagaaaccctgtgcgtcagatgcaggtgaagaaactgaggtgcagagagtgaaatcacttgcgcagtagctagtacaaagtaggagcagggtgtaacctcaggcggtgaggctgtactgcatcccacaaatggacctcagttgatttggggatgctggtggtgagagggaagctaggaaaaatggtaaacttactgctactgatgaaataacttgcatacctcccaccaatgatgaaataatacataacattgatgtaagaaggaaaggatgtagccacaaacatagggataaaagagtgcagatatttgaggaggtattagatactgtaatgagttcattttggaaagcctgaatggggagagtaaaaagaaacaaaaccacaaggaacattatgtaagttaagcattaggctcacctcctagctgaaatacatcttgattatttacatcaaagaatctgagtaggttaaaaggatcaggcgtttccccatctgaataattcgaaagtttaaactgcagttagactgcaatgtgaaatgttgataccttttcatataccttccagtttgctttgcagccagttgtgcagatgtttttgttctccattttttctttcaagttcatgtgtgtgtgtgtgtgtatgcatatgtacactgaaagtacaatctgctctttgaataattcaaatcagaacagaaaatcctttcaagatatcattcttgtcaggcagggaaagttcttcatgttctaagtgaattactctggctcttgccttgagacccatgaaagtcatttggggttgacaatggtatctatttaaaccaagtgattgtcttttggagggaattggcatcttttctttaggaatgagaagtggaatggttgcttagaaaaaaagagatagatgaactccacagaaagatcaagagtcttttcttcaaaatatttttaagtgaggaagatcagggtgttggtattgcggggagggaggagagtgggcagagagaaagataaaaaagaaacctttaatccaatggtgtgcaaccaactgacttccagaggggggaatatcacatggcttttcaactcatttataaagatatcatggaaactgtctgatttcttcatgagcagctcttagaaaacaaacaaaaataaaacaaacaccaaatatgaacaacagaaaaaaacagccaaaataaaagtaggcctggagttaggtttctaggtcaagctgtctttggctacatctaattaaggagtctccacagggccagtgtctatcttgtttactattggtttgatttttaaaaataaaacacattgcatttgcaggctgtctgttaaccagaagtccatgcagttttttttttccatttttgctgttttaagtttgtgcatagctcaattgatgaatgcaattaaggcttgaagtcagtgatgtgaatgacataacttctatgattccttacaattctcttggtttctgtggttctgagatgattgctaatgagaataagccagatacaccactgaaaccgtcacccattcaactttgagatttctaaattggatgtagtttaaggcacatggtgtggtaaatctatttaacagactctaagacctgttcaagttgttgtgtgcgattcaaatgttttattctttattcaacaaatttcttgagcacctgctatgtactaagatgtattccaggtgctcaggatatagcaatgaacaaaccatcccgttcccaagaggcttacatctcagttggtgggaggcagccaatataaataaacaagtaagtattatagtattagaggtagtaaaagctatggagaaaaagaaaactggttaaagggggaacagaaaataacaagtggagaaattagatcccttgtgcattgccggtgggaatgtaaaatggtgaagctgctgtggaaaacagcatggcagttactaaaaaaaattaaacataaaattactatatgtcccagcaattccacttcaaggtatatactttaaaaaattgaaagtagggacgtgagcagatatttgtacacctgtgtcagtagaagcattatcacagtagccaaaaggtagaaacaacacaagtctactgatgaatgaacagataaacaaaatgtgaaatatacatacaatggaatattattcagccttaaaaagggaattctgacacatgctacaatgtggatgaaccttgaaaacatgctaagtgaaacaagccagaaataaaaggacacatattttatgatttttcttatagaggcatctagagtagtcagatccctgcagacagaaagtagaatggggattgctgggggagatagaagacaggaagggggagttagtgtttattgaggatagagtttcagtttggaaagatgaaaaagttctggaaatggatggtggtgatgtcacacaacagtgtgaatgtacttagtgccactgagttataacatttcaaagtggtatattttatgttatgtatattttacagtaattttaaaaagcaacaaaacatgatgaggggtattaagggagtactcaggtggggattagatctttactacatgacatctcagcacagatctgaaggaggcaaacgagttgaccctgtagctgtcagggaaaaagtgtgttccaaatgtcagagcagcaagtacagaggccctgagataggagtgtttgtgacatgttggaggaaggagaagaaggccaggggagagtgctaggagttcaggagggagagggagtcaaggtccagacctgtagggaccagattttgcaggtcaacagtggtttatctgaggacttgtaaactctcacggaattctcagtgtggttttcaacatcacaaaactacattgtcctttctgaagagactctggtaaggttggcaggatcacataccagatgggaactcgatagggggtaaaacccagatttctggactgtctggttaatgacaggacttacctggagttgtaattcacttcagtagaaaaggaaagtttgacaaataggtgaacgtacagttgacttggagagcaaatggtaagaacataatgataatcctggagtttcaacacaaacctatgtcttaccgccaccctgcgttgtatccagtgtcgttttaagagatatttacaaggaggactaatattctgctctccagcatccttgaggaattagaagcttcacatcagtgattctccttaataagtgaagtggacccctgcacatgtgcaaacttaaagcaaacctcaaattttgttacttattacataagatatacatattcatgtagcacacaccttggactcggctactcaggggacggaggcaggagaattacttgagcccgggggtttgaggctgtaatatactatgattgcatctgtgatagctactgtactccagcaagaccccatctctgttaaaaaaatttttttaaggagaaaaagatagcatattcattgtagtgcaacattaggaaataaagaggagcaatgaaacaaaacaaaacaattcaactattagagattagggtttcaggcttttcctctaagtatgcatatgtaaaatttacgtatatatttaaatttcataaaaagggactaacacagtatctctcatttggtaaattaccttttgtacatcttgaacatctttttaataaacagacatctgtgtctcatttttctaaatgtgcctacccctttgatggcctttcatttttattgagtctaggtttatacttccctgatatatatacatatataaatagatatttgtaaaaaatacataatataataattttacacatacacgtatttaacagtttgaattaggatccaaataaggtaaatacattacaaatggttgatgttcactaatctctgtatttcctctacagatcttttttccatgcattttttttgttgttatcgaagaaactgggtgatacacgtctccacagtttagactttgctgactgcatcagtgcaatgtggtttaacatgtttctgtatccccttggggtaccataatttggtagttagatgtagaggcttcatcaaagttaggttcttttcttttttaaattgagaaggggtctcactatgttgcctcggctggccttggactcctggtctcaagcaatcttcctgtgccagccttcccagtagctgggactccagtaagtctgctctgtaaactttgcttaggggggtgtgagatgttggatgtctactcttgttatatgagcaccccttgatgctcactacctgaatccattagttctctcgtcagtgagaaatgggctggtaaagttcctgagatttcgacacagcccttgttgtctttgctagcttttttgatttctgtataacaagatgttccaggctcatcttctctatttcttatcccagaccaagaatcggccttttctccaaggagcctttgctcttttaagagggaaattttgtttgttttgtttttttgagacagagtcttactctgctgcccaggctggagtgcagtggcatgatttcagctcactgcaacttctgcctcttgggctcaagctaccctctcacctaatcctcctgagtagctgggactatgggcattcaccaccacacctggctaatcttttttgtttttttgtagggacgggatctcgccatgttgtccaggatgctctcaaacacctaggctcaagcagtgttctcaccttgacctcccaaagtgttgggattacaggcgtgagacatcatgcctggccaaaatggtatttagagatctccacctagggccaagtaggtactcttgtcatcctcatcttacagacgagaagacaaattaaaatgaagaaaacttaaaacttgaatttcctaggtgaaagtatttccaaaatgcaattgacctatccttgcctttttgcaaagaattctgaatataatctaaactttttttaaaaattggttttgggtttagccttagtgtcctgaggctaagacatcattgttctccccagatgagcaggaatgttactcttgttctgtatccgtgtttttcaaactctgtggaaacccactaagaggttgttaaatcaatttagtgggccttgatgaactttttatttttagtttttgaaacagggtcttgctctgttgccaaggctggagtacagtgacatgatgttggctcactgcagcctcaacctcccaggcacaagcgatcctctcacctcggtctcctgagtagttgggaccaccagcgtgccccaccactcctggctaatttaaaaaaaaaattttttttgtagagattgggtctccctgtattgtccaggttggccttgaacttctaggctcaaacgatcctctcgccttggcctcccaaagtgctgggactggaggtgtgagtcaccgggcccagccaaactttttttttttttaatgacatgcactagaatagaaaacatggaagtgtatttcgtggatacttaaaaagaactgtgtatgttgcaacaaaattctttgtctcacatacacaatgaacattgggttgtaagttcaatagttttcttactctgagctgcagtcaaaagtttgagaaacactgtactacatctttgccactccaagtgtggtccccagaccagcgttactgacattaactgggaacttgctagcaattgcagactctcagaccctactccacattcaatgaatgagaacctacatttttgcaagatcctcaagtgattcacacacacgtgaaaatacgagaagatatgcattggaggatgcctgtccctgtgctttttcagtccttgtcatttagtggttcctttgctttttcatggctagctctcacctgttcaggctgaagctgacctttgtacttttcccctgcagccttattttcagtgaagtggaaaggtaggctaatcaccaacctgaggtgagagtaagtagttttcacatgattccctctccaacaaacatgggaactttgatgcttacatttgggggagcttttattcgctgttcacatgaaggcagaaagagaccagaaggcacatgtacccctacttagagttgtgaagtcactgctgttcacctgctgtcatgggacaatgaggaacttatgttttatcatactttctgacctgtcccatcagcagaacttctggatggcttgatataatgcggcttatcagaagaagatgaacataagaaaaatatcactagtctccaagtttcttgctgttcttttgcatttcagaaggagctttgtctgggaaatgattttcttttgcaagaacagcttaaaagcatcccaagcacatatttctgaacagaaaaagctgatacgacacccagacgacggacattcatttgtttgccttgtcgtgtgtgtgtatgttgtacctcatgtgtccctccccacccccgtctgtccacctcgccagatccttctattccttagggcccagcccaaacgcttcctcctccgggaagttttttatgatacttgaaaatctgtcatttgaaactccagggccctaaaacctattttccttttgggccttttgtgtttttttaactcataagaatacctggcacacaggaagtgcttacacaataagtaatttgtatatatgttttttctccctttgaaggctgcttggaaaaactaattttttgtacccctctctcctttttttttttttgagaaggaatctcgctctgtcaccaggctggagtgcagtggcctgatctcagctcactgcaacctccgcctgccaggttcaagcgattctcctgcctcagcctcctgagtagctgggtctacaggcatgtgccaccatgcctagctaatttttatatttttagtagagatgggatttcaccatgttggccaggattgtctcgatctcttgacctcatgacctgcccaccttggcctcccgaagtgctgggattacaggcgtgatccactgcgcctggcccctgtacccctctcctgattaaatatttcttgaactggcatctttctttgaaaagccttacagccaggcatcgtggctcacggctgtaatcctagcactttgggatgcacaaggtgggtggatcacctgaggtcaggagtttgagaccagcctggccaacatggtgaaaccccatctctactaaaattacaaaaaaaattagctgggcatgatggtgggcacctgtagtcccagctacttgggaggctgaggcaggagaattgcttgaattcaggaggtggaggttgcagtgagctgagatcgcaccactgcactccagcctggggggcagagtgagactccatctcaataaaaagaaaaaaagaaaagccctttattgcagagggtgacgtgaggaccatgtagagatattaagcatttccttttgatagttttgaggtgttgttcagtacaaatctctgcaggacatttgtcttgggaaactgttgagtattcataaaagggagtggaaaaatcaggtagtgaaaccaagctgctttcaggtcatattggtattgccctggtgagccacaggatggggactccgcagtaccgagtgttgactgcttcttgggtaaggggcaaaacatggaacatctgtgcatctgtttcctcttctgtagaataggtgtaaaaataaaaatacctgcttcgggtcattgctgccgagttgtctaaaaacaaatgtttgcagaaggcgttacagataaaaaaacaaagcaaaacctatctatgtcctagagcagtggtctcaatggggacagggagagtgatttgtgtcctccaggggacatttggtatcgtctggagatatttttggttgttctatctggcaggcaggggtggggtgctactggcattttgtgaacagatcctatggtgcacaggatagccccccactcccctgccccaccacacacacacgcaacggagacctctctgccctagaatgtcagtagtgaaccggttaagaaaccctgtccttgagtgaatttttctggcttggtgagacttttgtctctctctgaggatattgacctaacttcatttgctggttttttgaggtttgggctatgtgggcagaggggtgtctcttcaggctgggactgacttcaactttttaacaaaataagcaccctccccctctcgccccctcccaaaaccaaaaaacactggccttggtatctggagccctgtggtctatctttggccactcatcagctgtgtgacctccaagaaatcactaggcctcaggtttgttttttctacccgtaaattaaagagttttagctaaatgccctccactcaccaaatctgcagctctttgccttggaaatattgagcttttggttggcttctcttactttggccttgaagaatagaagccatgagaccaaatgtcagtgcgggcatctttttttgagaaataactttgtagatattgtacctggttggggaaaaggttatttagcagacatgtctgaaaaagcgagtaggtttatttttgtgtgtgtatgtgtgttgcggcggggggaatggagaatgagcaacgttgtattatactagagaatcactcctctgaacttcagatttacagctgctgtttctgggaggccatgaagggccttgcttaaagatgaaacttctgagttggtgacttcctttgggactgcctgaaaacgaaagcataatacaattttctatgctcccagagaagtgctttttgcaagagaataaattatctgatgatggggacatgctgcatttctgaggacgatctgattagcagctaatgggacaagaaggcaaggagggggagctgtgtgaaaacgtgtggggaggagggtggcattatgtccaagtcaaaaatgtgctgttcctcctcatttcacaataaagatgatatcgccaagcatctttgctcaaaggaagtccaaaattaaccctgagtgcccaggaacaggagcagagactgttgtaaagggagcctttttctccctcttgaaaaagtcaaccgtaaatgcgttaggttttctctacctcgtatttacagccatattaccatatatgtacctgggtgagggcatcgcagggagacttgtgctcactctgtagggagtttccttggcctcttgccaggagattgatcaaatgccagcagctcttcctttttctgggcatactcctttttttttttttcctgtgaaagacctcatggtttgccaggctcggcccatcgttaacctgccctgctgggtgctgcttgacctaaaaagtgaaacggtgcctttttgtcttcgtccttatcctccgttctgaggggccaactgccttatggcctcttggcttgccaggtgctttgagcaaaagccctgtgtgtaagcccctctctttgctgcctaactttaaaggaagcttttttccccttgtttttgagaaggagtctcatctgtcgcccaggctggagtgcagtggcatgatctcagcccactgcaacctccacctcataggttcatgcgattctcctgccttggcctcccaagtagctgggactacaagcacaagccaccacgcctggctaatttttgtattcttagtaaagacggggtttcgccatgttggccaggatggtctcaaactcctgacctcaagtgatccacccaccttggcctcccaaagtgttgggatgacaggcatgagtcactgtgcctggcctaaaggaagctttttgatttttattatttttaaagcaagcagcaagaaaaccagcaccaaaggacgttggcaagggccttttgttttttaggaggtggaggtagtgtggatatgccaagaaagaatggggaaggctgatggacttgttgttggctccattttttagcagaagaatgactgtccaaatgcaggtgctttggggctaggtggcaaagcttgacgactggaggatagacgcaaagggtgctgtgtgagtgagatgctggcattcactcctcacctggctgtgctttggtggttctggttttattaggaatagtggggaaaacattgttggagttggcattgacatgttgaggtcagtacatctcatgtgtcccttttgtatattcacttgtcatttggactttgctgtttggcagagctgatcctctgctgattataagcctaagaagtttagaaagagtagtttatgagaatagaaaatagaacagattagaaagtagaattataacagccaataggaatgcttcctccgtccccctttctctgtgctaagtaagcatattttctttttcacaattaattgtcaacataactatgagataagccctcattatccccattctgcagatgaggaaattgagggccagataagggaggtaacttgattgacttcccattacatttagaatagaaggccaactttttaccctggcttgtgaagtcctactggctctatcttctctaccctgtctttagcctgtactttcttcctttccccattaatgctgcagacattgggctggctttctgtttctggaatttgctaagctcttttctgctttatggcctttgtactagccgtttactctacctaaaatgctcttccgcctgatttttttttgcatgactgcctctatcttgactttcaggtcttcgcttaaacatctcatcttgttttttctgaccagccaaaattgcattgtcacttaatcatatcaccagttttaattttttgcatatactcatcactatctgatttgtcttgcttgttttatctgtttgtttcctgtctgtctgccctcactagaatataggtatcacgggagcagggaccttgtatgtcttgctttgatctgtatccccagtacctagtataggggtggcatatagtaggtatcaataaatatgttcgataagaaggaagatttaagtttcacatggaacagttcactttctagagccctggctgttcagttttatattttgcattttcatcctgttatataaagtttccaaacttatacagtgagagtcctaagcacacagtcattgccaggacaactcttaaagaaaagtttatggcagcagttttcaaacttctggctctcaggagctcttttcatgcctaaaaacaattcaggaccctaaagaactgttgatgtgagttacatctgtctgtatttacaatgttagaaattaacactgagaaaatgaacactgaaaaaatatttttaaaaaccaattacacattaacgtattgacatatttttaatgaacaataagaatattttcccaaacaaaaattttgagaagagtagcaattttttttttttttttttgcgaatcactttgaggtctggtttcacagaacatagccggattcacagatcatatatctgtttctgtcttcagtctgttgttacatcatgtgccttgcagcctctggaaaacttcactgtacatgtgtgagagactgagtgaaaatgaaaataatgccccaatgttattgtgaaatagttttgaccttgaagtttccctgacccttgggccaccagctcctagagtacgtaggtaatttgaaatgtggggttgtggcatggaacattagagagagggagaaattgaaggcttaagtgacagggtgcaattgaccatctctaagtctgggtattgtatcagatctttctgttcagaaaaaaatgcatggggatacttttcagttgtttttgtgaaacaaaattgcttcctaaagttcctcctgaaatgcaaagaaacgctgagaatgtggaagctagtggtacttgtcctacgttcatctttttcttatgagcaagattataccaagcagtccagaagttctgcagtgggatgggtcattaaaaaattataaagcataggttcctctctgtgtctgagaatagcagcttcaagtgtaacttcctttataactgttagtctccaacacttactttgttctttttgtagcttttggcctcagatgaagttgtgtcctacaatagaaattagattgatgcttattgctcttaggttctgtcataactggtgtttaaggaaccaggatagaagcttttaataatagatgagctatattctgtgctagccagcttcactgtttaaggaggttaaatgattacaaattcaggcttctggggagtgttttgcgtgtgtcttgggtcagtgatatataagattttcactgttaaggtaattgtgtggtaaaatacagaggagcttggtcatcaggaaattaatggtgcactgtggggacgaggcgaggggttgcaggcaggcaggggatccaaagtacctgactctcatgctcagaagggtttcatttaaggtcagactgtcagtgggactaccctgccacccgattactgaaagtcagactgttcagccccagtggccaggtggcttcatcttaattaaacgtaggaggcttgcctttgtgtcttggtaaaaactggcaggtctgtggttttggggtcccttaactagtataaagtcaatttctcatttcctcccaagcctgtccacccttgaagattaagtgatcccttaggtaacttattggttaatgaagtgttctactttagtctcagtttcaggagttgttaacttttaaattcggaattctgtgtaggcgaaaatcaaggtttttttttttttttttttttaaatgaatgtaatgcaattagttaagtgtgtgcaggagaactaatagatggaaaaatttcaataagtgagttttctgccacagtcaaatgagtgagttttctatcacactaaaagcttttagaaaaaaaaaaattccaaacctatcttgagctgctgcttaaaattaaatgaacatatttcttttttagtgaggttgtgctttggcctgttttaacaccagagtggaagaggttctaaatactgaattactatccctttgaagaggtttccaccacccccactgccagcaggggacctagattgatgttagaaggcgggggagttgagttgaggtctggccagctttggtattgtgagtttgggtactgaaaaacaacagtactttggagatgctgtccaagtatcagccacctcgtgggcttacagaggatttaaacatttctgggatctttgtttctccagatgtatttcctagagtattgaccaggtaagcaacattcatcaagtagaggaatcacaggacagaggtgagtgaagactttgaaggaacaaaaacgaatgttttcatttcagactcattcagacatacagaaagtgagcataaagggccaagtattgtgttgaccactttatgtggattatttggtttactcctcacaatgaccctgagaaatatgaaaggttgcccccttttttacagataagagagctgaggttcagagaagttatggaagttgcttaaggacacacagctggtaatttatgaggctggaattcagactcacatattctgagtctgtttccaagtgtacactcttgtcagtactccaagccattttggacatgtggaggggatggtcaatggggataaaagttagagtatctttccagggataaaagttagatattttgtttcttgcttccaaatttctcatagaaatctattgaaaagggccaagtaggtttctgttcttgatctaacactgtaaatttggctttaatttgttttggagagcagtcatctaaaaaacaaacgaggtgtggtggctcatgcctgtaattccagcactttgagaggctgaagcaggaggattacttgaggccagagttcaagaccaacctgggcaccatagtgagaccttgtctctacaaaaataagaatgaaaaaacttagccagacatggtggtacgcaccggtagttctagctactcaggaggctgaggtgggaggatcacttgagcctgggaggtcaaggctgcagtgagctatgattgcaccactaccttccagcctgggtgacagagtgagaccataactctaaaaaacaaaaccagtataaactcttctaggcagcagatacaatagcactaaagtgacattgaacccatatttgactgcttgctctatcccaggtactaccaggtactaggatgcaacaggaaagaagacaactgaggttcttgccctcatgagcttgcagtctagtggagaagacaaacaaacaagtgaataagcaatgttaggacagtggtagtggacccaggttgctgtatagaagagtatgttggaaacgtataacccagatctgggaggtcggagagggcttcccagaggtggagacatcaaactggggctgtgaaggtgagtgggagttagccacaagtggtggtgggagagggagggagatgtctcaggctgagagacagcatgtgcaaaggcccagggaacagagcatggtgggggccctggaaaaaaaatcattatggctggagtatggagagcagggctcaaggtaggcagggctagatcatgaagagctccaaagagatgttggaaggttttaagcagggaaatgatatggtctgatttatgtttctaaaatatcatgctggatgttgtatgccgaatagattgacgaggaaagacagattcagagaaacgagtaggaaggccttagggagtccagttgagaaatgatactggctgagactcaggttagcaggggcaagggagctagaagaatcaagagatatagtaaagcttaaagtcagcaaaaattgatgctggattagactttttcattcatttattcaacaggtatttactgaatacctactatgtgctaggcattggtgtttggaatacagttgtgtataaaacacatcacacacagatctctagaatacagcatgtgccttgtacggtgtcagacaggaattgcacaagtaaatgtgaacttgtaactgagatgaaggctgggaaggagagatccatggtgtagagtttataagagtggaatttaacttcatctgaggggatggggaagattttctggtggaaatggtagttgaattcagagctggagggtgacttggctataattagagcaaggggtggggtagggacgagagtgttgtgggcttgagaaaacagcacaggcaagggccctgtggcagggaacatgagagagggaggactggaggagccaccaggctttgctggtggtcactgagaaatggctatgaaggaggaacaggttgggcaggcaggtaaattctttttggtacattgagatgccgtgagccgctaggagcaaaactctagtagctgtgggacatgagagacagatttgggaatcctcttcacgtaacagtgactggagccagcagagtggacgagaagaccaggaaaggtatagagaaggcagagagcaatacagacgctgaagagcagctctggcttctcttccccaaggagatctttctgcatttatttttttctttatttgcacttttcttgggaatataatcaaatcttccctgccccccctttttttttacgcacagctcagggagcaatttcaatagagggcaaagggaagctcagccagagggtggtgtcaggctcaacaaagctgccacagcctccctctgcaagagtgtctcccagaggcagtgatctacctttctttgccttggccaaagccaccctggaagaatcctgttttaacaggtgcttgcacccatcagaatggtggtgggtggcggtctgatagtactattatatattggtggcatgcctacttcacgccagatgctttgctgagtgtttataaataccgtcttgctgaaccttatgtcagcttgctgaggtaggtgctcttattctccccattttacagctgggaaaagtgaggcttagggaagttctggaacttgcctgaagttcttcagtgagtaagtggcagagctggggtttgaacctgggcactttgactctggagcctcagctcctgcctgccatgggctgagaggtgcttttgaggtcattctgcgtcaggaattgcggggaggatggtgatgctttgtgaaaagaagcaaagccttaaggagaaataatctagatagcattcacatatgcagaggtcttagatgcttcagagggcagatgaatagcaaaagttctgggaggcggctatcctttgtggggctaagggaggggacaggagtaattgttttattttttcacaggcagggtcttgctctgttgcccaggctggaatgcagtggtatgatcacagctcactgcagcctggagctcccaggctcaagtgatcctcccaagtagctggggttacagatgtgtaccaccatgccctgataatgtgtttttatttttattttttgtagaaatggggtctggctggtctcaaactccttgcttcaagccatcctcccaccttggctgtttgagatgtgatgacaggcatgagccaccgtgcctggtttaggagtaattgtctgaacaaggctgtttgaacaaagaataggctctattgcccagtgagaccatccataggcagcgcgatggggagatttcattattgggcgggaggtggaattacatgctttacagggttccttccaacttttattccatgattctgtgttttttgaaaggttagaatgctctgtggctggcagttgagtgtaattcgctattgttcaccttttttcatcaggggaattaggaaggataaattatcttccctgaagtaaaatctgtcatcatgggtcatataggagttcatttgttatgatacacatctgattttttaaacaggggatcctttactgagtttaaattttgatgccctggaatctttcagaattccacttatctctcgtggaagaaaaataaaaataactagcatagattaattcaagtatgtcagccactgtaccaggtgcttttcaagcattatttcacccattgctcaccacagcctcttgaagttaaattatccccatttaacagaggaggaaatgaaagcagagaggttgtggtgggctcctaataacaagctagatgataataataataataagagcttaggggcagagagccagggtggagtgcgggagctgagcgcctaagcctgccctcgtgtatgtcaggcatggcttgtcagcagagccctcggtgtctgtaagtgtttgaagttccgcagctccgtggcaggttggcgccagctctgttttctctgaggtggtccttgtcatggtgtgagtgacataggagccctgagtgcagctgctagaagttcacaggcacaaatggtccacgatcagataaagaggcgggctctcccacccagctctgaacaacaggaagtcttccagaagattgctcctaggcccatcacttctggggcggactttccacctccacccctccacaccacagaggcctgttctgttgactttcccggcctttgtttttccttccaggacatcactgataattgcactaaaacctatcctcctccccccatctccttcctccacttcactaaggcgaggccggaggagatctccagaggtttctagccagaccagcaagctttctgcccagtcctttgtgaggggaattatcacatgagacccctggggaaggatctgtcctcccctactttttggttgtttttaattgggacccctggcagattgcccagaggatcattagctgtggtgggtggactggcctgtgatttcagggggagatgtaaaatgtagctaaaggttacttattcacttatctcggccacttaataagtatcttggttagaagatgcttaattttttttctgacttatggaagtattacagagccatggtagaaaaattagaaaacagaattgtgcataagaagaaactcagttctccataatcatccggagtataagaacatttaacattttaacctgtgttcccaggatcactgttgataaacacctccactgaagaatcagatagacctaggttgggtgcggtggcttttggctgtcatcccattactttgggaggctgaggcaggcagatcacttgaggccaggagttcaagacccgcctgtccaacatggcaaaaccccatctctacaaaaaatacaaacgtttagccaggcatggcggtgggtgcctgtaatcccagctactcaggaggctgaggcgggagaatcgcttgaacctgggaggtggaggttgcagtgagctgagattgtgccactgcactccagcttgggcaacagagcaagactctgtctaaaaaaaaaaaaaaagtctgatagacctgggttgtaataaccctggtcctcctgcttactaattttatgtgatgtggggatcttacctctctgtattacacctcagtgtcttcaacaacaaaatggcaataatggtagttcctacctcctgctgtggtcatgaggattcactaagagaacatttgtaaagcactcagcacaatggtgggcatgagaaatccttgataaatgccagctattattatcagaaaagaaaataatgcagaaccgtgctgtaggaatgcaatgtccagacatctattgcaatgatcagctgcaagcaacatggggtacatcatgctttgtcactcgaggacactgaattgtctgcttcttcccattaagggcctggaatctttcagtaaggtatccaggtggcggtgatggttcacaaaacagcaggcattttctggcctagtctccactagggctgaatgcttatctgaagggtgatcctgaaaggagagccttagtcacactggacaaggccctagtcctcttgcggagcacatacctgctcttctgcatttggaaattccctggtgtcctttcgggatgccagggtgtacagacataaatttggtctggttcaaaattcaaacaaattgtcttctaataattggtcttagaagtatgctgacttcctgaccctttaagataaagctttataatataagcgcagaagggaaatattaatcccccttgatgttttccatttgtgccgcctttctggatgctgtttaaaacattggtttgcctttaaatataaaatatgtagttacgaagaattaaacaatgactgacatgattctagagtggtacttggcaaaccgtccttctgtacattatttgtgtatcttccctcaaggtctagagatgctggctcttttgtttgagagtttattctgtgttctcagttgctgtctccctctataaataagttcatgtttaatgaaatgctctttatctctcctgcaatgtctgggttgttggaggggagggaaggggatgacaaatcagcttttccctgcagcttctcataagcagtgaactgaggttctttaacataagtttgctttcagtaactgacattcctgctaaggtggtaggttgcttcctgaggtgtcatgctgatcattgctgcataattcttcctgaaagaaaacttggcacccaggaagcaattgaaggagacacaataccgttccacactgttacaactcttgtaactgtgtggggtaaatggcttctggaaggggaagtcgagtaaattgatggggaaaggggtgtaaaggggtctgggtttggaggaggggttttgggaaaacctgggttgccctgggcatctccacagcagatgcctgaggaaacactgggctattagctgcagtccacaccagcacacagtcttcccacataactgagtttgttttttaattgtcaatttagctttttacaattggttcccactcctcaatatttatggccctgatgaaagctgtttctaggagtcacatcaatatttttgttgatatttatgtgtgtgtatgtgtgtttaatgatttctgagctatgtagagatttcctgagacttaagagctttttctaagactgcctctaactagctgcgtgttcctgggcagggaaccttattattcttacccaaatactgaaggatctgggccaggtactgtctaaagggttttcatcctctggaagtgtttcttggtgaaggatgagaaggcaagacatttaagtagcatttgggtgacgtgcgtacagttgtggaattctgaaaaggcctaaaaggctgctggaaatttgtggtatttattggcaggtttctttttattaatgtcattttgttgctttggtaccttagcccaggcactgtggccttgccagaagcaggtttttataccaggtgtttccttctgacttaacattccctgaagcaaattgaatatgttaatgtttcataagtcagactttccaggtaactccctagtcactgccacgttcttggctgagttccctgcaggctttctattcactgcagtttttattatcaagggtcctcaacttgtagaatctgattcaggcatggttttgttagaaacaaatgttactgtggttggaatatcctgaaattagataatatacggggaaaaagtgttgttgcatatgtccttacttggctcattgaatcgcctgcctgtcaaactgttatttaaatttgacttttaagtaaggcgctttggaaaattgagctaagccaactcttagtgacttttttccccttctgaacatttcttttcttctaacaatgctgcatattttactttgtctaggattttcaagaaagacatgtctgacaaaatgtctagcttcctacatattggagacatttgttctctgtacgcggagggatcgacaaatggatttattagcaccttggggtaagagcatgcaatttcttgtgtggcacggtttgtttaagacatcataacatcagcttaaaactgtgatttttctaacataagaacgtcaccgttttacttggctttctaagtgcggttgaaatcacaaacaccaaatctcatgttagccaagtttaacctcttatacaaaaacacaattttctgtatatttctgaaagagcaaaacctcattatttaggacactattctgagtttattaaaatttgcttttcctttctatataaaagggagagtgcctttattccactatggaatacagtttaaatggaataaagtgtaaagatgaatatttacagagcccaaagaagtgctttttagttttgtaaaggctcttcttttcagatagtgactcctttataatataagcaaagaccaaacctcctgggctgcctatctcttttctttgaagcagacatttcctattttacattgctgtatgcatttgaaaattataaattgcataaagttctataaatcagatttttgctcttttgtgcttttttcccaatctttatacaacttttaagggtataaatatatttcataatgtactcatttgattatcttctcccgtctcctcctacgcctattgtctagaagaggaaatgagaggtgaaatagtcccaaaggcagacagaggcagaatggagaatcaagatggttaactccaaaatagttacgaatggtctatattgtctttgtgtagaaaggagtagtgaggccccggggcggcattgttgaatttggcaagagctggactcaaataaattgggggaaggaagaccagcagcttctccaagaacctcatttttacagcagccagaccttcctttcaattatagctattatttaaagcatgcttgtttcctggtatttgtgcagaatgagtattcctaggctctcatgcaggttactccacactcagggagcaaattattatagatacagaattatagctcaattagacttgtgctcccactgtagagagattttgtttcaaatgtcatccagtgaaaaagaagtcatccatggctgcctgatcaccagatccagtgactttctacatttgacctctctccattatggacctacccttaacaatttatcttctgtggcttttggcaaagaggcctccttctgccctgcctctgactctccctcctttcttcatggttggctccttcctgttttcatcgtctatggttgactcttttaccctcttcttcttttcagtaatgacagcaacagtaataaatgaaaagcactaaatgagcccagtgggtatttgctgtgtgctaggcactatgctaaatactgtgcctacatcttccttaatcctcacacaactgtctatggtgaacattgtcatcattgctgtttgtggaggcaaaacttttgagcttcagagaggcaaagtcacttgcccaagatttcacagctcagaaaattccagactccaaggctagggctgccagcagttgctctctgcaggccagcttctctctttccagcttccttgtctgcccacagctctccctcctccttgactgtgcacagcccctatctggatgcctggttaaacctcaacccactctattcccatgtttcccctgggggtcttgatttcccagtcacccaggtgcctcctgagcccccgggatcttagtaccttctttctcttccagggcatctcttctttaaaatcatatgaagtgctttttaagtgttttcctcaaacattgtaaacaaattaatgatgagtccctcctgcccttttaaagtgaggagggcttctttttgaactttgggttgctaatactttcttgagatgaatactttattttctcagttgcttgcacatatttgaggatagcagtgtaaaaatggggttggaaagaaagtttgacaacccttcctgtttttaatatttatgggggacctgttgtggactacagtgagtgagtgccagtcgttatgggactcactgtgtagcactccagccccatcccatttatatagatggtggttacctccaaatggcttcatctactgattgaacttgagaactccaataggatcttggagggcaagtgtgtgtgtgtgcacactactcagtggcatgcttctgaattgcctttttagcttgttaaaaataaaggttcagcttggtgcggtagctaacgcctgtaatcccagctacttgggaggctgagatgggaggatcctttgagaccaggagctcaagaccagcttttaagaccagcctgggcaatatagcaagaaccctgtctctttataaaaacaagacgggcaggattcttgggcctcatcctacagcacagctttagtaagctgggttgacagagtcctggcgtcagtatatttggaaacaataagtctgatgaacatccccctcgttaagaatccctgagaccaactttcattttacagatgaaaaaactgagaccggtaggggtaaaatgccacagtcatgatcatgccgctagtaggtggcagagtgccatctacaattcatttgtcatctgagcttgactggggctcctcttaccacttcctccccatttgagaacttgatgatttatttatttttttttttcttgagatggagtctcactctgtcgccaggctggagtgcagtggcacgatcttggctcactgcaccctccacctcctgggttcaagcaattcatctgcctcagcctcccatgtagctgggactacaggcgcctgccaccacgcccagctaatttttgaatttctagtagtgacaggattttgccatgttggccagaatggtctcaatctcttgacctcgtgatccgcctgtctcggcctcccaaagtgctgggattacaggtgtgagccaccatgcctggccatggcttgatgatttattaacctagccctaccttggattctgagcccaccctgtcaagcattatgttagctctgggggcattactatacttacaggagcttaaggtggtggttttatatatgtatattctgctcttgatttttacatgagaactcaggccattggctacactgttcttcttgtttatacagtgaagtcttgtgtcatgaagctgaaggaggcaaactgctggtggggtaccatggacactttgattttacccaccaaatagatactgagctgccagccttgggcatcttctggccttcatggagctggtagcctggtgcccctttggagtctcagtcagtgaggttgggaggacagagaaggagaggcagagagtgtctggcgcaggagaagcttggtcggcggggctttgtggagaaggtggggctcttaccctgagtcctgaaagacaggcaggacttgaggaggcaaaagggaatcttggagaatagaacagtaagggtcaaggctgaatatttaatggtaccttgcatttgggatgagaggaggcagcacagatgaatggaggaaccctggaaaaccatggtgtgttagctgggaacaactgcaagttctgtggtcacttggaagattagccagttctatcagtaccagttttaggagcttggacaagttgtgtaacttctcagagtctcagttccctcatctgttcaaaaatatatttttaagtggttcttctaaaagaattgtgcaagttagacttagcagtcaggactttaaatactgagtctttatgtaatgtgagcttatttatttgtaattttttgtactttccccactagttgcttttgatgctccacagtcctttcatatcttcatgagtttgtgctcatggttctttccacctggaaacgctcccctctagcctccaacatctatttcgaatcttccagtagttccattagaacttcctctgtctgcagcttctcagatgacctcaggcacagttcgcttctggctgtatttttttttcttccttctcttacagcccttagattatattctccttatcagtttgttcttaaggctcctgcactagccttgagctcccaaagagcaagggcctggctcatattcacctggcacaaagtcagctcctcagctacccttagttgaatgcaacagccccttgctgtgtctcgcgacttcagccaccttgcatgctatactcagatctaccatggacatggttatgggaaaggagccacagaaaacagtagccttaatgtgtccttcacagaacagaaccctgggcttttggattaggtttagatccatgcataggaagcctctagtgtaaagagttcctggcaggagaatatggcaatctaaatgttgcgcaggaaaagccctgggatatctgatttttgcatagtgctaagagtttcattttcatacacttgacagagcatttatctgtcttctttacagcctggttgatgatcgttgtgttgtacagccagaaaccggggaccttaacaatccacctaagaaattcagaggtaaggtggtggctttcctggagtagtcaccttgactcacttgaaaattcttgaagtgtgttgttggtgtgtgtgtgtgtttataagcaaaataggcttatttattatgtatttttttcagagtatgatttgagttctaagctttacaacttgaaaaatgcatacataaatttagtatcaagattgggttggcttttactgggtccttaatttgtctattgaatatgtgttgacaagtgctaattcggtttaaagtcttacatttgtacaggtatttcttcaaacaaatagtatttatggatccagtcacagggaacattcattatttcagcagatctcactgtccgtttggggatgctgatattcttagataccttctttaagaggtatctaatgatacctcactgaatgtctcactggaatgaaacgttcttaattattgcacttgttttttgagttaaaagacataggcaggctgggcacagtggcgcatgcttgtaatctcagcactttgggaggccagggtgtggagattgctagagcctgggaattctagacgagtctgggaattctagaccagcctgggcaacatggtgaaacactgtctctactgaaaatacagaaattagctgggtgtggtagcatgcacctgtagtcccagctactcaggaggctgaggttgggaggatcacctgagcctgggagttccaggctactgtgaaccgagattgcaccactgtactccagcctgggcgacaaagtgagaccctgtctcaaaaacaaaaacaaaaacaaaaacaaaaacaagacataggcagggcagcttttctacccaaattagttttttctttaggcctcctgaatttggtatctttctccaaaggtagcttagtttattgtaggaggtctttgaaatacacttggtatcttagatgataaacatttgtttttcttttttgttgttgtggttagtggtcctcagctctaggcacatgttagaatcatctgaggaagtttttaaattaaatagatgcttggggctccattgtagagcttagggatcaactatagagccctaacatctatttattaattaaattatttatcaattaaggtaacctctggaattggggatgattctttacagccagggcagaaaaccactgggttaggtatttgactgatgacttcagtcccaaagggctcaaatcttgccatttgcagattatataactcaagttctaagttcttattgtttagtggtttagaaactgtttgacttttttggataaaagctaaataaattagaataaaatagaactcagacgttcagatggagaaaagccatttggaagacatttggtgttgagttgcatccagttggcgtgagacaatcaggagaatgttttcacctgaggatgggtggtggtaggggaggctgttaaagagagagaataacagttgttgatacaagttgtaagaggaacccaaggcggctactgcctccaccgcctttttcttctcaatccttctttcatgtttccttccaagacaagacaaaatcttgagtgctgcaaaaatgaaatgtttcgtccaacgatcataattcagtcactcatagaattacttccccactgtgaatattaaaagggacaagatcaattgactgtgccaggccctgtgctaagcactctgcctgcattagctcagggagccatccctcctccctaggaagagattgataccctcggaacttaagaaccttgtctgaggtcacatggctggtgacggatggagtgggagccatggttctcaactttggctgcacagggagatcacctggagaactctcagaaacactgatagctgaatccagctcagggattttgagttaactgggcattgggatttttgaaagcttctcaggtgtttctcttgtgctgccaaggttaagaaccatggctaatgaaatctaggctaataaaacttgaactttgttattcagggaagagctgatctaggtttcgcttttgcagctgggaccaaggggagggatatgcgtccggaaggcattgcttgggtccagcgtgagctcttatcttgttctatatacgggccttgggagctgggagatgaacctgggagagattctaatgtactgtacgaagttaactagtggctatttgttttttacaaatacatgcacataatttaaaattttgttttttaaatcgacatatatttatggtgtacaacatgatgttttagaatatgcatatatagtggaatggctaaattgagttaattcatatatacattacctcacatgcttattattttttttttggtgagaacatttaaaaactactcttagtgagtttcaaatatacggtatattgttatttgctgtagtcactgtgttgtacagtagatctctggaacttattcctcctaactgaaatctgtatccctcggccaacatctcaatcctccaccccagcccctggtgaccactgttccactctctgtttctaggagttcaatctttttagattccacatataagcaagatcatgtggtattcgtctttctgtgcctggcttatttcacttagcataatgtcctccgggttcattcatgttgtcacaaatgaaccagggactgtttgaatacagggttagaatgttaaaaataaataggactatagcaggggaagtcggaggagacatgtttttctggcacgactgtaaaggtgcctggtgcttggatgtatgtatggtggctgatttgaagtgactgttttgagataacggtaatagtctgacagaagctatttggaaggaagcaaactccttttacagcctggcctggttctacaggtggtcacgtgacagtgacttgatttgttgagtgcttttctccctaaattaaaaataaaggtttctgggttgtgagatgcttcgtccttgtgggaaaatctggttcaaaacaagctctgctgcaggctttgggaatgtaggtcaggacttccttaattccatgtgctaaaccagaggtcccctgcacccaggtgaggggcctaggcagctctgcctttgcaggctgcctcagtgctggaaagatctgcttctccaccgtggaacttgggcagtgagttttaaaaaattttccaaagcattccttcaactgcggtgcagcatactttgacggtttttttttttttttttttttttttttttaaatgaagagaaagatctctcttttggaagcaattgctgcgtttccaaatataagtgtattttggagctgaagtcattttgatgtttagaaattgtgcatagggcagttgggcaatttggaggcatttctagtccatttcctcatggactcgttgcaccctagagtttaacaaacacatatggaaaagtgagatgctggcaagcagccgaatgggatgatggagtctttatctgagcaatcagcagagctgcatgtagtcatttgggtttgctcttgcttccattgtttccttgccaagttatttcctatattgagaaccatcataacctgttcttaagtaaatggaaatccaaggcctgtttatgcaatattccccatggcttctgactttgcatctttaattttgtgagctcctgagatctgcagccctaatggttaataaaagaggctcttggatcaggcttcctggttcatatccaagttccatgaattctttgctgtgtgaccctgaacagattacttcacctttgccaaccttggttttctcacctgtaaaatgggagaggataataggctctatctcataaggtcattgagaagattaattgtgtgttaagaatttagtactgggggagtctgacccttagttaagagtttaagccttattcttttctttgtattcccagtacttagtacagagcctggtacttgtaaatctcatgtttaattttatgagaataattatatattgttattttttttttgtcttcaaattgtttgtgggtggggacgtgcacatgaacccctgggcttggatttgagccccagtgctcgtgtatgcaagctgagtaaccttgatagattccataatatttctcagcttctttcctcacttgtgagttagggtcaaacaattccatccttatcaagataatatgcataaaaagcctaatagagtgcttagtacacagtagttgttcagtgagtggttgctgttaattttcacagtagatatagaagagttcaacatcgaacagaagatatagaagagttcaacatcgaacacacttgcttttttttctctgatggttgaaagtacatttccaaagtgaattgctttttttgtgtgtgtgtgtgatttccttgaatgtatctcttgcctctaacttcctctgtaggaagaaaaggttggctgcacatctgtttcacataagccacatctttttcatctgaatgaattttggacaatatcattgtcctcgtaagggatgaggagagctgagacttagaataatacagcaactttagttcttttattaatatggtaccattttaaagccccaacatccatggaaggtaaggcagaacctcctcttctccctgatttgtgttgtctttgcccataatcttgaaagaatagagaaggcaaacatcagattgaaacagggaatagaaactttgtggttagtgaattcctttatctgtattatcttttcctcttcccacttttaccagtccctcccccagctcccccggtgctaaatataaagatatctacaaagaaaaggtggaaactaacaaccagtcttcattttgctcccagaatctctgctctttttaaatataaatcacctccagggttgttggagtagaaacaagggaactgggcttttgggcaattagataggctttagtgttgatcatgccattattgcataagattcgggcaacagtcaggctcttgctttcaaaacctaatcttctctgttcacatcaagaggccagtcatggctccaaattcttgatgttggacagatgttaccatatcaataatatcaaaatgtgcagcttttaactttgcagggagccccttagtttcagaataaaagctgttcgaagggaaacttacagttcaaaatgaggagaagttggggcaggaaaaaatgaggtgaaaggaatcattattctatcactaagtggttcatatgaattggggaggggatcagacagactgaatatgtggatgttccagataagtatcttacatttctctttcccagtgaagttggtttcaagcatcatagtctaatctaagcaaatgtattgtgaaaaatgagtgttgacctccagcgctgaggccctactgtgtaccagctgctggccttggtgatggcaggacaagatgagttacactccttcttgctttcaggagtcttagagtttcatggagaaacagacccacattataagttacaatagccaatgttaatacagcatttattttgtgcaaagcacttcctttgaattatctcttttaatctgaggaacccacctatgaggtgtaggtcttgatgttcccattatgcagttgaggaaatggaagctctaagaagttgggtaacttgcccatagtcagttaaatgtcacttcttagaatgattatcattcatttcacaaacacttattgggtagttcccatgtgccagccatttgtactccatgaggaaagagacattctcaaagaagtctacatcaatatgtagtgaaaatctttaagaaacttctttagagtaatttgttgtcttcactgcaactatttatatataagtagaagcaaagcaggtgaaatttcttcctacctagtataaaacctggcctactggggaaaagtaaatgaggatgcttttcatgtcctaatctttcgctgtgcagcaccctgagaccagagcgcacctatttggtacctgatgccatttgagatgacaagttatgagctggtccagtgccatgtgacttatgagtgtcgtagccagagccctcttccaaaggctgggcccagtgcttttcttcctttgtagttttatggagacaaggtctcactctgttgcccaggctggattgcaattgtgtggtcatggctcactgcagcctcgaccttctgggttcaaaccatcctccttcctaagcctcccgagtagctgggactacggacataccccatcatgcctggcttctttttaaatttttgtagagatgggggtcttgtatggtgctcaggctggtcttgaactcatggccccaagccatccaccaccttggcctctcaaattgctgggattactggtgtgagccactgcaccctgccacacttaatgcacttttagccattgccccaaccagctgtgggatgcgcagtatgttacttacagtaggatgagtcctgtttgtagtgcaaacgagggtctggcctggggcagtataacccagtttctgggcatttccagagtaaaatgttggtggaagacccctggttcctcaacatatgcccggctagaaataatgacagtctgagtattgtgcagtcaccatgatactggcatggagaagagtatgttgcttggctataatgagccgctcttggacctaaagcatggccatgaacttgaggatcacacttgtggcctttttatttttattggtgccttctttccccagtcccagagtgctggcaccatgttagccccttttagtagcatgctggtggatttagtaggattattttattgagagagagaagggttttacatctcatgcaagctctttgtaattgactttgaaacctcccagcagcttaggaagggtcctcaaataagaatggcatttttcatgcttgagtgataagaaacacttgagtgtcaatagcctacttctctgatcttggtcttgcctgcaatttaggttaaatataggggaaagagcaacctctggatgccagagctagcatccagcccagaatctgccatgaactgctccaataccttggagaagtgatttcgtctctcttagcctcagtttccccatctgttaaattgggtttttccaagatttcatccagcttgaaactttgctattagtggcggaaacaggcaggttaacgttagaagccttgtgctgtccagaaataggttcttatttctttgggattacaggtctctttgtcaagatagatgagtgctggtaatagccaggccttaaccttacccttaggccagatggggacacaggcagggtcttgggtcacaaaggtcatctagggtggctataacaaactcaccggcttagctttctttcaaacgaccctcctttgccgcacattgttttaaatgttgctaagcaacagtattttttgatttttttcttttggcaaggcatcgaaggaatgaatccgtatcttacttagttttaaataccctcatgcaaaggggagggcctaacttaaattttgtttgttcttttgattctaatccatgacaggcctttcatagtaggggtataggacttactttctgcctgtcttgttaaataaggcagaaaaatcagtctatttaaggtgcttgtcaagtatatgccttgaggcatattgaaggtttcaagagtgtgtgcagctgccttgtaggagagtctcctccaacttgttctgtattcacaaaatcaattcaaatttaataaaaagattaatagttttttgtaatcttcatttcagatttactagtttatctcaatcttggaccaacagactccatttaaagggaacaaaactgtaatttaagtcaattccctgggcaacatagaatgttcacagtgtgttacacaatcgctggggatggtgcctgctgcctgattatgctggagtcccacacactgcagcgtatccctcactggattgctgcctacttgcttcaagctatgagatgcatgtctgaaggctctgggtaccctgaaaatgagcataagggaatttgtgtttactttgatgccctggatccattcttttttgcatacctgagtcaccctggaaagtagacctcagacccctcttttatagtcatttacccttatgatttagttgctaatggagaaccattttcactatgtgcataaaatgcttctagtgcaataaataagtttaccttgtcctccaattgaatcactgtattgcttttgtgacttcctccattgagggtgaaattgatttggaaatctcagcaagcgtaatggggtcatattgtcatattgtcatattgttatatggttctcctgaaagcagtatactgtggttgattacggactttttcttttggcaaagggttttataatcccgtcttgagcattgatgaagatgtgtggtgaatcacttgagcttatgataactcttttcctttcttgtttgacatgtgagaaaattagagggatttagaaagtctcctggggtcaaagagcaatcctgtgccaaaactagggttggggcacaaccccagtttctactcacactgtcttttaggcttctgtgtttgagccatgaattaaaaattttttttggttccatcaccctgtgtaattaatgataacctactttttataaatgcaaataatagtgaataccttgtgtagtgctaagagacattagtgaatataatctatttaattaatatactttacatacactcatttatttaatcctcataacaaccccataagtaagaccggtacctttctacagatgaggaaactgacatgtaagatgtttagtgtctggtccaagatcacgtagctagaagtggcagagctgggatttgaacccagtcaatctaacaccataaatcctcctcttaacagctactctaaactgcctttagaagtggactggccttgaaatattctttgacaaaaattacccgatttcttaacttcctcctctgcaaccccaaagtatgtcattgtgagctgcattgacacagaagaaaaagtctacagacaagaggggcatgctaaccgcctacttaacaatcttgagtatagtatttatcactatctgataaatacacagctactgttttctcctcgccagattttggagcactcaaagggaccaaatcttgccctgcactcctggcccagcacctggcataatgttggtccttctttaaatactggttgaaaaggaattggtgttcttttctgatatgattttgactgctcccagttctagcagtgtttttgctgacattttaaattgaatggccgctgatctttttacactgatgacttaacgctgccctgtaatcttgctccaaactacctgagcctgttactcttgaaaagctttcctgtaggctgggcatggtggctcatgcctgcaatcccagaactttgagaggccaaggcgggaggatggcttgagcctaggagtttgagacctgcctgggcaacaaagtgagatcctgtctctacaaaaaatgaaattagccaagcatggtggtggtcacatgtagtccctgctacacaggaggctgaggcaggagggttgcttgagcccagtaggttgaggccgcagtgagccatgtttgcaccactgcactccagcctgggcaacagagcaagactcaacaacaacaacaacaacaacccctaaaactgtcttgtagttgactcgtcttctccctggaaagtggatcttattggtctcattctctgagagtgtcttctccttgactcctaatgtttgatcttttttctctctttcatgcctatagttttgagattccttggctgcattcagtacatgagcatgaaaaacaaataattgttaagtaccttcctcctttgtgcttggctttctgatagggtcatgcatgcttttgttcttgaccgttggagcacactgtgacatgggtactgttatgtccccattttacagttgggcaccctgaacccacagagggttagcaatcaaggtgtatctgggatttgaacctatgtctggaggaccacacagtgtctgccacttaagtgaattcacagagttgggctgctcagaaaacacttgaggcttctgatgtcctaggttccacatttcaaaggcatgttgcttcgtgggaataaagctaacgcaggggtaacttggaggctaggtctccattcgatattgaatgatgacgttttagattagctccggcaacaacatttctccccaaagttgctgcacagactcctcacctgtttctgtaattccacctttgcctcctttgtgtctgagtgtggacacctcctccaatccaccgtttactgcggctaggggaatcagcacaggtctgaagatgtcattcagctgcttggaacctcatagtggttccccagttgtgctcaggataaaagacacactctcagggttcccagcagtctgcatgagtcaccactgcttacctctcagccttatctgcagtaactcctccaggttctctgctccatccagatggattgacttccttctggcagtcagaatacttgctctgtactctgggactttgcatgtcctgtttcttctgcctgaaatgatctccctatctctgttgttccttcctggaccccccagtctttctaatgcccactcaaccttcaaatctcaggcatctcctctggggcacctttactgaacctttgtgtgcaggcaagcagctgctccttttgcacagactctgaagccagaccctgtgggtttggctctcagccctgcttttgactggtcatgtcatctcagatgtattacttaacctggcaatgcctccactttctcatctggaaaatggggaaattattatatatacctcacagggttttcatgaggattaaatgagttaatctgtgtaaagcacttacgggactacctggtccatattaaatgccataacactgctaatttttggttttgacttttaacttgatggttttgacttagcccttcccccctattgcattaactgtgaggacagaaaccatgcctgtctccctaaggctttgcacaggttctggactatattaggaactaaaatgtttgtggaatgaatgaagagagacctctaaggcattgcttctgagatctgactgcgtataggaaccacctggaatcttgttaaagtgtagattctaattaggtagtctgaaatgagacctgagattctacatttcttttttatttattttatttttattttttgagatagggtcttgctctgtagctcaggctggagagcagtgatgcactcaaggcccaccgcagccttgacttcccaggcttaagtgatcttcccccctcagcctcctaatcctgagtagctgggattacaggcgtgtgtcaccacacccagctaatttttgtattttttgtagagacggggtttcgccacgttgcccaggctggtcttaaactcctgggctcaactgatcctcccactttgtcctccaaaagtatcgggattacaggcatgagccacggcaccctgccgagattctacatttctaacaagttgtcatgctcctgcaaggctctcgggagccactgactgttatcttcccttattttatggctgtcctatagaagacagatgttctgagcccagagcaatagagaatgagggctagtggatcaaagtgcccagaggtagaatatgaggcttaaaagaacttaattctgactattagtgctgagcagttactcaaagaagaggcctgcttcaaattactgagtttcccccgattcaaagagggctgaccatctgtcggggattttgcagagggaatttctgctctgggacagaggttagatggatgattccatttgactgtgtgtgttttcccaccgaaggacccagctgttctttctgtttttgcttcctgtggaagccctatggttgggagcgttgggtcaataaacagctggggagagcacagatgcactgtagacaagaaactctctggaaactgaatgggttcaatccaattggtaagagaacattagtggaaagatggcattattgaatgtttgaaaaaatgaacaaatagaaaaaaacaatagctttctaagtcaaggcttgccgaatccggtcataatgagtgggtaagatgtcctggggagacactacagcgtggtggttaggagcacaggctctggagtcagtcatgggttcaagtccctgccctgctcttactagttatatgaccacaggcaagtcatttaacctgtctatgccttagtttccccacctggctgccatggtgaataacactgtggagctgataggcttgtgtgaggatgatttggtgcatgtgtaacacagtaaatacctgcaatacagcctcagcactcagtgaagagtggctattgtgactgaatttgcaattagcagctttcgggacatctcttaggaagctcaaacatggcctttgccatcttgtaaaacatcgatatgtccgttttaaaaactcagccagtggagtatacaaaggaatccatagccaggcagactttagccttcctgaattttttagattttattgagtgggcctggtaaccagctatgacagagcttggggctattagaaaagaagccatcagggcttttctctcctcgcacgagccttgatcagagcctcagttactgacgggtcgtttgctcgagatggtaatcctgccttctgtatagaattacaagcctagccagagaggaagttgtgtttatcttaccccaaacagcaggcattccagtgactcttgacagacaggaggaagttattgccaatctgctctttcccaaaagctgcccttccctgcccccaacgtgctccttgcatgtttagagaggtttctgccagccagcctgccaagtggcattctctcccgggctttgaggacagttgcatttgcagaaggaatgtccagaggctacttctttttctcttttaatagatttaggggatacaagtgcagttttgttacttggatgtattgtgtagtggtgaactttggtcttttagtgtacccatggccccggtagtgaacattgtacccaatgggtaatttttcaacccgtaccacccccacaccttttggaacctccagtgtttattattcccctctattatgtccatgtgtacccattgtttagctcccccggtggcggctacttctatattattggccaaggtggaggcatctctccccaaggtgagtggtcagcctggctcttacaggaggcaaaaattgtgcttattctcattggcactgatttggtagagataagtggagaggggctataggtgtgaagaaaagaatacatcttttcaaagaacccacgtgttttcctttccaaaacaatagctggaggtcagtgtagaaaaactccaacttgagcagttgcaataattgagaaaataagttgggcaattattcctctaactgagatttaaaagttcctttcttcgtctggtatttttccgggtacatttgagttccaatttgggtgcttctgaaatgtctggatgttttgtgctgctaaaattatatgtgtctaaaaatgttatcagtgatgacacttatatataagctcgcttggacttatgctagcaaatttctgtgactaaggtcctctcctccccctataaccattcccagaatcgtggcatttgaggtaaaggtaggaaatagaataacccaacttaggtttagcaatcaagtgaaggactatcacttgagaactttgcttcggtcttgtcgacaaagaatacggggttttgttaccatagtttcagtgaaaaatttgaccttagctacaataacatacagttagaaagaaccagctaatcggttttctaaaattagtgttctctagtacataaaccagtaggaacagagtatttaattaaatattatacaaggatataaaagcccaggggaatgcagtcccttgatctgggcggggggagggaggaaacccacagtgctcctttactggtctcttgcaagctacaagaactttacttcttttaaaaatgttagtattggttttattttcagatctgtcaggaatgaatttatacagcttgctgagagagcaaaataaaacattcagcattatttccagttgtcccctacagggtacaaactaacaaggcaagatgtgaaaatgatgttgggctaggattctgataaggacacttgttggtgatctgctagatgactttatgtgaaggaaaattattttcttttttttttttttaatttttttttttttttttttgagacggagtcttgctctgttgcccaggctggagtgcagtggcgcaatctcggctcactccaagctccgcctcctgggttcacaccattctcctgcctcagcctcccgagtagctgggactacaggtgcctgccaccacgcccggctaatttttttttgtatatttagtagagacggggtttcactgtgttagccaggatggtctcaatctcctgaccttgtgatccacccgcctcggcctcccaaagtgctgggattagaggtgtgagtcacctcgcccagccaggaaagttattttctctccaaaatctgggcattttaaagcaactaatttctagactcttgttcctttgaatgcctaatgtgtgattaagtggggccaacatctcctagttctgagtacagctatatctgcctcccccaactccacaggccataagcaataatctgtatgaagattatgtaaaatttgacatctcttttcatctacttatcaagagccccagcagtagctcatgtttctgatagtggctggaaatgtcatcaatattgtgtgaacttagaaagctgtggtaccatttctggaatgaagtggcttccagattttgtaatttcaggacaaagaggtttctggtccttcattgacactcttctctgattttattatcacctgccctggaggctgcagaggtgcaactggagttcagtcgtttgccaggtttatcactgattggaaacattgctctgggttttcttgaacttctattgttgtatctctttgtcaattacatattgatacattttcttaatttcagttttatgatttcagctttttaattggactttaagataactatctaatagaattggaagggtgaggtatatttaagggaatacaaatgtttttgtttgacgtttttaccattttgcatgtttctgtagtggcatctcaactattgcaatggaaaatatgtccttggcaagactcttagaaacacagcctcaaaggtcattggattgtgcaagcttcttgactatttacaaggtcacctacctgaatgaatagaaatgctccctgcccttaaggaatttgcaattttatgaagagagatgagtgagaactactttgtggattattcttggagaatgttgaatcccagacgagcttttagtcccctgatgttcattgtttttatctatgccatcagatcactgtgcccaaataatttgaattcatgttaataatagcttacgaaaaatgcagtaagagagcttgctggaaaagtgacagcatgcattttaaattacttctagttgacctggctttcattacccaaatatccacaggcccttccatgaatatggataattgagttgatatttagcaaataccattgaagaggttagatgtgtcaggttggttgttggaatggtgaactagactcttgattttggatgatagcttaaactaacctaaacaaaagggggattttttggggtcaaacaatcccagacgaacagctgaattgcatgaaggacaggagtgcagcaggggctcaggaaaacacagattcaggcatttgagtactgtcagcagcctacgtccatatcttgtgtcttctttctgtgcatctttcaccttggtttcttgtcctgtcctcttcgggttttgatatcaaggttataccacactgaaaatgagttgtggagtgtttcctttttttattctctaggggagtttgtgtaatattggaattatctgttccttgacagtttggtagaacacgtgagtaaagtcatcccagccatctgttttctttatgtcaaaattaactactgattcacattccttatgtctttaaagggctatttcttcctgggtaaatattgtaagctctgttcttctagaaatttacccatgtcatctaagttttcaaatctatagtctccttgtattattttgttcctagattgactggttttgtccttgtggtaggctgaagaatggcccctgaatgtcttcatcctagtatatgttacctgtgaatatgttacctcatatggtatagggatttcacagatgtgattaattaaggctcttgagatggggagagtatcctggatttccaggtgtgcctgatcacaagggtccttgtaggctagaagcaggaggattcgagttaataggagatgggaggatagaaacaataggttggagtgatgtagccatgagccaaggaatgcaggaagctgcaaaagtcaagaaaattgattctctcttgaagtctccagaggaatgcagccctgccgataccttgattttagacttcttacctccatgactttgagagagtagatttgtgttgctttaagccactacgtttttgattatttgttatagcattggtaagaatacagtagtaattgtcctaatattgtttatttgtgcgttcttttttttcttgaataagcactgacccatgttttttctgtcttattactctttaaagaaacaaattttggctttattaattctttctacgataggttggttttgaagttcattaatgtttgcctttgtttttattttcttcattctctttctttagatttattttgttcttcctttattcttttaaattagataatcaatttacaaatctgacttctcaaattgtaatgttaagcatcttaatctataaattcccttaaaatattgccttaaacttaaacaaatttacaagaaaaaaaccaaacaaccctattaaaaagcaagcaaaggacatgaacagacacttctcaaaagaagacatttatgtggccaagaaacatatgaaaaaagctcgacatcactgatcattagagaaatgcaaatcaaaaccacagtgagataccatctcacgccagtcagaatggtaattattaaaaagtcaggaacaacagatgctggtgaggttgtagagaaataggaatgtttttacactgttggtgggaatgtaaattagttcaatcatcatggaagacagtgtggcgattcctcaaagacctagaatcagaaataccattcgacccagcaatcccattcctgggtttaaacccaagggaatataaatcattctgttctaaagatacatgcacatgtatgttcattgcagcactattcacaatagcaaaggcgtggaatcaacccagatgcccatcagtgatagactggataaagaaaatttggtatatatacaccatggaatactatgcagctataaaaaggaacaagatcatgtcctttgcagggacatggatggagcaaactaattcaagaacagaaaaccaaacattgcatgttctcacttataagtgggagctgaacaatgagaatgcgtggacacagagaggggagcaacacacactggggccttttaggggatgggtgaggggaggaagagcatcagaataaacagctaatgcatgcggggcttaatacctaggtgataggttgataggagtagcaaaccaccatgacacatatttacctatgtaacaaacacatgcacatcctgcacatgtattccagaacttaagattttaaaaaatttatatgtatgcatatgaaataattataaacattgacttcaaaaaattgccttagtttcttcctacacattttgacatgcagtatttttcttattgagttctaattattttcttatgtctgttattttttatacctacgagttatttagaagtatttttatagttctgattttaagggatgtttctagttctcttttttgaaaaaatgttttacaacttagttgtgtgttggtcagataatatctttgttttatcagtcctttacaacttgagaggcttgctttgtggcctagcaagttatcaaattttatgcatgttctactgtgcttgaaagaatatatatatatttccaatcttaggtgcaatgtgctatatatgagtttgttggtttttttatctccttgatctatccagtgttgagagacatttgttaaaattttctattaatattttgggcttatggaattgttcctgattatggtggtggttgcatgaatttgtgtatatgttaaaactcatagaactgtatacggtgctatggcttgaatgtcccctcccaaaactgaggttggaacttggtcttcaatgtggcagtgttgagaagtggggcctttaagaggtgattcattcatggactaatggatttaatgggttaatggattaatgagttatcatggaaagagaactgatggctttataagaagaggaagagggacccaagttagtacattagcatgctcagccccatcgccatgggataccctgtgctgccgagggactctttagagagtccttaccagcaagagggctgtcaccagatgtggcctctgacttggatcttcttaccttctataacttaagaaataaatttcttttccttacaaattacccagtttcaggtattctgttataagcaatggaaagcagactaagatgcaaaaaaaaaaaaaaaaggaaaattacttacagtgaattttactataagtaaattagttaaaagggttaaaaaaattctcactgtgacagtaggtgtgcaattttgccttgtagtttttaagttttttaaaaaggttttttcttttgccttaccctcagttttttctttatgtataatgaggttatattagtaaatgcttagatttatacaattattataactttctggtgaactaaatatttatcattatgtaggaaacatttttctttctaatggtgttttacgtcttatagtctgttttgtctgatattaatatacctacaccagaattgttttagttagtatttgtttaaatatacattttatttacttttaaattctctgtcattatattttagagctgtctctcataaactgtacataactagagaactactctctctgaccatctttgtctattatctattaattggaatgtttagtccatttacatttgttgtaatgtatttatatttatgattttaatttgtggggttttttaaatctttttttcccccttctttaagtttcatcgaaggcttttgtgtgtgtgtgtatgtgtgtgtgcacgtgtgtgtgtttgagacagggtctcactctgtcacacaggctggagtacagtggcttgatctcggcttgctgtaatctctgcctcctgggttcaagtggttctccccctgagtagctgggattacaggcatgccaccatgcctggctaatttttgtatttttagtagagacagggtttcaacatattgcccagtctggtcttgaactcctgggctcaaactatccacctgcctcaggctcccaaagtactgggattacagatgtgagacaccacgcctagctgtgcttcattgaaggtttttttcattgttgttctccattctgttatttccccctctactgatttggaggatatactttatatgtgtttttttttaatagaagttacctcagatattttaacgtgcatatttaattaaccctaaagtttataactatcattattctctcctacaatactaggacattatagaatatttaaactcctgtcatcctctctcagtctatgctcctgttcatgatgttagtgctttgttttatattaaaacttgcatattagatatgattttgttttatattgtcattaaaaaaattaacttacgtattagtatttactatacctatcttggataattttttttctgcctcaagcacattcttagaatttggagaatctgttagtggtaaattctattttgtttgaaaatattcacttttaattctctgaaaattttacttttatttttagatgacagttttgcttggtttagaattgtagattgatgggtactttctgtcagcatcattatttttttgcctttcattgttgttaaaagcaaccttgctcagtatttttttttcccctctggttactttagaggaatctctgtctttgattttctgtaattttactagtatgaatataggtgtcagtttctttttatttatcctgcatgatatttgttaagttcctagatttgaggttgttttttgttagcaattatggagaattccgagctgttatctattcaaataccacttttttttttttgagatggagtctcactctgttgccaggctggagtgcagtggcgtgatctcggctcactgcaacctccgcctcccaggttcaagccgttctcctgcctcagcctcccgagtagctgggactaccagcacgtgccaccatgcccagctaatttttgtatttttagtagaaatgggatttcaccatgttggccaggatagtctcaatctcttgacctgatgatacacccaccttggcctcccaaagcgcaaggattataggcatgagccactgcgcccagccgctttaggctattttttaatctcgccatctttttcatctttgctccataggctggactctaggtaatttcttctcatctttgtttactatttctgttctattataatctgctctgtattcattgagagtttaatttgaattatatttttccatttctaaatgttctatttgggacttctgaaacgtttggtcattctcattcctccatattttcaagcttctactttacttcctgttaccaaaaaagcacactttaaatatattctatctctaaaaattacagtaggtgctatctctacagatcttattctattttctacattggctgtttctgaaaatggtatcttatttccctgtgtgttttgtgattttgactatcagcttgtgtttttttggcatttcatctgtgggaattgtttgaggcctgggttaaagttatgtttctccccagaaaattgtttccttttgccagttgccagagatgctgccaactcaagactatttaaatcaaattctttgcctgaaaattttaaaattttgttttaggtattttttgcttaaattttgggaatttcctatatatgttaattagggtgacaaacgagtatgagggtaacttatttatcttgactttggctctaggtataagagagaaaactctcctcgtagttcacaaacaagttaccttgccttcctatttttagggttggttggtttgttgttcaccattgcattgaagctgtagcttcttgtgtgtggcggtggggggtgggtctgagctttatgcaatggtctcttagaaaacttttgatcttgagtaggtgcagagctttatcccctctacctggcactagtatcataatggaaggttattaggttctccagatattctcagagttctcgctttagaaaggacataccttccaggggtcttgtttccacttcattgcgggcttctctggattcccttctatataactgcttcagaacatttcaaaatgttttctaatatttcatccagctttttctgtgtattaattgatactgtaagaaatgcatacttgcttcctgctcctttttttgtctcactgtcattttctgtgtgattgaaaacattgctacccatagctcttaaaatgtataattttacagttataatcattggagaaagactgatccgtgtttgaatatttaaacaagtgcctgggtgtggtggctcacacctatagtttcagctactcgacaggcttaggtgggaggattgcttgaccccaaggctgcagtgagctgtgattgtgtcactgcactgcagcctgggcgacagagcaagagcctgtctcaaaaaaaaaaaagagaaaaaaaagaaaaaagcaattctagataaggaactttgtggttgagtttgggtcagatttcctcctctgggtcaatctgcttaggctggggacttggattacctgtgttaacatggaagctcccaagaaaaccatttaggctagactcagttccaaaaacaaatcaaaacaaaacaaaacaaaaacaaaaacaaaacaggtaataaatatacagtccaggtatccactgtgatggtaatcaagggataaagaatgatatttgttcaagtgatcctcttgcctcagcctcctgagtagctggggctataggcacgtgccaccacgcctggctaatttttgtatttttagtagagatggggtttcaccctgttggccaggctggtcttgaactcctgatctcaagtgatctgcccacctcggcctcccaaagtgctgggattacaggtgtgagccaccatgcctggccgtatttaagtctgttaggaatgattttgactgcaagtaagagagaaaatccacctaatagtggcttaaaacataagggcatttgttgtttccttagaaatccagagataggcaatatcttatatagtgaaagtctcaaaatcgtgtctttttgctccacatccttagtgtatgggtgcccccatccccaccatgttcttgtcacttcatggttacaaaatagctgcagtggttccaggcatcctgtttgctttcatgataaggaataagggacaacacagtgagctctcctttcattcctgttcctttttttttaagacaacaaaaacttatcttcatgctcctagcagtctacttttatttcattagtcaaaattgggtttaatgcttattcctagctgcagagagtttgactggaagtgaggttttgtcttttcagcctttatgttaagaagcagccaggtcaccatgtgttggaaattgtttgggagacaacaagctttctatactgtggtttattggttgcacattgaggaatccaagtgattctccttccatctagtttttagtgtcttggtgattgaagaataccagcttttgtcgacagtacaggtaatgtaactatccacaggagcaagtagctcttactctagccatctcaaatggatgcaagcaaccatacgtattcacctgatgccagtattcaccataaatagtatgagtgttagtgacagcagaggctttaatgagtaataggcacttcatttgttttattggcttgcatctgagaagtacctaagctaatagtttctgctttttgttagtgatgccttagtttggctagctaagtggggctaggtaaagaaaaaagcattttatacacatgaccaagtttgggagggatcctctcagtcgttttggactgacattgctaacttcgtaaagggaaatgcatagtctgagattttctctttatctgtcatcccttttaagtgatggcgttggcagagggtcattctcttagcttgcccatagctttgctttcattgcaacaacaactttttattttttagacagggtcttactctgttgcccagactggagtgcgtgtggtggtgcactcacagcctacagccttgacctcttaggcttaagcaatccttccacttcagcccccaagtagctgggactataggtgtgtgccaccatgcctggctaattttgtttatttttttgtatagatggagtctccctatgttgcccaagctggtctcgaactcctgggctctagcaatccttccgcctcagcctcccaaagtgctgggattacaggtgtgagccactgtgctcagcctggagcttctcatgaatcaaaagctccctggtagaatcaagaacaatttggttaataattttcaccctcgaacagatgagagaaaaacccaaaatgaatcagttgatctgtttaaactttaatatttattttccttttcatcctaaaggaggaagtagtttttcccagaaagcagtgtggaaactttcctgttcttatttctatacttgtatatggaggctgcttatggtatattaaagaatttggactgggtacagtggctcctgcctgtaattccagcactttgggaggccaagatgtgaggatcacttgagcccaggagtttgagaccagtctgggcaacaaggtgagactccgtctctacagaaaatagaataatttgttgggcttggtggcacatgcctgtggtcccagctactgaggaggctgaggtgtaaggatctctggaccctaggagactgaagctgaagtgagccgtgactgtgccactgcactgcagcctgggcaacagaacgggacccggtctcaaaaaaaaaaaaaaaaaaaggctttggaagcatctttttttgtgttcatatcacggctagtatgcaaactttttttttttttttttttttttaaagacagagtcttgctctgtcacccaggctagagtgcagtggcgtgatccaggcttactgtagcctcagcctcctgggctcaagtgattctcccgcctcagcctcctgagtagtcaggactataggctaggacccccatgcttggctaatttttaattttttgtagagacgggatctcactatgttaccaagggtggttttgaactcctgagctcaagcgatcctcctgcctcagcctcccaaagtgctgggattacaggcgtgacatgtgatcttgagcgaaatatttaatttttctatgtcttaatttgctcttgagtaaaacggtcacaacaagaacaactttagaggttcgggggattaaaggagatatgcaatgctcttgagacaacgtcaggtacattttaagcgtgcagtcagtgtacatgattatcatgataatgatgtaaatttttccccctcttcttgagttcttcttgagttggaagaaggaattcttttctttgagaggatagagttggggagcagaaagtgtcttctccaggcaccacggcaggaccttaggattgctggtgcattagagggtgtgagcactcgaacctgtcatctgcttctatgtcattttttcctcatcacaactttgtgaagttggtggattatacccattttccagccaaaagaggatgacctctgaggttatgaaacttgcccaaactaagaattctagccagaggtagagccaagacttggagctaagagttcctgaatctttcctcctttccaggagttcttgcctcagacagagctcgtgcaccgttcactctagctggtgttcctctgaccagtcagtagcaaatgcatgctctgccttcagccacagaagtccgcaagcagtagtgtcctttgtgttgtttcctcttaaaacgtcatctacttaaacaggttgtgaatctgtcttaaggatagacaaataatttaatggcagaggtgtagggtgatgattcaaattcagtgacataaaccaagcgctgggccaactctgacctttttttttttttttttttaatccctttgaatcatcttgtgctgcattctgatgaaatcttgacataccaccctgaaggaagtgctgtgtgaagaagtgtgggctcataagataggaccaggggaagagaggggccactgaaggctaactttgagtgtttggaaaacaacactggtttaggagctggaggacttgagtcccagtctttggtttgtccctgactagcagtgtgacctccaataacgctcttgacctgtctgggcctttgctgcttcatctgtggcatgaacacgttggactagaaagtgaaacacagcaaaacttttattgagtgtctactccattcaaggcctgtgctaggcatgatttatagtacggttgtagttacagtctcttcactgtctcagattccctcacgtccctgataaactttaatttctcttttaggaaagattcggcctgacattttatttttattcttacatcttagttttaagaagcacatagatttatcacttacatttactcatatgaataaataacatatgtatttattaaagccacttagcaaaggaattaaaactttcttctaaacttaccattcatggaaagctgtaatataagcaatgaaaagaccgttcttcacatgtgtcttgtgttactgctcctgggcctcctacttccatttccctctagatgacatggatttgtcccccttaattgtatccaggcctctatggcttcaaaggactttagcacatagggcggtagggtggcacggtgacaatatgaaagactctgtaatgtaacttgggttcaagtactggctttaccatttattacacgctaatacctttggaacttagttacttaaactgtagcataatatccacatcaagaaaggtgatctgttaggagtctcgtaggcacataaaaaggttgattcccaacccccttcatatgcagttacactgggaatttaagtatttacccagtccgaggagttcaacctcaaatacatcaaaaccacccttgcccttccctcctcaggacttagtgggtgataggtggaatatcaaacaggacaccagcctgtttctttgtgcggaggcctttgagtatcattcagattatttttttttcactctgttaaattcaagttacttctgcatccacttacgaagcatagctacaggattggctcagtctaagtaccggcctgtgagtaagccattctacttcttatttctcatgttgaatttaataatcagaccctctcttatttgtcagcactttgtcagagctatgtagggtgagggagtctttccccagctcagcccaggtttgtttttagtactggataaagttaataagactttatctgactgtaagtggaaagacacagccaagattaaattgcaattgagttaaaaccggtggaattggatttggttaattgattgtgtactatgtctcagtcagcattcatcttcagtttttcacctttgtactgcattcaaacatcaagtttgggttggttatacatttggatttccttttccacaatattttctagcaacatcattcaagaactcgtaaagtgaaaaggggtgtgcgtgtgtgtgaaactaggacattcttgtctttttagtaaatactcattcctttatttcttattgctctaatggcatgtgactttaatttggtctatttagcaactgtttaatttctgtcatgcagaaaacaaatttcagcaccttttcccgaagcccgtatgcctccttatgaaatgtacaggtagtgatgaatgaactctttgtcctgtttattggagttgtgccagtgacccttttcattggtcacttcagttcgttcaaggtgacatgaaaggcattttatttggggggatgtctcagtcaagtcaggagtttcatttgggggctaaatttgagggctagtaactaaattgaaaagccactagccctccaattttaatctgaaataactaatgaccttttaatctaaagtaacttcttagaaacccacattctctgtaagtcagagaaacaagtttccagtaagtgtttgcattagacacttgttccaattctcacctagtctgggaaccccattaagaagatctgggttattctcccttctcagtaaaaactgacttcttgaaatggaaggccgatgtgtgttcccatgttaccaaggagtcacttttcgggagggggggacttgtttttcttcttggtcacagagtgcaaacaacaccaggccactcttggttgtcaagttagcaggaaagaacttaagccctctccatttgttaatttttatgaattattagttaacatgaaaattgtagtgtgtaaatgtttacaaagaaacttctaaataccaatttgccttataatacatagtttaaataaatatgatgcttttctttttaaaaatagacaaatgcactgacaggggtatttagtaatcattgtttgcattttgtcacagaatgtttaaaattgacattgcacataatttagagacttaaccagggcggtttaagcagaggggcctgaagttatttttctgtggcaaaaaataaaaagtaggaaagaacttctaagcttctaaaatcctgacagcctcattgtaaatgaagcattaaagtgctttgttcatttctcacaaacatcagcccttgaatttggagggcccctccctccctccctctcttcctttttcccttcctcccttccttcctcccttcctcctttccccttttctttcttttctcttttttttgaaacctggaacattttggtatctctgaccagatgaattttttcccaagtgccttaggtgctgtcttccatctgaaaagtggggctgccgtcctcttctggggaatggaaccaaagtcttgggttcttcatcttgggttttcatcagtagcctctggcccttttttcctcctagacctataacttggagtgctgagaagtaagaaattgtcagaattaactgtctctttctcttgggccatttctctgcatattctcccatggaggtgattctgactcaggaaatgcccccacatagtcggaacctttcgagggcagaaaagggaggaaagaaaaggacgtggatatgtctactaactgaaaagccaagggtggtttgttcttccctgccgccaaaaaacaaaacaagattttcttcttgagacaacccttcaatgcctctgttttctttagaggactgttttggctaatgaaatcaatgtctgcaggatttcctgtgctttcagtctctttctctatagttttaacattcccctgtcattattagcaagttgtctgctaacagcttggcgcatgccagaaagctattctcggtggggttaatttctggctattaaaagttctctgagaccccagatctctctgagcagggccatgttggggatttccagcacatgtgctgtttagactcaagggccacagcaagcttccccatctcacagcagaaacactgtaggcacaggtgacagcaaatgggcattgaccagtccgctgccagagcgcttggtgaccgtccaacccacagacgcgctgccatctacctaacggggtcgtgacagtgattttattgcgtgcttcatgaaaatcatgtagtgcctggtccataataaatgattgcagactattgttatcctcatgcctgggacataataaatatccctaaactgttacatgaaaaatagaaattccctgagagcataattaggccagttatctccaagttagatttcgttcatgggacaaatggcagacttttccagcatgggctgaaagaagtaaaaaaaagaagaaacactgagaggtaggaggactgcttgaaactaggggtttgaaaccagcctgggcaacatagtgagatcctgtctctacaaaaaattaaaaagttagcgaggcatagtggtacacacatgtagtcccagctactagggaggctaaggcaggaggctcattcaagcccaagcccaggaagtagaggctgcagtgagctatgatcatgctactgtactccagcttgggtgacagaggcagaccctgtctttaaaaaaaaaaaaagaaagaaaagaaacactaacttgttgaagattgagatgactccactaggaacaaaaatggttggtgaagaggaagaggactgagaatagaatagtgctgcctgcctttgtgtttacatctcacatagagctatcttcccctccccacagagcagatgtagctgaagtgctcatgtgtatgtatttgaggggacagcaacttggaagagaagataccagctgcggcatctcatagtggaggtttggaggccaaggcagggcttcagggaagtgccttttctgcaacatgtgttttgttgctcttattcttgtcttggtctgcttgtaacaacaacaaaaaagaccatctggagtctagaaggcaaaaataatgggaatgaagagatggtgttagaatcatagcagtatcaccgtatttatgggatgagttattctactggccctcacttttggtgctgagattgagatgtgaaatcatgaagcgattcagaaatgtgtccttatgaaaatactgtcttctgatagcttcagcatacagggttttttatgagaacagatctttctaatctctcagcgttgccaagaagtgtccatgcttcttatctagagagattattccatgttttaattataaagggttgagtagctgtttcagggctgacgttggttcttgctcatgaatcaaggtcacaacagagctcacccctggccttggccagggacttaatgttcattcagcaaacatctgccaaaccctcactatatttacagcatgtgttaattgtagtgggctagatacagataatactccatgtatatagtacttttaacagtttctaaaggcttattctcttattcacatgaagaatctgaaatcagagaagtcggcttaagttatatagctggtaagtcaacaagcaatagctgcaaccagtcgtatcttattttttgactacatctctgctgtctgaggcaaggtccctactctcaaatgagttaacttttaatagaaaagataatttgattgactctaacgaacatttattacatatgctctggaggttccatgtgaaacaggcttgtctttaatctaggtctcaggatagcagaagtaatcccatttgtatttttatctgttttgtttaggatgcttatcacagttctaatgcagaaattatttggataattctgattgtggaaaaaaacaaactcaaagtgctttttctagtctctcactcaacagcagtcaacacagatttctgtgacaaacggggtgggggaaattctccccatcaccaagcaagcaatcaattctgcagcagacaacagctgggtatcttctattttaatgtttaactggtgatagtattagatcccacagattggaggctcagcccccaagaatgccccacctcccacctgacacaccagtctgggcctctggaacgtctgactgactggctttaagtttggattcctatgaccacctctttgggttggattaatttgctagagtggctcacacaactcagggaagcatgtttacccatttattataaaggatattacaaaggatacagataaccagaggaggagatacacagggtgaggtctggaagggtcttgagtgtaggagcttctgttcctatggagttggggcccactatcctcccagtgggtggatgagttcttgttcaccatcttgtctgcctccacatgttcagttatctgaagctggtccttttgggtttttatggaagcttcattatgtaagcatgattgattaaatcattggccattggtgatcaacttaaccttcagcctctcttccctctcctctttctgggctgaaagctggaccctctaatcctgccttgtttttttctggtgaccagctccatctagaagctgcctgggggctgccagctaccagtcaactcattagcatgcaaaagacatcactttggcatttctgaggattttaggggttgtatgccaggaaacagggtcaaagaccaaatatatatttcacaatgtgacagtaatgatttattttatgcctaactccgctgctagattgtgggtagggactttctcgttgaccccagcatccccaacacaaagtgaaacatctgtcagaaaacagatgtgtctttcatcacaaaagcatgttgaatgagtgcactataaagaatagatgaggtgctgttttaaagtgccatgggaccacagatgaagtttattgtggtgggaggtgatgtcatgagtagaaaaacttacggagaaggcatattaagccgggcaacaaaggatgggcgggcattaaacatgaatggagtgagggttgggatagaggggtgggacatttttctacagtgaattacaggaccaaagacacagatgggcagactccagctatgatttttttgacagatagacagggtgtgtgaggttgaggcttaagtggtttattggtaccagattttgaagtctttgattgactaagacatttgaagtttgttcttgctattgttattattattttgttttgagggagggtcttgctgtgtcacccaggctggagtacagtggtacgatttcagctcaatgtaacctctacctcctgggcttaagcagtcctcccacctcagcctcctgagtagctgggactacaagcgcgtgccaccacgcctggataatttcttttttttttttttttttgagacagagtctccttcttgtcgcccaggctggagtgcaatggcatgatctcagctcactgcaacttctgcctcccaggttcaagtgattctcctccctcagtctcctgagtagctgagattacaggtgcccaccaccacgcctggctaatttttgtatttttagtagagaggggatttcaccatgttggccaggatggtctcgaactcctgacctcaggtgatccacctgccttggcctcccaaagtgctggggttacgggcgtgagccaccacgcccagcctggctaacattttttagttgtttagagacaggattttgccatgttgcccaggctggtcttgaaaactcctgggctgaagcagtccgccctccttggcatcccaaagtgctcggattacaggtgtgagccaccgcgcccagccttactactattattaattttaaaaagaacctttattggtatcttactacactaaatgtattatgttcattacttcatttagcagtgagggcaatcccatcttattggtgaggaaacaggttcagagagtttaagtatcttgcccaaggtaacagtcactgagtggcacagttagtgatgaattctgttctctttgataggaatagaggcccactgatacctgtgagcttagcagtgtatcattctttattttgtcagaaatgagtacagtgtttggcacatcataggtgctccaggttttagagaatacattttttgccgagtcgcagaaggaatcagtactttcctttaggaagattagtctggtaattacgtgtattggcctagttagtaaatgttttttgtgggcatgaatcaattgaatccttgtttttgatgctggctatgtgccaggcactggtgtaggtgctggggacctacggtggtgagctcactggtgggttgggctggagagaaaggggtcgtagggtggcaggcaggctggttgggaaggagtgacagtgtggctacaggttacatcaaccccctgagagagagcagatgggcagagactgaggactgaggtttcagttaacccggtggtaacctagaatcatgatgggggccagtgactcgaaatatctgtctcactggtcattgggtggaggatgacaacctgcccctgattttaaaacagcagtttcttgtcttcctgcttgtgggtggattaattgggttacatatgtttatgaatgatagtgtaaatacatttctgatgacaatctggggaaaaaagcaaaaatggcaataaaagaactgttgctcatatatcaatggataaggcaattatcttctctaggagcacacagcattcatgtgtggggaataggggtgaagaaagatttcgttactgagagcatgatctggggatggaactgtacccgcggaatgtgtttccatctgtcataggctgtgcttttgaaacaacacaccatgttccatagggcttctaataaaggatgaagtgttggagaattcagtgtttttatttgtagaaagcaccagaatcccataatcaaagtcagggtatttgggggattggaatcaattagaggcattactgaatccagtcatccctgcctctcctgctttaaggtgaggaaactaccttaggtgtttcctgagttaggtgacttagccaagattgtacaggtagttattacagagacaggactagaaacttggtcttcagaggcaagcgattgcttttggcagtttggtgtgtatctttccaggatgtttcctattcatttgaaggcatataggcgtatattaaaacatacatttttatgaattttcttaaacccgtaattattattctgcaatttggttttttcacctgactcctttcttaacccattttttgttaatgtcaatagcaaaataataaataaaccatggtatatccaggcaatggaatattactcagtgctaaaaataagtgggttatgaagccatgaaaagacatggaggaaacttactaatctacaatctagtttttttcagcatttgaggattattccatagtatggatgtgccagagtgtaatcagccattctctgagtgataaaaattcaaactatttattttttaccatcatgagcaatactacaatttacttaaaaaatttatacagctcttacttttgtgccccttgctattctaaatgctgtacaagtattaaccaatttaatccttgttactgcataaggaggcttgtctgtcttatagatgaagaaactgaggcaggaagaaattaaaccatctgcttaacatcatatggctcgaagtcaggatttgcacacaagcacttcagctccagggtctgtgctcgtagacactgcgtcgtgctgtgttttagcagtgagatccttcacctagctcttcattcacatgtgcaaatattaactatgtgatgggtagcatagaaatagaattatcaaagaaacattttttctaatttagttaaaaaactttattattattattgttaggtttgcaacaacattgataggaaggtacagaggtttctcatatgtcccttcccctactccacagcctctctcactagtaacatcccccatcagggtgcacagcctctctctctagtaacaccctctatcaggatggtacatttgttacaattgatgaacctacctagacccatcagtatcacccagagaccatcatttacgttaaggttcattctcgaagtcatacattttacagatttggacaaatgtataatgggatgtatctatagatcactgaagtatcgtacagaatagtttcactgccctaagaatctctgtgctcctcctatttattcttccctccccccaacccctggcaactactgattttttttttttaatctccctagttttgctttttccagaatgtgataatgttagaatcttccaccaggtagcctttcctgattggcttctttcactcagtatgtgcatttaaatttcctccatgtcttttcatggctctatagcccgtttcttttcagcgctgagtaatattacattgcctggatataccacgatttatatattcattcacttactgaaagatatgttggttgcttccaagttttggcaattatgaataaagctgctataaacatccctgtgcaggtttttgtgtggacttattttttcagcttctttgagtaaataccaaggatcatcagagaaactcttctgaggagaaatggtcaagcattcaggcacaagatggcttttgagtgctgataatattatcagtgactagcctttacttaacatggtgctgaatgtttcgtatgcagtctctcatttagtcctcacaacacctagtcagatggcaactctttacagaaaggacaatgtagtaagatttttacagcccgatatcaccaatttagtgattgacaattgatgacttgagcccagaatctcaactcttaatcaccgtgtgtattagtctgttctcacgctgctaataaagacatacccgagactgggtaatttataaaggaaagaggtttaattgaatcacagttccacatgactggggaggcttcacaatcatggctgaaggtgaagaaggaaataagacacatcttacatggtggcaggcaagagagagcaggtgcaggggaactctcctttataaaaccatcagatcttgtgagacttattaactatcatgagaacagcatgggaaagacccgcctccatgaatcaattacctcccgccaggtccctcccatgacaagtgggagttatgggagctacaattcaagatgagatttgggtggggacacagccaaaccatatcactgtgtcattcaccaccccccacttttttttgtttttgctatgttgaccaggttggccatgataattcccttttgactgtgttcagctgggcctgcttttgatgaaatattttggctaaagcttttgacagacctctgagtagtaatctgtggctttcaagcttcaaggattatatatttctttagcacttggcattgtttgtaaactaattgtttgaggtttctttttctttcacattatttttgcagattttatacttttttcctatatcaaagttatagtgtagggatatgactcacaagccagatgggggtaggggtgttcccaattattctaaatgtaaatgtaattagagtttcatgtggatgcatacctcctttctaaaaaaatatggttattttagcgctcactataaattcactggtattcataaatttatggtgaaaccctctagttataaagtgagttttattacatccacataagctgctttttaaaacctcctccttcactttcttttctctttcctacaagaacatcatttgtcccctcagaataagtttagtaaagtgtttggaccattctcaaaccggccaacttctcaattcagtttaaaaaattggaacgtatgcttaagaatagatgttctgagttagaatttcttccatcatttgacaggtttaacatatctaagatgtagggggagaatcttaattggacatacagctacccaatagaatgcctgatatgatgaagagtttgaagaaagttaaggacatactaatggcaaatagtgcaaggaaaaataaaagcaattagaaactccaggaaaaactaaaactgagctaaaattgaaatgtattcatattacattatttgagatgcatagaaaaatatttacatggttataatataaacacaatcaatttatagacaaattacaaagctcgtggttataaaacagtaatgctaatcaacctcaatgatatgaaagtaaaaatatagacaatagatggtaaggaatggaaagacgtggaaaagtgaagagggctctaatgatatcaaagttgggcagttaagagttattgtaggtgatgcaacaggaattaaagggactacttttttaaaaaatgaaaacatacataggcaaggaaatagcagtttaatctttttaaaaggaaaataatgactaggaaataaaagaactatgaatatgtcttctctggagaggcatttgggaaaaggagctcctggtgcaggtacgaatccagaaaaatagagtgatacagtgatcccccaagaacccactagccttaacagtattccacattttaccatttttgtttcatctgtcttttttcttttttttttgctggtatcttaaaaaattcaaataccatgccatttgaccccggatacttccaaacgcatctcaagaaaaaggacatctacttagataaccacaataccattatcatacctaacaaaactaacaattccttattaccatattgaattttgtttgattgaaaaaatactttttaattttattagtagtagtattatttagagatggggtcttgctatgttgcctaggctggtctcaaactcctgggtgcaaatgatcctcctgccttagcctcctgagtagttaactacagcatgtgcaactgtgcccacctgaaaaagttgtttttttttttaatagttaatacattcaagtcaggttccaaacaaagccccctcttgtgtatgggtgttatgtctctctagtctcttctgagtcttttaatcttgaatagtcctcttttcctttttatcatgccattgacttactgaataatatttgatgttaaaaatgtgtgcatgcattaatttgattaaaaattttcaagaagttttaattggcttttaaaattttaatggttaaaaagtatagacaactttatatattttaaaagtcttatgttctctgtaagggtatttttataaaaacttgtttttaatgactaaatttaaacatctcaaatgcaggaacctttacatatcagttattctgggcacaattctttgcatgccaagatgagtaaaaatgattattctccagtattttttagtctaatcagagagggcagtttgtggacatgcctgccaaagcattttgccacatggaagtaattacttttaaagctaatagttaatggattccttactaggagccagccattttattaagtgttttaaattatttttatccataccacacactgtgggagaatccatataatccacacaaggaacctgaagcccagggagattaggtaactttgtgtagggtcactcagctagtaaatgacagccagtataggaacaaggtctttctaatacccttaatcactaaactgtatagggcctcccaatttgacatgctagtctcccctcctaagaggcggcgttatgtactggttcagagcatgagttctagagccagactgcttggttttgactctggctctcccactaaatagctctgtgactttgggtgacttgcttaacctctctatgtctcagtttcctcatctgtaaaatggagaaaatagtcctggctcataagattaaatggtttcctatttgaaaagaccttggaacagtacttggcacgtccatgaattaaaaaatgcttaagtaactgcagcacagaaatactgcatttggcatatatatggattggtggatgcacagatggacaaacaaataaaaagtagggagcaaattgtaggctactttttcttatatttcaccaataaaaagtaaaggcacttcccccagttaatgtaataaggttctctctcaggtctcagaatgttgtgtagattttttaaacaaaattgtaataaaattttattgatggtatacacatacattagttattattttgtagagtttttaatgctcaatgttgatatcaacttcctgactactatttttaaagaaagaaggaaaaaccaaattgaatagtatctgttttttccttctttctttaaatcatgtgtttatggaataatccagaagcataagaggcgacttttgtgttaagcatgaggtgactttcatgttaagctttctctggaagaagagagaactggatttggactttttctttcaaggagaaagaaaaaaatgttagtcacattacagccttgaaagaatcttcttgaacagttctggaggaacagattaactttggtgcatgtagatacagtagttcagcctctgccacttaatctatccccaaggtctcatggagggaagaagtagaggtgacagcgacttattataacgtaactgagtggttagtgaatgttctagaactcctatcttggtttgattggctttttgttcatgttcttttaagcttttgaattttgctaaaagataggtgctttgaatccaggatcctagacaacttgggggccaatgaattgatttcaagatggccttttgctgctttgaggatgcaggctgatgacttaggtcctgtgttcattgattctgctggagatgtccatagaacgaggaggagaatcttcggtttaatgtctcctgatttatttttagcagctgacctggctagctgtgatttgctaattgtctgtatgtagtatatgtttgtaagtgctgagtcgtttcgaataaatagtctcatatgaagtgagatgatctacttggcctagtagctgattctttctggaattgataatgacgagagtgaaattctatcttaacaagtgcagcagctgccctaatggagaaggacgacgtggaatttcccattgtctacctgtactgtcctaaaaatatacgaccaattccagtgactgataatgatattgagaccgagtggttaataatggctcaagaaatcccagcttgatttgaccagctttccagcttttttctttggcaggtggggagtgggggattaaatctgttgacttttgcaaatacataattttatagaatatgtgtcctaagaacgaaactcactacatttctaggttcaaacttacttttttgggtccaatgctcaatataggacaaaaaagaagaggaaaggagaaaatatgaaagaatgtatattagttaactcagatttttggatctgggtggatttcggatggtgttaaattggcctggggacttctttattattttttttaatcgtagcattggtttgtaatattcatggtttagcctgaatgacttaaaggatttattttttaatttaacgtgggttaaaagaacatgagcaatagacctgccaataactattttaaaatataaacagataactgtttgttttgctcaaaggtcacattgaggattcagagctcatgactcaggatggctatttttcttagaggaatgatttagacaagttgaattgaatagctcctaggccactgacatttattcaattttgtctttaagatttgtttactttttgaacctgtaaaacaggggtgtccaatcttttggcttccctagaagaagaattagaagaagaattgtcttaggccacacagaaaatacactaacaacagcttatgagcttaaataaataaataaataaataaataaatgcaaaaaaaaaatctcataatgttttaagaaagtttacagatttgcgttgggctgcattcaaagccatcctgggccgtgggttggacaagcctgctgtaaaagactggaatttagatacagctcatcaaaatatcttgctattctaaaagtaattctcaatttctattttttctaagaaaaattattagacagtaatgttaagttgcagcaagtaggtttgcattttggatagtaatagtcccaattttattaaaaggttggcttatgataaccatagatttcttaattttaattttatttattttgtttgcacatactattttactgatagtatgtgcaaaaagatagtgagtgaagcagttggactaattgtttacactaagattacttaggaaggactatctggcatgtttatattacattcagcaaattgtttatagtagggatcatttaaatatgcattaccaatatctcaggttttagatttgccaaccctgtacgttgagattttccaggatcttataattgcaccggctagtggttctcccttgaataaactgcaagactttgcacttagctaaaaatgactcacctttgaaggtggtacgcattcattaaaaaaaaaaaaatcaagtgcgtgcagtgcactgtgcaccatgctaagcactggagatagtgttgagtgagacaaatgtagtctctgcccccatagaacttacattctagtggagtgagacagacaccaagaagcaaacaatacgtaatgaacaagattacatcagagtgataaacactggaaagaatataaaataaggaggatgtgatgcagcatgactgggggtgggatgggtgggccagcactagatagggcagttagggaaatcttctggaggaggtaacatagaggttgacacttacaagtttaggaagagctggccacttgtatctctggggacacagtatgctagcatcaggaacaccaagggtaaaagctatgatgtaggtacgtgcagtgttggagaaacagtaagaaagctgaacagcagggagcctattggtgtgtcttggcccatgcacacctcagggagtagtcaagaccatgtaaaaattaatttgttggctgggtgtcacacctgtaatcccagcacttcaaaaggccaaggcaggaggattgcttgagcccaggagttcaagaccagcccgggcaacatagggacaccgtacgtctacaaagaataaaaaaaattagctgggcatggtgatgcacacctgtggtcccagctactcaggaggctgaggtaggaggatttcttgagcctgggagatcgaggctgcagtgagctgggatcataccactgcactccagcctgggtgacagaatgagaccctgtctcaaaaaaaataaaaaagcaatttgtcctctctgtatgcatattgagaattattacataagttgggtttttattagccacgtgaagtttgggtgataaaaatttgatttcctacgaaattgcagagtacgtgtttctggtaccctgagttgtgttgatgttcagtgctccctttactctctgtttggcttcaagattgaacggtgctagattttttcatgcggatatttttgcgtacctgtgactccacagaccagtgtgcttgtgtgcaggatttggtgggttcatggttgtttattaaacaaaactaatcctatatagaggttttattcgtttgctagggttgctgcaacaaagcaccacaagctgaatggcttgaacgacagaaatttattgtctcacctaaatcaaagtgtcagctgagttgatttgttttcttttcttttttttttttgagacggaatctcaccgtgtcacccagactggagtgtagtggcgcgatcttggctcactgcaacctccacctccggggttcaagcgattctcttgcctcagcctcctgagtagctgggattacaggtgtgtgccaccacgcccggctaatttttgaatttttgtagagacggggtttcaccatgtaggtcaggctggtctcgagctcctgacctcagctgatccacccgcctcggcctcccaaagtgctgggattacaggcgtgagccaccgcacccggccgggattggttccttctgaaggcataggaagaaatccgttatgcctcttgcctggctcctggtggttggcgggcagtctttggtgttccttggctctgctgtatttcttctgccttcatgtttgcgtgtgttctttgtacaggtgtggccttctccaaatttaccctttttataagaatctaagtcatgtcggaataggtcccaccccgctccagtatggcctcatcttaactaatgacaactgtaatgaacgaattaccaaatgagtcacgttctgcatgtttttgtcctcctgaaattcctatgttgaaacctgataaccaaggtagtgttaggagctgggtactttgagaggtgattgggattagtgcccccttgttcctcccaccatgggaggacacagcaagaaggtgccatctgtgaactagggccctcacctgactctgaacctgctggcatcttgatcttggaattccaggccttcagaactctgagaaatacatttctgttgtttatgggccacttaatttatgatatttttttaagctgcctgaactgtctaagacactttctgagcgactgagggttaggacttcaacacaggagtttaaaaaaggggttttccagcgctagacaaattctaaaagagctgtaacactcagcataggaattttacaatggggacgcagttcagttcataaaagaggtgcatataatttggctaaactcattgtctctcacaaatgaaaatacggacaatacctgcaaacattttgaagctgtttaacccattttttgctcagacacctggaagccacggccccttttttatttaataacatctggtgtgtactgagcattggtaggctcctctgtgataagatcttgaatgtgtcaccttgttgattcctcataagcaccctctggagtttgttctgtgagcagcctcacttgacagttgagggaactgaggcttagttccagaaagaaccttcagctcatcaccgcagccctagtttcagcatgatttttcttactgctagagttgatagaatagtcacagccactagcactggagcctgccctagccactaatagcacctccacgtaaaaggtttctcattgtgaggttagtttcttatcttcctaattctaccacctagtccattcaatgcctcccttgttctttatccctgagtttatgtaatatgcagcagtactgagaagattaattagttaatacttgtgaagcactttgaggatgaaaagctcatgaacacttaaagttaaattaaattttgcctcctggtgccaagaaataaacagtctttctccttcctggttggggtcagcatctccccttggcccgcaggagagtgtgttcccacagagagcaggctgtattgattgtctccccaagacgaaggtcggaatggctactaattctcttttgaactagattggattctgcaaacaattgaacagctgactctatgctaagtggaaatgtgattgatattgaaacagaattaaaatttcaacttctagggaattaaattgagtgcaacttcagaaatttggagatgaatgtccaagtggtttgaaaagcaattttcatgttccactaagtatattaatatcaaaagtgatattgatgtttgagaacattgggctgcagttgtttccttgtccttttcatttattgccattttgacctaaggtttgtgccaggaagttcagcttcactcctagtgaatctgagtggcgtaatgctggccccgtcttgctcattgattttcctggtagccaaatccctgtacaacgaactgtaacatatcctcaaatgaactgcataaaagtatgttggagatggagaggagatctataaattcagaggacaaataaatcaaaaagtgaatgacttgtaagaattcataagccaaattcagagccaatttggaaactgaacctcagatttttccagggctgtattcattccttcccctgttggatagatcttctaagagccaccctcaactcgtgagtctgataattgcttttcagatggacagttaccttaatgaactctgactttatgtatgagtagtagtttgttgcacaggagttgttttcccagaaggtattgacctttattccagtctctactatgagcaaacctctatctgttgaatcagctcctggaacctcagctctgaataaataaagagcttaaaggtaaggaataggtgggtcagttcagccaagtaaggccagatagaattagagttgagagccaggtcagagttgagagtggggagaaatagccaggactatttggcccaggaagcctgaatggggacacatgcacacacacacacacacacacacacacacacacacacactgaaacactctgcaaaaattgaggtgtttcccaggttcctaacctcctgaatgcaatgcagattctttcctccaccttcccttcattgttcccatacaactctggcctgtaatcagcccaacctgggcctgggccttggccactactagatattctgttggcaccaagagtagtcaggaccagttttccctctcttaatttcctcctcaggagagttgagtgtttatcatattctcttcttttcctctctctttctctgttcagcttaggcaatcttccattctgcagtctttctcctagctgtgtatcttgagaggtaatgcaatgtaggttaagactgcctgagttgaatcctggcagtgccacttatgacttgaatgacctcaagaaagacatttaatctctttacctcagtttccccatctgtaaaatggggataataatacctatttcagtggaatgttgtgagagttaaacaagttgatatgtggaaagctcgtagggtgtggtctgtaatgtgttcaattagcattaattgaagagaagtggagtctccccttcaattcttacctgagtaacactggacaatttcatactttgttgtcactatttttctttagctcttactcttttttatccattcctgtagcactagtgatcaggataaaagacgtgattgctaatagagtaataccttgttgaatttgtgtaatgttccaggttggaggggggatgataaagcctaagaagaccaagtccttttttcttgcaactttaaattgttgtaggaaaggagacatgttgataatggtttgcagtataacatggaacatgctagactccaagtcgaaactgagattagagataggcgaatgaagatgacagtcaaccacgtgcggtgggcttgggggctgaggtgggtcatggagggctttataggggaggtgacgcttgagctagttttttttggtttcttttttgagacggggtcttactctgccacccaggctggagtgcatgctgccatcttggctcactgcaacctcctcctgggctcaagtgatcctcccacctcagcctcacgagtagctgggactacaggcatgcgtcaccacacccagctaatttttttgtacttttagtagagatgggatttcaccatgttgtccaggctagtcttgaattcctgagctcaagcgatccacctgccctggacttccacagtgtgggggttacaggtgtgagccaccgtgccccaccttgagctagttcttaaaggtgtgagaggttcaatgatagacactatcaacactcccagtacgtcacgtaattaaggtgagagtgctgctcagtagatttatcaggtatgtggtcactgatttgaaatctatgccaaagtcggtgcagtgaggtggggatgggagagcctgaaggcgcagacctgagaagagaaggagattaagagtctgtgatttttacatagttgggccctggaggccagggtcattacatagagtttgtgttaaaactttctggtagctagtgatgttgttgtggagaacctcagaagacaaaattaaaaactttgatgggaactgagacaaagtaaaaactaggcatactctactgctgagatccttactgtcttttaggactgcatgctttcatctttttctattttaacttctcttttattcttctcccctttgctcactccacagagctttgctgaacacctattatgtgccagatgcaggggatcccaagttgggttaaggcattatttcttccctggagctaacctcacccaaaaggggaagatagttgtgtgaagaactaattgacagtgtgaagtgtggctggtaatatagggagctgtgtgggaggaggaggtgtgtctgggctaagaaggcagggatggcttcaagatcttgaaagtcttgccacatggatagatagtgaccaggtagacagaggcactccagcaaaggtaacgcagcctgcaaaatcaaggagatatggaagtccatagtttgagtaaggaatgagccatgttgtgtggctggaatagagggagccaggtgtcaggcggatatggttccagatgaggctgaaaatgttgatgagggctctatgagtgtattaggcttttcttgcattgctataaagaaataccactgagactgggcaatttataaagaaaagaggtttaattggctcacagttctgcagtctgtataagcatggtgctggcttgtgcttagcttttggggaggcctcagggaacttttagccatggtggaaggtatgtcacatggcaaaagcaggagcaagagaagaatggggaggggtcacacgctcttaaacgaccagatctctagagaactcactccatccatcacctcccaccaggccccacccctcacactgaggatcacatttcagcatgagatttgggtggagacaaatatccaaactctatgaatggggcaggttctttgatgctctcttcaaggcgcatggacttttatcttgtagaatccagggggatcccatgaaagttttttaagctggaaagtgacatcattaaatttgccttatttttattttaaagaaagttaattttggtgacagtgtggaagatgtgtttccttatatttggccatataaaatataaaatttgatttttaaaacattttaaaacagtttctagtattctaacagtataacagtatgtttagatttataaacaaaggacattttatgtttttataagtcaactcatttttatgactacgttttcaatggaaaaatgaatattgagcgtcaacaaacaaaacattgtgtgacaagcttgtgcattgctgattctctgtgttggcctcatccataaactaaagcctcttaaactcaaatctctgatgccttttagaaatgccttttactttctttttgtgtagtaagagggatcatggaacctatgatctaaaaactgggaagcaatgatgccatgtgtctgcaagcataggtaacacagctgttttagagatgtctttaaaagggtacatgagtgttttgatatttgagaacagatcttccagcttgtcatgggagttgcatagttttagaaatcagtccttaaccttaaactttgttcacattgaactctagaatagcagtggtttttgaagagcagttgttgaatgcatttatgcatatttaatttttttgaatggctattaaagacctaagacaattatattcaggtttcaaggaaagaacttcttgtgggagtttaacatttttaaattgttggttggtggagggctggtatttactgatattcttgagttaatgagtcccaactataatagccacaattgtgctgcccttcactttggagaattgcgtatttttacactcatactttgaggcttactatttcagtatagaaaacaaatatagttgctgaaaaaaaatgattagatttcaaactttatctgaggcaaatgtgaggtcattaattagacttctttcaaacttcttaagttcccgagcctcatgatattatcaaattaaaaggacagactattgaaatgttaatttcagttcatcatgaatgtttgcacttctcataaaatagccatttctgtgttaaaaatgtcttataatctgtgaatagcatttaagaaagcaatgtgaatgtgagtgtatttaaaatcatcctctaagtaatgcttttggaagccagtgtacagtctgacctaacaattacaagtagaccatgtaaccactcattgaagatgaatgatgtttttatgctacaagaattaaagactgtttcttaaaagaaaacaagagactgcttttttagtttttaaccacctgtacagcaaatcatgaataggagaatctgaatgcctgatagccttctgtattattttgcttatttatatatttattttacaataaactttaaaatgatatttaattctacagtagctgtggatagatcaaccacattctgtataatctagatttttcttaaagctcccttttcttgccctatcaattacttaccgtccatatttggccattttggggagccaagttgtccccacgtatcagtggtgataaatggatcagaagaaagttgatcaaatccaagtgtgtttttatatatgatgcatcagttatctttgacacatagcagttccaaaacctcaggcagacacaacaagaagtgcttttttgtacatgtgtctgtggtcacagaggttctgctgatcttgggtgagcttacccatgtgcctgagggttggcttgctgttggacagagtgaggtgactgaatgacttggctctgctccatctgtctctcattcttcagcagttgtggcaatgacagtggctctagagagctagccccgtgcacaagtccgtgaagcctttgtttgtgtcatatctgctgaccaaagcatgtctctttgggctgagtccaaagtcaaggggcagagccggcctgcccacctatggtaaattggcattacaaagtttcatgtcagagggcatggatacaaggaggagtgaagagctgggactaaatgatgcagttcactacataagatttagaatttttattgataacacgtaatttcacttctttttctttttttctcttctcttctcttccctttttttcttttgtttctttggaaagggtcttgctctgtcacccaagctggagtgcagtggcatgatcacagctaactgtagccttgacctctggggctcaagcaatcctcccgtcagtctcccgagtagctgggactacaggcacatgttaccacgcctggtttaagtttttaaaattttatgtagaactgctacattgcccaggctggtcttgaactcctgggctcaagcaatcctcctgcctgggcctcctaaagtgctgggattataggtgtgagccaccacacccggcctgatttcacttcttacctaccacacgtgttgtctcccttctttaggccttcatcagggaatatttgggggtaaagaacagaaacccactcaagttgcttgaagattaccataaacagaacagggaagctcacaggcctataaaaataggaaacctagaatgggcaggtctcaccagaactgggactgctagatgttagactttgagacccttctttcatctctgctcctctctgtttctccccctctgccccactccctactcttatgaccccttgtggccacatcaattttaattgtatgcagttgtgtggctcaagcacctactatgaatttagggatatgaattagacctcactgtctgagtctaattcatttccctaaatcctagctcatggattagttattcctgagtctacttgtgagtctcctagagctgagtgctcagtcttcatctctttctttactttgcttattgagcgggtccagccctatgacttgaaatgctgtcttgatgctgatgactcataagtttctgtcttcagcctagacttctcccttgaactccagactcacatatactacatcctactccacatgtccatttggatgtatctcataggcatctcaaacttacacccacatagaccacttgatttcctcctcataatttgcctctcccagtcttttctcagtaaatggcaatttcagttttccagttatttaaatgtcggaatcaaatccttggttaaatattcatactttaaaattatatgcatatattatagttctaatatagtatatatattataaaagaacgcaaatttgcaagcttcatgtgacactgattaagtaaactagatctttaatgtctggctaattaggatgcttcatatttttatttactaatatcacaagcataatagataatgtgagtttcattttttaaaaattgtggtaaaaacagataatacaaaatttaccattttaaccatttttaagtgtaaagttcaggagtgttaggcatattcacattgctgtgagacagatctccagaactttttcatcttgcagatctgaagttctgttcgcattaaacagtaagtccccttttcctgctcttcccagctgctagtaactaccattctacattctggtgtctatgaatttgactactttagatacctcatataactggagtcatattgtatttgtgtttttgtggctggcttatttcccatagcagaatgtcttaatagttgatcagtgttgtagcatgtaacatgatttccttcatttttaaggtgaaataatactccactgtatgtgtacaccatgtttggtttatccattcatttatcacggggcatctgggttgcctctaccttttgacgattgggattagtgctgctatgaccatgggcgtgcaaatctctttgagaccctgcttttaatttctttggctatataccagaaccggaattactagattatatagtagctctacttttgattttttgaggaaactccatactgttttccattacagttgtttcgttttataatctcgccaacagtgtacaagggttctaatttctccacatctatccaaaccttggagtctttttttggcttctctatttcatgccctaatctagtccctcagtaaatcctcttgacttatatttgaaatatatcctacatctgactgcttcccatctatcactgtcacctttttctgagtcaccattggctcttgtctggactatgatactagtcttctcactggtctcctggtctcaatccttgcccccctacagtctgatctccatagaacaaccagagtagtaatttaagaatataagctacatattgtcattcctctgcttaaaactttctaatgactcccatcacacactgaggataaaattcaaagttgtttccttggtttataatgtcttaaaaattctcattcctttgcttgcctggcttcagacacactggtttttgtacttgccttaaacacactaagattgtccctgcctcagggcctttgtcctcgatgtttcctccacctgggtgtctgtattcacagacatttgcccttcacagaggcctttccaaacagccttctcttaaaaaggtactcactgtcaactttttctattctcttaccgtactttcttttcctctgtgcacttgccactttctgacatcgtagtgtatttatttgtgactttcttatggctgttttccccaagagaatgtaaacaccatgaatacagggattctatctcagcatctgaaagaatgtctgatactgaaaagatgctcaataactatttgtggaatgagtgcgtaaaataatattttgtagccatgtgtttaagcagctttggccatggcgacagaggtgccccatgtacacatggcgccttaggtggaggtggttgcccaggaaaatgctgtaatctgtctaccatttctagccaatttctccagctagaaataatttatgggctattattgttcatgaggtctaagtgggaaagtatagatgccttatcttctttttttttttttcagcctcttattgaaaaaaaaattcagggattgatgggaattatttgcctctgcccttttggccccagatcatccttcctgagtcttggctgctccttattacctgcagtcacatttcctgttgtaatgtgagggcaatgcttcgtttgcacaatgaatgccagaaatggattttaaagcattataaagcaaagccagaaattcctcctgcaggggagatggtcggttgacaagtctgtgaattatataatagaatctcctcttactctccttgtaaaatataccaaaatatcaaaaaacaatgggcttttcttcccagtttgtttgggatcatactggcatcctcctgtattttggggctgtgggattagaatcatgtataacggctttgttttcccccggctaggtttgtgatgaagttgttctgatggaaacagtcagttaattctaaaggatctgcacacgcttgctgagcagagtacttctaccttaaatggtcttccatgctgtgggagagagctcctgatgcgtcagtcacagtgataatgtcatgggattggaacatcaattttgcctgttcccaccgcctcatggcctggagaagtctatttcagtcttactagtctgttagaagcaacagtaattaaaatggatctgcaggcttctggggtctttggataggtagccagaggtctatcaattgcaagagattcaaagatgattgcaaatgcagtgtgagggacactccctgaggccctcctagagtgcaagtgatgcttggctttttgtactggatggtgcttacacatgggtgtacgtttatgaaaattcaggttctctacttatgatttctgtacttttcttgcaaatatgttatattttagtgaaaaagactttcttaggaaaacaaaccaaccatagtttctacctgcaagaagatctcctggtggagatactcaaatagaagatcacacagtcaacttagtgccaagattaagcaaagcgtattatgggagcacaaataaaagagatcacactcatctttgggggaggatagaggaaaaccagagagaaggtttaaatgggatttatctatcatcttttcctggcttcctccatatagaataaggatttatatgaggaaaccagagtaaatgggttcaatcctgattctgtggtagcatgcttggaagttaaaatatgcttggaagataaaatattgccttaaaaagcagaaaatttattaaatatcatcaccctcagggagtttgttgatgattgtctctccagacctgtctcactgttggcatggataactagattgatgaatgactaagagctgaaacacaagactgtgtatttctcatcaatgtgttttgttattgtgaaatatttaatattattaagagctggcagtgaccctgtgttggaggagggtagggtgtgtttgtgtaagagcagtgagaaagtaatggctaaaaaaagttgatgtcttctttaaaaaaaaaaaaaaatgttgccagcagctggatgcagtgtctcatgcctgtaatcccagcactttgggaggctgaggcagaagcatcgcttgaggccaggagttcaagacaagcctgggcaatatagtgagacctcatctctacaaaaaataaaaaattatctaggcatggtgatgcatgcctgtagtcccagctacttgggtagttgagacaggaggatcgcttgggcccgggaggtcgaggctgcagtgagccatggtcatgccaccacactccagcctgggtggcagactgagatgctgtctcaaaaaaaaaaaaaaaagaaatgtggctggtgataagagatttatagtctaatgaggcacaaagtcgttttattgtttgttttctttataatgaatgaacaaaatcataataggcaataattaatataggaaacattgcaaggtggtataaaatgaatttctttactgttaagtacattgagctcatagaaggaactgatgaatagggaatggaactgctgggcgattggagttgttagagtagatagtacccaaattggtctttggacaaataggttggaaccagacctgaatgtgcataagaatatcttggtaacaagttaaaaatgtagattcctgggtccaacccccagattctgtgggtctgaggtgaggccttgggttatggatcttcacaaagaggtttaggtgtaggtggttcagacaataccatgagagataatgactaggagtcttggcagggagagagggcaggattggtggaaggcaaatgcttggaagcaaaaaaggatagcattcagtgaagaggcagactcattcctgagacagaaaaagaaaatttatctagaaacaataaatatgccaggcagctcctagcgttggacggactgatggcaaaacgggtcatggcaatggagcccgttatccgtggaatgctacaatctgtagctaatgtttttatttgcaggttccttcagaacgaagtcaatatttaaatgaaaatataattcttgaataatttgcactttaacatgtggaggctggaacataccttaaaggttattttcctattcaaccctgtcatttaagagaaaggaatgggaggtagtaattcatgagggatcagcggagatttggctgaagttcagagatttcctgaagggtcataaacacttatttgtttattcatcaaaacttattaagcacctcctctaaacacccagtcctgggctagaccccgggatcctgctgaaaagaagaaaatcaatacagccttgcctttgggagttgacagtctaatgaaggtgtcagttgtagaacaagtatgggaatttttcctacaatgaattgtgttccccacgctgccagttatatgtggtagagttgcattccacagacccccctactgaatacacttttattgaaatgagggccctgggcacatgatgacacacgatggcacaggacgagccacacggctctctgtgcagctgcagtgtttgaatggctttctagttggccctgagttctttcattgtatgcaatctgctgtgatttatttggatcgtgtacagcagtgctttttaaactttaatttgcaaggccatcacccagggctcttgttaaaaatacagattctgtaggtctagaataaaaactgaggtgccctgtattttcaccaaacttgcagggatgctgacgttgctagcaggcgaaccatgctgactagtgctagatgtctggagagagcagaagtcttttgggtcactgaagatctcctaaattgagatcaggttggtttttgttagtgttgatcaactgatttgtattttttcagcttatagccacaaggcctactatatatagtagcttataataacgaggtgcattataactacaataatacctttgctgttgaaatttgtccagaaaaacaactttatgatggaaagtcgtgtcctctgtaacctctaattcttttgtacgtcactgaaaaaaggataacattttggataaaacaaaatttcttgacttcgccaactgtcacaaaatagcagaacagactgtaattacaagtgtgacaaacgtgataaaggaaatgaggctagggctgtctagattggggtcctctaactgtagttatttggatagaggccatattggtttcttgttctgctctcccccacctcaatcttacattactgcataagttggcataggctggcacagaaaatcttgaaggatagttgcatttttacctgaagctcatccagcaaccagtgccagtgaaactgtgcattctatactcatcttgaaatattagcccttccagctcatagtttgtttatagcaagcaaaaagagaaaaaggattactttcagattgctataacgcttgacaccattgggctttttaaaggttgtaagtgaataaattgagctcttgtgtaggcatgtttctttttaaaaatggtttgatatgaggttaaaaactaaattatgtaagattctatagaaaacattttttttctgccactttttttattttttggtttctagagtgatctttttcctctcttttcttttgagtgacagtatcagagaatgcaaaaatcataggagggagcggttcggtttgacctgatggattaattgtgtataggcctctgcattcaaatgaggagttgtgtgtctgacaacaaagttgctattccaagttgctttgccagtgagaatttttattgtgtgtgtgtgtgtgtgcatatacatatatatagtgtgtgtgccagtgagaattgtggagctcataatgtcccacagccagaaggggctttagtgcttagcctgaccagctggtcctgtgttctgtgatgagcttcttcagtatttgagttaccattgttcatagagccacgtgctaagtgctcctccaaccaacgtttgtgtatgagatttaaacgtggttggcgcgctcatgattgccatactgagtttccaaggaacaatgaaggagggctagatgactgcacctctgaaagttgttcttattgttgatttttaatttattttggttttatcttgtgtgaacacacaacccttacactggtccatgtagacacatagcaaacgaagtaaacagtgagcttcacgttgtcattgagagagggggccccacagggtcaaggcatcttttgtttttttatcttgtcgttctgaggcttccaaaatactgagtagaacaaaaattccattgacccatgtgatattgctgattttgcttccaggcgaggctgttgtgacgtgaacattctgatacaaagaagcaccatttgggtattgacttaacgtagcaggctcagggtcaccttacctgggtctcagttccggccccatagctcatcagctgtgtgacattgagaagattacttaacctcttccagctgcaatttcttcttctaaaagatgtgtcgttgtgatgatgaaacgatattgtccagtacatgcatagtacctagaacgttgttactgctacattgtagcaatacgattgagcatttgctgatccctgtaaatattagttatgtaattttgatgataatttcttattaatatcaataaatatttctaaatacttgttactaaatggctgaatatgtatatatgtataacatatattatacagcttaaacattgaaaataatagattagaggaagtatgatatagattctgtaacctgatcaagagctatcttcatggaaattaattttctacctgcaggttaaataactctgaaattggtttctggctttgcttagagaaaggaaatattggttaatcaatcacaagttgagtgtatccatctttggtggtttccctttaaacaaaaagcctgttacggatcttgcttcctttccgtaggaaagttcattttagaaagtatattgagtcagggtttttgtttattttaatgatagagaattgaaaattggcattatcagatggcatgatgggttctttctggtgctgtttgaatcagggttagacagagactttgtgggactgttctccttcattgcattttctttatagttccatcccccaaagattccaggcatattatatctgtattgcacaattagatctaactgtattttgaatgttaaattcagccttaaaaaaaacctttattagccaggtgcggtggctcacgcctgtaatcccagcactttgggaggccgagacgggtggatcacgaagtcaggagatcgagaccatcctggctaacacggtgaaac

SEQ ID NO: 131 - DNA, 9517 bp, Homo sapiens
gttgctgtcggagagagaaagccgcacccgagaggaggtgtgggtgttccgcttccatcctaacggaacgagctccctcttcgcggacatgggattacccagcggctgctaacccctctcctcgccctgctcccccaaaccggcgtggctccccgggcaccaaggagctgactacagaggagcaggatttgcacccctcgctgggcttgctttggcaacagagtgcctgacccaggtcaggattttcaagaaagacatgtctgacaaaatgtctagcttcctacatattggagacatttgttctctgtacgcggagggatcgacaaatggatttattagcaccttgggcctggttgatgatcgttgtgttgtacagccagaaaccggggaccttaacaatccacctaagaaattcagagactgcctctttaagctatgtcccatgaaccgctactctgcccaaaagcagttctggaaagccgctaagcctggggccaacagcaccacagacgcagtgctactcaacaaactgcaccacgctgcagacttggaaaagaagcagaatgagacagaaaacaggaaattgctggggaccgtaatccagtatggcaatgtgatccagctcctgcatttgaaaagtaataaatacctaacagtgaataagaggcttcctgctctgttggagaagaatgccatgagagtcacattggacgaggctggaaatgaagggtcctggttttatattcagccattctacaagctgcgatccattggagacagcgtggtcataggtgacaaggtggttctgaaccccgtcaatgctggtcagcccctacatgctagcagccatcaactggtagataacccaggctgcaatgaggtcaattccgtcaactgcaatacaagctggaaaatagtccttttcatgaaatggagtgataacaaagacgacatattaaaggggggtgacgtggtgaggctgtttcatgctgagcaggagaagtttctcacctgtgacgaacacaggaagaagcagcacgtcttcctgagaaccacgggccggcagtcggccacatctgccaccagttcaaaagccctgtgggaggtggaggtggtccagcatgacccatgtcggggcggagcagggtattggaacagccttttccgtttcaagcatctggccacggggcattacttggcagcagaggtggaccctgatcaggacgcctctcgaagtaggttgcggaatgcccaagaaaagatggtatactccctggtctctgtgcctgaaggcaatgacatctcctccattttcgagctagatcccaccactctgcgtggaggtgacagccttgtcccaaggaactcttatgttcggctcagacacctatgtactaatacctgggttcacagcacaaatattcctattgacaaggaagaagaaaagcccgtgatgctgaaaattggcacctctcctgtgaaggaggataaggaagcatttgccatagttccggtttctcctgctgaagttcgggacctggactttgccaatgatgccagcaaggtgctgggctccattgctgggaagctagagaagggcaccatcacccagaatgaaaggaggtctgtaaccaagctgctagaagatttggtttacttcgtcactggtggaactaattctggtcaagatgttctcgaagttgtcttctccaagcccaacagagaacggcagaaactgatgagagaacagaatattctcaagcagatcttcaagttgttacaagccccattcacagactgcggtgatggcccaatgcttcggctggaagagctcggggaccagcggcacgctcctttcagacacatctgccggctctgctacagggtgctgagacactcgcagcaagactacaggaagaaccaggagtatatagccaagcagtttggcttcatgcagaagcagattggctatgatgtgttggctgaagacactatcactgccctgctccacaataatcggaaactcctggaaaaacacattaccgcggcagagattgacacatttgtcagcctggtgcgaaagaacagggagcccagattcttagattacctctccgacctctgtgtctccatgaacaaatcaattccagtgacccaggaactgatatgtaaagctgtgctgaaccccaccaacgctgacatcctgattgagaccaaattggttctttctcgttttgaatttgaaggtgtctcttccactggagagaatgctctggaggcaggagaagacgaggaagaggtgtggctgttttggagggacagcaacaaagagattcgcagcaagagtgtgagggaattggctcaggatgctaaagaagggcagaaggaggaccgagacgttctcagctactacagatatcagctgaacctctttgcgaggatgtgtctggaccgccaatacctggccatcaacgaaatctcaggccagctggatgtcgatctcattctccgctgcatgtctgacgagaacctgccctatgacctcagggcgtccttctgccgcctcatgcttcacatgcatgtggaccgagatccccaggaacaagtcacccccgtgaaatatgcccgcctctggtcggagattccctcggagatcgccattgacgactatgatagtagtggagcttccaaagatgaaattaaggagagatttgctcagaccatggagtttgtggaggagtatttaagagatgtggtttgtcagaggttccctttctctgataaagagaagaataagcttacgtttgaggttgtaaatttagctaggaatctcatatactttggtttctacaacttctctgaccttctccgattaactaagatccttctggccatattggactgtgtacatgtgacaacaatcttccccattagcaagatggcgaaaggagaagagaataaaggcagtaacgtgatgagatctattcatggcgtgggagagctgatgacccaggtggtgctccggggaggaggctttttgcccatgactcccatggctgctgcccctgaaggcaatgtgaagcaggcagagcctgagaaggaggacatcatggtcatggacaccaagctgaagatcattgagatactccagtttattttgaatgtgaggttggattataggatctcctgcctcctgtgtatatttaagcgagagtttgatgaaagcaattcccagacttcagaaacatcctccggaaacagcagccaagaagggccaagtaatgtaccaggtgctcttgactttgaacacattgaagaacaagcagaaggcatctttggaggaagtgaggagaacaccccactggacttggatgaccacggcggcagaacctttctccgtgtcctgctccacttgacgatgcatgactacccacccctggtgtcaggggccctgcagctcctcttccggcacttcagccagaggcaggaggtgctccaggccttcaaacaggttcaactgctggttaccagccaagatgtggacaactacaaacagatcaaacaagacttggatcaactgaggtccatcgtggaaaagtcagagctttgggtgtacaaagggcagggccccgatgagactatggatggtgcatctggagaaaatgaacataagaaaacggaggagggaaataacaagccacaaaagcatgaaagcaccagcagctacaactacagagtggtcaaagagattttgattcggcttagcaaactctgtgttcaagagagtgcctcagtgagaaagagcaggaagcagcaacagcgtctgctccggaacatgggcgcgcacgccgtggtgctggagctgctgcagattccctatgagaaggccgaagataccaagatgcaagagataatgaggttggctcatgaatttttgcagaatttctgcgcaggcaaccagcagaatcaagctttgctacataaacacataaacctgtttctcaacccagggatcctggaggcagtaaccatgcagcacatcttcatgaacaatttccagctttgcagtgagatcaacgagagagttgttcagcacttcgttcactgcatagagactcacggtcggaatgtccagtatataaagttcttacagacaattgtcaaggcagaagggaaatttattaaaaaatgccaagacatggttatggccgagctggtcaattcgggagaggatgtcctcgtgttctacaacgacagagcctctttccagactctgatccagatgatgcggtcagaacgggatcggatggatgagaacagccctctcatgtaccacatccacttggtcgagctcctggctgtgtgcacggagggtaagaatgtctacacagagatcaagtgcaactccctgctcccgctggatgacatcgttcgcgtggtgacccacgaggactgcatccctgaggttaaaattgcatacattaacttcctgaatcactgctatgtggatacagaggtggaaatgaaggagatttataccagcaatcacatgtggaaattgtttgagaatttccttgtagacatctgcagggcctgtaacaacactagtgacaggaaacatgcagactcgattttggagaagtatgtcaccgaaatcgtcatgagtattgttactactttcttcagctctcccttctcagaccagagtacgactttgcagactcgccagcctgtctttgtgcaactgctgcaaggcgtgttcagggtttaccactgcaactggttaatgccaagccaaaaagcctccgtggagagctgtattcgggtgctgtctgatgtagccaagagccgggccattgccattcccgtggacctggacagccaagtcaacaacctctttctcaagtcccacagcattgtgcagaaaacagccatgaactggcggctctcagcccgcaatgccgcacgcagggactctgttctggcagcttccagagactaccggaatatcattgagagattgcaggacatcgtctccgcgctggaggaccgtctcaggcccctggtgcaggcagagttatctgtgctcgtggatgttctccacagacccgagctgcttttcccagagaacacagacgccagaaggaaatgtgaaagtggcggtttcatttgcaagttaataaagcatacaaaacagctgctagaagaaaatgaagagaagctctgcattaaggtcctacagaccctgagggaaatgatgaccaaagatagaggctatggagaaaagggtgaggcgctcaggcaagttctggtcaaccgttactatggaaacgtcagaccttcgggacgaagagagagccttaccagctttggcaatggcccactgtcagcaggaggacccggcaagcccgggggaggagggggaggttccggatccagctctatgagcaggggtgagatgagtctggccgaggttcagtgtcaccttgacaaggagggggcttccaatctagttatcgacctcatcatgaacgcatccagtgaccgagtgttccatgaaagcattctcctggccattgcccttctggaaggaggcaacaccaccatccagcactcctttttctgtcgcttgacagaagataagaagtcagagaaattctttaaggtgttttatgaccggatgaaggtggcccagcaagaaatcaaagcaacagtgacagtgaacaccagtgacttgggaaataaaaagaaagacgatgaggtagacagggatgccccatcacggaaaaaagctaaagagcccacaacacagataacagaagaggtccgggatcagctcctggaggcctccgctgccaccaggaaagccttcaccactttcaggagggaggctgatcccgacgaccactaccagcctggagagggcacccaggccactgccgacaaggccaaggacgacctggagatgagcgcggtcatcaccatcatgcagcccatcctccgcttccttcagctcctgtgtgaaaaccacaaccgagacctgcagaacttcctccgttgccaaaataacaagaccaactacaatttggtatgtgagaccctgcagtttctggactgtatttgtggaagcacaactggaggccttggtcttctgggcttgtatataaatgaaaagaacgtagcgcttatcaaccaaaccctggaaagtctgaccgaatactgtcaaggaccttgccatgagaaccagaactgcatagccacccatgaatccaatggcattgacatcatcacagccctgatcctcaatgatatcaatcctttgggaaagaagaggatggaccttgtgttagaactgaagaacaatgcctcgaagttgctcctggccatcatggaaagcaggcacgacagtgaaaacgcagagaggatactttataacatgaggcccaaggaactggtggaagtgatcaagaaagcctacatgcaaggtgaagtggaatttgaggatggagaaaacggtgaggatggggcggcgtcccccaggaacgtggggcacaacatctacatattagcccatcagttggctcggcataacaaagaacttcagagcatgctgaaacctggtggccaagtggacggagatgaagccctggagttttatgccaagcacacggcgcagatagagattgtcagattagaccgaacaatggaacagatagtctttcccgtgcccagcatatgtgaattcctaaccaaggagtcaaaactacgaatttactatactacagagagagacgaacaaggcagcaaaatcaatgatttctttctgcggtctgaagacctcttcaatgaaatgaattggcagaagaaactgagagcccagcccgtgttgtactggtgtgcccgcaacatgtctttctggagcagcatttcgtttaacctggccgtcctgatgaacctgctggtggcgtttttctacccgtttaagggagtccgaggaggaaccctggagccccactggtcgggactcctgtggacagccatgctcatctctctggccatcgtcattgccctccccaagccccatggcatccgggccttaattgcctccacaattctacgactgatattttcagtcgggttacaacccacgttgtttcttctgggcgctttcaatgtatgcaataaaatcatctttctaatgagctttgtgggcaactgtgggacattcacaagaggctaccgagccatggttctggatgttgagttcctctatcatttgttgtatctggtgatctgtgccatggggctctttgtccatgaattcttctacagtctgctgctttttgatttagtgtacagagaagagactttgcttaatgtcattaaaagtgtcactcgcaatggacggtccatcatcctgacagcagttctggctctgatcctcgtttacctgttctcaatagtgggctatcttttcttcaaggatgactttatcttggaagtagataggctgcccaatgaaacagctgttccagaaaccggcgagagtttggcaagcgagttcctgttctccgatgtgtgtagggtggagagtggggagaactgctcctctcctgcacccagagaagagctggtccctgcagaagagacggaacaggataaagagcacacatgtgagacgctgctgatgtgcattgtcaccgtgctgagtcacgggctgcggagcgggggtggagtaggagatgtactcaggaaaccgtccaaagaggaacccctgtttgctgctagagttatttatgacctcttgttcttcttcatggtcatcatcattgttcttaacctgatttttggggttatcattgacacttttgctgacctgaggagtgagaagcagaagaaggaagagatcttgaagaccacgtgctttatctgtggcttggaaagagacaagtttgacaacaagactgtcacctttgaagagcacatcaaggaagaacacaacatgtggcactatctgtgcttcatcgtcctggtgaaagtaaaggactccaccgaatatactgggcctgagagttacgtggcagaaatgatcaaggaaagaaaccttgactggttccccaggatgagagccatgtcattggtcagcagtgattctgaaggagaacagaatgagctgagaaacctgcaggagaagctggagtccaccatgaaacttgtcacgaacctttctggccagctgtcggaattaaaggatcagatgacagaacaaaggaagcagaaacaaagaattggtcttctaggacatcctcctcacatgaatgtcaacccacaacaaccagcataagcaaatgaaagaaaggaattgtatttaccttttataattattattagtgtgggtatggctaatgagttctgattcacccacgaaggttacatttatgctgaatacatttgtaaatactcagttttatactgtatgtatatgattgctactctaaaggtttggatatatgtattgtaattagaattgttggcatgatgacatttcatttgtgccaaaaatattaaaaatgccttttttggaaggactaacagaaagcacctgatttgcacttgaaccagattatagatttaaaagtatatgacatgtattttgtatttaaaactagaatagccagtatttatgttttttataaaactgtgcaatacgaattatgcaatcacaatacatttgtagctcccgagtgtcctaaagggagtgcacttctttgaagctggtgtgttaatactatgtaataaatggttaactttcaaatgatgctgctgccaaaattatattaatagtgagtttcaggcccctgggcattttgtaccatgtaattatcctctggtgatgctgtttctcgttagtggcagtagtgcctccgtctcctagtgataatgctccaagtctatgaactgttaaatcagcattcattttaagaaaagcaactttagtttcaaagatacttttaagcttctaaattgatcatttaaactatttctttaaataagagagccaaattagaggctcatactttagcttgtgaagaagataatgaattttttaaagggaactttctatgcaatgttcaggataaatcgatactgctggccaatcagtgtcatctcctgggtaaattttgatgtcgcattataaagacatgcataattgatggtttctagattatctagtccaaacaatagagtttattttttcttcatctgaaccaacatgctacagtagctaagaagtattaaaactatatacatccatataaagatgaaatatgaactatctcattagaagtcatagttgaccacagacatgttattcttctgaaagagccacattttggttttatttcttgtcacatgatttcttttcttgatggatgaaaaatatgaaatgaaatcttttatatctgttgcctagttttgtacatggatctcattttacaagagaatctctctgcta

SEQ ID NO: 132 - DNA, 8088 bp, Homo sapiens
atgtctgacaaaatgtctagcttcctacatattggagacatttgttctctgtacgcggagggatcgacaaatggatttattagcaccttgggcctggttgatgatcgttgtgttgtacagccagaaaccggggaccttaacaatccacctaagaaattcagagactgcctctttaagctatgtcccatgaaccgctactctgcccaaaagcagttctggaaagccgctaagcctggggccaacagcaccacagacgcagtgctactcaacaaactgcaccacgctgcagacttggaaaagaagcagaatgagacagaaaacaggaaattgctggggaccgtaatccagtatggcaatgtgatccagctcctgcatttgaaaagtaataaatacctaacagtgaataagaggcttcctgctctgttggagaagaatgccatgagagtcacattggacgaggctggaaatgaagggtcctggttttatattcagccattctacaagctgcgatccattggagacagcgtggtcataggtgacaaggtggttctgaaccccgtcaatgctggtcagcccctacatgctagcagccatcaactggtagataacccaggctgcaatgaggtcaattccgtcaactgcaatacaagctggaaaatagtccttttcatgaaatggagtgataacaaagacgacatattaaaggggggtgacgtggtgaggctgtttcatgctgagcaggagaagtttctcacctgtgacgaacacaggaagaagcagcacgtcttcctgagaaccacgggccggcagtcggccacatctgccaccagttcaaaagccctgtgggaggtggaggtggtccagcatgacccatgtcggggcggagcagggtattggaacagccttttccgtttcaagcatctggccacggggcattacttggcagcagaggtggaccctgatcaggacgcctctcgaagtaggttgcggaatgcccaagaaaagatggtatactccctggtctctgtgcctgaaggcaatgacatctcctccattttcgagctagatcccaccactctgcgtggaggtgacagccttgtcccaaggaactcttatgttcggctcagacacctatgtactaatacctgggttcacagcacaaatattcctattgacaaggaagaagaaaagcccgtgatgctgaaaattggcacctctcctgtgaaggaggataaggaagcatttgccatagttccggtttctcctgctgaagttcgggacctggactttgccaatgatgccagcaaggtgctgggctccattgctgggaagctagagaagggcaccatcacccagaatgaaaggaggtctgtaaccaagctgctagaagatttggtttacttcgtcactggtggaactaattctggtcaagatgttctcgaagttgtcttctccaagcccaacagagaacggcagaaactgatgagagaacagaatattctcaagcagatcttcaagttgttacaagccccattcacagactgcggtgatggcccaatgcttcggctggaagagctcggggaccagcggcacgctcctttcagacacatctgccggctctgctacagggtgctgagacactcgcagcaagactacaggaagaaccaggagtatatagccaagcagtttggcttcatgcagaagcagattggctatgatgtgttggctgaagacactatcactgccctgctccacaataatcggaaactcctggaaaaacacattaccgcggcagagattgacacatttgtcagcctggtgcgaaagaacagggagcccagattcttagattacctctccgacctctgtgtctccatgaacaaatcaattccagtgacccaggaactgatatgtaaagctgtgctgaaccccaccaacgctgacatcctgattgagaccaaattggttctttctcgttttgaatttgaaggtgtctcttccactggagagaatgctctggaggcaggagaagacgaggaagaggtgtggctgttttggagggacagcaacaaagagattcgcagcaagagtgtgagggaattggctcaggatgctaaagaagggcagaaggaggaccgagacgttctcagctactacagatatcagctgaacctctttgcgaggatgtgtctggaccgccaatacctggccatcaacgaaatctcaggccagctggatgtcgatctcattctccgctgcatgtctgacgagaacctgccctatgacctcagggcgtccttctgccgcctcatgcttcacatgcatgtggaccgagatccccaggaacaagtcacccccgtgaaatatgcccgcctctggtcggagattccctcggagatcgccattgacgactatgatagtagtggagcttccaaagatgaaattaaggagagatttgctcagaccatggagtttgtggaggagtatttaagagatgtggtttgtcagaggttccctttctctgataaagagaagaataagcttacgtttgaggttgtaaatttagctaggaatctcatatactttggtttctacaacttctctgaccttctccgattaactaagatccttctggccatattggactgtgtacatgtgacaacaatcttccccattagcaagatggcgaaaggagaagagaataaaggcagtaacgtgatgagatctattcatggcgtgggagagctgatgacccaggtggtgctccggggaggaggctttttgcccatgactcccatggctgctgcccctgaaggcaatgtgaagcaggcagagcctgagaaggaggacatcatggtcatggacaccaagctgaagatcattgagatactccagtttattttgaatgtgaggttggattataggatctcctgcctcctgtgtatatttaagcgagagtttgatgaaagcaattcccagacttcagaaacatcctccggaaacagcagccaagaagggccaagtaatgtaccaggtgctcttgactttgaacacattgaagaacaagcagaaggcatctttggaggaagtgaggagaacaccccactggacttggatgaccacggcggcagaacctttctccgtgtcctgctccacttgacgatgcatgactacccacccctggtgtcaggggccctgcagctcctcttccggcacttcagccagaggcaggaggtgctccaggccttcaaacaggttcaactgctggttaccagccaagatgtggacaactacaaacagatcaaacaagacttggatcaactgaggtccatcgtggaaaagtcagagctttgggtgtacaaagggcagggccccgatgagactatggatggtgcatctggagaaaatgaacataagaaaacggaggagggaaataacaagccacaaaagcatgaaagcaccagcagctacaactacagagtggtcaaagagattttgattcggcttagcaaactctgtgttcaagagagtgcctcagtgagaaagagcaggaagcagcaacagcgtctgctccggaacatgggcgcgcacgccgtggtgctggagctgctgcagattccctatgagaaggccgaagataccaagatgcaagagataatgaggttggctcatgaatttttgcagaatttctgcgcaggcaaccagcagaatcaagctttgctacataaacacataaacctgtttctcaacccagggatcctggaggcagtaaccatgcagcacatcttcatgaacaatttccagctttgcagtgagatcaacgagagagttgttcagcacttcgttcactgcatagagactcacggtcggaatgtccagtatataaagttcttacagacaattgtcaaggcagaagggaaatttattaaaaaatgccaagacatggttatggccgagctggtcaattcgggagaggatgtcctcgtgttctacaacgacagagcctctttccagactctgatccagatgatgcggtcagaacgggatcggatggatgagaacagccctctcatgtaccacatccacttggtcgagctcctggctgtgtgcacggagggtaagaatgtctacacagagatcaagtgcaactccctgctcccgctggatgacatcgttcgcgtggtgacccacgaggactgcatccctgaggttaaaattgcatacattaacttcctgaatcactgctatgtggatacagaggtggaaatgaaggagatttataccagcaatcacatgtggaaattgtttgagaatttccttgtagacatctgcagggcctgtaacaacactagtgacaggaaacatgcagactcgattttggagaagtatgtcaccgaaatcgtcatgagtattgttactactttcttcagctctcccttctcagaccagagtacgactttgcagactcgccagcctgtctttgtgcaactgctgcaaggcgtgttcagggtttaccactgcaactggttaatgccaagccaaaaagcctccgtggagagctgtattcgggtgctgtctgatgtagccaagagccgggccattgccattcccgtggacctggacagccaagtcaacaacctctttctcaagtcccacagcattgtgcagaaaacagccatgaactggcggctctcagcccgcaatgccgcacgcagggactctgttctggcagcttccagagactaccggaatatcattgagagattgcaggacatcgtctccgcgctggaggaccgtctcaggcccctggtgcaggcagagttatctgtgctcgtggatgttctccacagacccgagctgcttttcccagagaacacagacgccagaaggaaatgtgaaagtggcggtttcatttgcaagttaataaagcatacaaaacagctgctagaagaaaatgaagagaagctctgcattaaggtcctacagaccctgagggaaatgatgaccaaagatagaggctatggagaaaagggtgaggcgctcaggcaagttctggtcaaccgttactatggaaacgtcagaccttcgggacgaagagagagccttaccagctttggcaatggcccactgtcagcaggaggacccggcaagcccgggggaggagggggaggttccggatccagctctatgagcaggggtgagatgagtctggccgaggttcagtgtcaccttgacaaggagggggcttccaatctagttatcgacctcatcatgaacgcatccagtgaccgagtgttccatgaaagcattctcctggccattgcccttctggaaggaggcaacaccaccatccagcactcctttttctgtcgcttgacagaagataagaagtcagagaaattctttaaggtgttttatgaccggatgaaggtggcccagcaagaaatcaaagcaacagtgacagtgaacaccagtgacttgggaaataaaaagaaagacgatgaggtagacagggatgccccatcacggaaaaaagctaaagagcccacaacacagataacagaagaggtccgggatcagctcctggaggcctccgctgccaccaggaaagccttcaccactttcaggagggaggctgatcccgacgaccactaccagcctggagagggcacccaggccactgccgacaaggccaaggacgacctggagatgagcgcggtcatcaccatcatgcagcccatcctccgcttccttcagctcctgtgtgaaaaccacaaccgagacctgcagaacttcctccgttgccaaaataacaagaccaactacaatttggtatgtgagaccctgcagtttctggactgtatttgtggaagcacaactggaggccttggtcttctgggcttgtatataaatgaaaagaacgtagcgcttatcaaccaaaccctggaaagtctgaccgaatactgtcaaggaccttgccatgagaaccagaactgcatagccacccatgaatccaatggcattgacatcatcacagccctgatcctcaatgatatcaatcctttgggaaagaagaggatggaccttgtgttagaactgaagaacaatgcctcgaagttgctcctggccatcatggaaagcaggcacgacagtgaaaacgcagagaggatactttataacatgaggcccaaggaactggtggaagtgatcaagaaagcctacatgcaaggtgaagtggaatttgaggatggagaaaacggtgaggatggggcggcgtcccccaggaacgtggggcacaacatctacatattagcccatcagttggctcggcataacaaagaacttcagagcatgctgaaacctggtggccaagtggacggagatgaagccctggagttttatgccaagcacacggcgcagatagagattgtcagattagaccgaacaatggaacagatagtctttcccgtgcccagcatatgtgaattcctaaccaaggagtcaaaactacgaatttactatactacagagagagacgaacaaggcagcaaaatcaatgatttctttctgcggtctgaagacctcttcaatgaaatgaattggcagaagaaactgagagcccagcccgtgttgtactggtgtgcccgcaacatgtctttctggagcagcatttcgtttaacctggccgtcctgatgaacctgctggtggcgtttttctacccgtttaagggagtccgaggaggaaccctggagccccactggtcgggactcctgtggacagccatgctcatctctctggccatcgtcattgccctccccaagccccatggcatccgggccttaattgcctccacaattctacgactgatattttcagtcgggttacaacccacgttgtttcttctgggcgctttcaatgtatgcaataaaatcatctttctaatgagctttgtgggcaactgtgggacattcacaagaggctaccgagccatggttctggatgttgagttcctctatcatttgttgtatctggtgatctgtgccatggggctctttgtccatgaattcttctacagtctgctgctttttgatttagtgtacagagaagagactttgcttaatgtcattaaaagtgtcactcgcaatggacggtccatcatcctgacagcagttctggctctgatcctcgtttacctgttctcaatagtgggctatcttttcttcaaggatgactttatcttggaagtagataggctgcccaatgaaacagctgttccagaaaccggcgagagtttggcaagcgagttcctgttctccgatgtgtgtagggtggagagtggggagaactgctcctctcctgcacccagagaagagctggtccctgcagaagagacggaacaggataaagagcacacatgtgagacgctgctgatgtgcattgtcaccgtgctgagtcacgggctgcggagcgggggtggagtaggagatgtactcaggaaaccgtccaaagaggaacccctgtttgctgctagagttatttatgacctcttgttcttcttcatggtcatcatcattgttcttaacctgatttttggggttatcattgacacttttgctgacctgaggagtgagaagcagaagaaggaagagatcttgaagaccacgtgctttatctgtggcttggaaagagacaagtttgacaacaagactgtcacctttgaagagcacatcaaggaagaacacaacatgtggcactatctgtgcttcatcgtcctggtgaaagtaaaggactccaccgaatatactgggcctgagagttacgtggcagaaatgatcaaggaaagaaaccttgactggttccccaggatgagagccatgtcattggtcagcagtgattctgaaggagaacagaatgagctgagaaacctgcaggagaagctggagtccaccatgaaacttgtcacgaacctttctggccagctgtcggaattaaaggatcagatgacagaacaaaggaagcagaaacaaagaattggtcttctaggacatcctcctcacatgaatgtcaacccacaacaaccagcataa

SEQ ID NO: 133 - DNA, 35658 bp, Mus musculus
  misc_feature (11014)..(11033): "n" at positions 11014 through 11033 can be any base.
  misc_feature (16841)..(17468): "n" at positions 16841 through 17468 can be any base.
  misc_feature (34295)..(34632): "n" at positions 34295 through 34632 can be any base.
  misc_feature (35541)..(35658): "n" at positions 35541 through 35658 can be any base.
aacatggattttggatttcttaggagaacttagaagaatcagacaagatgagcatgcagctgtttcctggtgtcagaaagccgctgtggtctttgcatatttcgtcctctgcattttgccttaattgctaccaaatgcttattacagagtcctgtaatactgagcatgtaaggccagatgagtcaggtcaattaatctgatttgcttaaaactcattagtccgaactaatagttttctttctcttgcagcaaagaaatttgttcctgctaggtaaggtgaattcttgtgtaaagcatgctatttaatacatacattttcccctctgcatgtaggaaagcagtgattcacgtcctttccttgtgtttccacagcagctgccaaagccttcaatcgtttgaaaactaccatgtgccttcttacaacgtctaggttcaaaacaatcaggtatgacttgggcaggtcatgtgaatgagagaaaaatctctcttacacatagtgctcctccttgacaccctcaatcaagcctgccattggcttgagagaatccccatcttgatgataatttatagaaacttgtttctttctctccctctccctcccgccttctccctctccctccctccttctccttctgtctccctccctccttctccttctccccctcccttctctctctctctctctctctctctctctctctctctctctctctctctctctctctctctttcgctctccccccccctctgtaagtgaagcagcagacgttggtcttccttggatcattttacttagggatggtggtggtggtggtggtggtaagtctagacccatttagcaattagatttgtaagcatgaatctaagctagggactgggagagaccaggcctcttcctttattcctctgagataaagaactggggcacagactttataggaacttgcctgagtttccaaagctaccgtgaacaccagcagtagcaggatctggaatctgtgatcctcagtgtccccattgcttctgagagtttgcttgggaggtcaagtccttctaaataaagggttttcttgatgaagagaattgctggtgtagtgtggggcttagagaaggattgaacagaaactagatgtttcaatttgcctcttcggctcccttcccttgagtttcttcattagcatagtccttggtgatgaccaatatagttgaacagtacttagttaaagcccaaggtgcaccagagttcattctttgggttgtatattccgtagggttcaatgggtataactgacctatatctacgattacagtgtcatagagactagtaactgagtggcattgggagttcatgtctggagcacctccgagacagctgctagctgatgggtgtgctttgttgctgcttccagcatgcaggagacttggaagactctcacacttgcttgtatttgcaggaacacaaatgcatcgtgggaaatagaatgataagctgaagacagcaggaaatgaactgtctacagaatcctggttcctcttgcctgcttaaaaactgggatcccgactccatggatcaaaactgagtgacaaggccagccctctactagaatgactcagtttcctctttcctagttagtgacagtatgaagaacatgctgccacagaaggtggaggtgctctcttcaaaagagagtgaatggacgggggagagcgcgagctggaatagcagaatccattctgactcttagtcatgctagaatttgggaacagaaacagcgttttattgctttgtttctttctcttgttccccacacagtgtgtcaacagctaattccagtattgttgtcacaggcgtaaataatatttatcagcagttttgagcaaatgattttctatttctatcttgaaaaacaaaaaaggcagaattgccatattctcaggttatggcctaggagtgtcattacgggtacaaggtgcagttcctggtgaatataacatgttaagactgctaggcagacatattggctttatccccatgggattcagtggctgccgaagtattcttgaacattgtgttctgtgtcctggcactgaagccagcatgagatccatcattcttatgtcagctcaagggtcaaaaggacttaaaaaaaaatcagaatcctgtggcctatcacatggcaaaagttatcctaaatcttttttttaattagaaaatccctaaatctaaaattaatgttatatctgcagcccacttattttcaaaatgagaaattaataatcagtgtgaaatcctgagtatttaacggtagctggttttaagacatggtactatcagaagaatagaaagtgaagagagagtttagatatttgatccccccctgccctgccaaggtttttttttttctggaagagagaccatccttgaagctaaatgttctgatttaataaaagcataaatgataaaaagtacattttaatgtatttaagagcatgtcaaaatgtgaacatgctgtgattcctaaaagagtggttcttttacacgacaaacacgtgattcttataccttgtatctaattctaaatccacgatgaggtgtcaccctgtaatcaatgcagacaatggacttttaaagagtaaaggtgtccagtggttattctagttcatatgttctagaggaggggaaagctggtgaacacagtgattatgttatgttacagagaataaaactcctaagcaatttcatctgcaactggcaatgacatacacttggtctgtaaatgccagctctgttcctgccaaaagtgtcccaagttccaaattaacatattagagaaagaaaatttttgggaggtcctcgctgattggtggcggtggaaaagccaacagggaacaggaagtgtgataggcattaggatgagagaggagtgacagagagagagagagagagagagagagagagagagagagagagactgtgagaaactgcacaatgtaaatggttgtatattttgtatcagaaattactgtgtgaaatataagtgtggtctgtatctaagtcctgattgagtattttaaattatgatttaaaatattttatggtgtaagagtatgtatttatttaaatatgttaaacttattgtattcacatatgagtataatgttttgcaataaacgcgtttctacttatctttgtgtatctgagtcttcttaacattttaatgcatccagattaaaatctgtaccgcataaaaattacatcctaattaattaattgtgtgcacatgtgcttgcgtgcatctgaattgtcactgtgaatgtgtggaaatcgaaggacagctttgaggggtcagctctctctttacacaccacgggcttgcgtggcaagtgccttgacccaaacctccctcttttaaaatggaatatcaggcaaccatatacctaactctgcaacatttctattggcgtaagtgaaaccctgtcagttagcggttccttcacactcttttctctcccctccatggcaatgctaatctacattatgtatatggatttgcctcttcagcacactttatatacataaaagtgcacatgaccttcttcctagctctttttacttagcacactgttttctagggttctccatggtgtagcttgtatcagctcttcatcccacttacggaaaaattatattctctgtgctgattgaccagatattgtatctggaccactcaggccattgtcactgaatgtctttccgccttttgattactgtgaatgacgctgctagggaagccctgagggtgtggttaaggtgcaactcctccactgtcattatctggaggcaggtaacttaggaatcctgctctgcttttagagaaaccttccagctctctcccagtgaggctgctccattttacagtcacacctgccatgagaagggctccagtgtctccacattctagcttatacttacagtggtctcttgatgacatcaacactctagtgggtgtggaattatatacatctaggctcttgtatccattccaaaagataaccaaacattgactatctaaaagaatcaccaagcccaaggaaacaaagtctttgctgcatgacagtctcatttgctgtaattttaaaaagttcatgttcatttagttcattgggttcactgaagtttgaattatcccatcttagttagggtttcattgctgtgaagaaacaccatgatcaaggcaacttcttcctttttttttttttttttttttggtttttcgagacagggtttctctgtgtagccctgactgtcctggaactcactttgtagaccaggctggctcgaactcagaaatccgcctgcctctgcctcccaaatgctgggattaaaggcgtgcaccaccacacccggcaaaggacaacatttaactgggtccagcttacaattttagaggttcagtccattatggaggaagcatggcaatgttcaagcagacatgatgctagagaaggatgctgggagttctacatcttgattcaaaggcatccagaaggaagggtctcttccacactgggtagagcttgagcatacgacctcaaagtctacccccacagtgacacacttcttccaacaagactacacctattccaacaaggccacccctattccaacaaggccactcctcccaatagtgctacctaccgtgggccaagcatatccaaaccaccaaatcccccaagactagattcatataatgaggttcttcgttaccagtatatacattcttgctgctattgcaaaggcctacaatgtaggcctgtgggcagacgtgatctaatttgttatcattctgagctagggcatacgtttaacagtggtctaggatgctgatattcctgattcttacgctgtgaatcctgagctgaattgcatcactaagtctcctggtccttcacttgcatacatacttcctgtttttcagaaagcccagtcattgtttcagcctcctaagttattgacggagctgttacacccatgaacttacatgacaaacaccatgacatgtatgtgccaacacacacacacacacacacacacacacacacacacacacacacaaaaatataaaatagtaataacaataacaacactacaagttagcaggtcatattaattacctttgaaagtctaaaatactacagagataggcatggttatctgaatgagttcaagccagaaagaccagtaaacattccaacaagcaagactacttagactccatagattataaagaagcaagcaagcatgtgaagttgggggatatgttggtgagtttccagggaatgacaagcagtgggagatgggggtggattaagcaccaaggaactatgaaattacttaagaacaaatacattaaaaaatgagactagtaatagttactcctctgtagcattttagactttcttttttattattattattattttgttttgttttaggtttttttttccccccgagacaaggtttctctgtatagctctggttatcctgtagaccaggctggcctcgaactcagaaatctgcctgcctctgcctcccaagtgctgggattaaaggcgtgcgccaccactgctcagcttttttttttttttggtttgtttttgttttttgtttttgtttttcgagacagagtttctctgtagccctggctgtcctggaactcactctgtagaccaggctggccttgaactcagaaatctgcctgcctctgtctcccaaatgctgggattaaaggcgtgcgccaccactgccccattttagactttcaaaggtaattaagatgacctgttaagttctagtgttgttattgttgctactacattatatttgtgtgtgtgtgtctgtgtgtatgttgacacatacatgccattttttgtcattattactaactttcttacagtttaaatactattatgtcagtgacttcctccagattgcttttgaatggctgaattcaaactttatatgctgtcttaccctcttcacactttctactcaaggtatttctaggtcccccaacctctctaagttagagccctgggattttatttaggattttgctttcagaagagccattaacaaggacttccactagggggtgaacgaggaaagaggaaggagaggaactaagttgggtcaagtcttccagaaagctcccgaagttcaagagcaagtgaactagctctgaaataagtttttaatctatggtacgaccagggtcccctaccccatggtcgggagtttataaacaaaacaaggaacacaaaggaaagtggggtgggaagggagaagaatggaagggaagggaggagaaaaaaggggaggggaagggaaggtagaggaggggaagggtagggaagggaagggacgggaaggaggcataggtaaccagaaaggactaagaggatgtggggaagaatccagttgccattgcttcttttttttttttctattttttttttttaatttgggggattataatataattacaatatctctccctttcctttcctccttccaaactggggatatcctgagcagggggcatagcttctggtccactactgtgttcttggggcaaatgattgagcccagattaggaaaggggtggggagagagagatagagagagagagagagagaagagaaagaggaagaattgggggcggaggatgtgaggctgggctggagaaatgaaagaaagcaaaccccactggtgacattggcacattcttcctgagcgcagcacgccctccttgtgcaagaactctgagccccaggtgcaggaggctgaggcctgcagagagacttgcagagagacccagcaagccatggtgagcatcccagcctataagagatctctagatattcaaaattttccttggggttgaagaggcaggtggcaagggggcaagaagctatcatttctgcgtttaagaaatatagaaaccaacaaacaagaacaagaacaacaacaacaacaaaacccctacgcatgctgtctcaagaaaatgactctagactctttcttgctgattttctcccttggtgtttgctttgatggaatgctggaaggggcacagataagattagacctttgcggtgacacagagtgactccctgaggagtgatatacatccaaaactacagttttaagatgtgcagaaagcctatggctttgttgtttgagttattaaaaatatattgcttcttacttgaaaaaagcaatgcttgcctttcctggcttctggctacatcattctttcatatatttgaggtatggctccttcatgacccagcgtgaaaggcaaatgtgagtgtcactggttcattagaccccaagagcattaaaaacaagagcattaaaaaaattaagattctgtttgatttaaagctcagtcgaaaagtaggtacaaagaataccgaaatatcggaaaacataacattaatcatgatcaacaacctgggactgaaacctggaaggaaaatgaaataaagtagtgtaccagtgtgtaatgaagtagatgccataattttcagccatgacacccacccccccccccaaatagtttaccttggatacggttgatagtgggctgatgggctttatctgtgaattgaagaagtgccagggcactgcctcatggtgctataagtttgcagttcagagtttaaatattttgcacttcatttacaggtgtttccatggagatgtgagggtacttactggggctcgaggaacatcctgaagctgtgggtctggacactgctctgttgtggtatgtcctttgtttttggctaagccttaggcagtgattgttcttttcttaaatattcattgaaagtacatagttgcagggaatacaatcaggtagatggctattaattcttttttttgttccttttttgttttatttttttttgtttttgtattttttatttttggctattaattcttttaaggactctcattctttctctgaccttcagaacttttctgagtccccctaataccagcttagcattgacattctctagtgatgtgcccaaatcctgatatctacacaatagtcctctgttaggaaggagtacagttaattgacaaacctctaataaggcacgttatgcttattctacatttcattttctattaatagtttgctgtgcccaaaatgaacttccacagtccagagcgtgggctgcctgagggctggggttttgtttttattttaggggcttttgtgtctttcttttgatgttacatgttttatgcttaagccttagagactcttcatcaataaatttgaaccattgtctgagctaacttatgttagctctccttcttctctcacctggactttcagctcagaacaagtgaacacaccctctctttgtttttataaatttttctttgcttttgagagtttcatacatgcacagtaaagtatgatcataatgatatgccatttcccccttcaacaacaccatataccccccaacacccctcccaacttcctgtctgtctgtctttattccttttgtttttgataacctactaaatccagttagcactgctcataggtgtacgggtgtggaccatcgactggtgcatgaaaaacctagctgtgaccacaccttcaaaaagaatgattctccctcccccagaaactattaactgacaatagcccttcagtaaggggtggggcctgaagatcctctaccccatccacacttgatcctcctctaggttttatgcagctgcagaaaatcacaactgctacgagttcaaaactgcattaaccatgtcatgtccagaagacagtactcccatattccccaacactacttcccaggctttgtgtctcttctgcaatgagccttggtagatgaggggttaatatgagcgttccatttagggctgagtctctaattctcagcatttaacagctatgcatctctccactggctgctatctacttcaaaaagcaatttctctgacccaggtggagagcagctcaggatgattggcttaagtataaatatttggaaggtatttttgatatgtctttagagtactcaccttatgaagtaaaaactcagtgagctgatggctatgaaatcttttatcttactgtaaaatcatagctcacataggtcatgccattcttagaatggccagtgtcatcaaggtcactgtgcacaatcatgtgttttacttggttgcttcaaatcccttatgcctgaaggcccagttgttaattaggcactattacttaaatatctttgtatgtagaacatgataaaaccaattgtgtgtcttttgcatcatctttatgtatgttgttctttctgtactatgagtttagatacacaattggtctatgtattgaggctttcccagggcagcttcttctacaatagaatacattttatgttacaataaagtatttaaaattatgttaatgttctgcctgaccctattttattttacttaaatgagaaattttatatctgtactgtgacatataataacagtaacaaatattagcctttaggaagttatcccaggattaaaaagtatagtgtagattttaaagctgtattaagttattctttaattaattcttagtgacatacatttctaaagtaggttggataaattacacttcaaagaattttgaggaagatctttcattaaaaaaaatctgctaagatatatttatgtatagtagtcattgagtaaaaaacaattctatatcttttcaaagagagagagagtctatattctgatccaaggctgccaacagctaatttgggtgaccctgaactgctcacctgttctcctgcagtctttgtccctcatctctaagtggtgggcagcctgcacctgtgcctggtcctagaacactctatgagtcgtcatatttctgctgctgttttccagacttcctgatacaccatggaactcactgttggacttaccattattctgaaaagcccatgaactgggaaaatgctagaaagttctgcaagcaaaattacacagatttagtcgccatacaaaacaagagagaaattgagtatttagagaatacattgcccaaaagcccttattactactggataggaatcaggaaaattgggaaaatgtggacatgggtgggaaccaacaaaactctcactaaagaagcagagaactggggtgctggggagcccaacaacaagaagtccaaggaggactgtgtggagatctatatcaagagggaacgagactctgggaaatggaacgatgacgcctgtcacaaacgaaaggcagctctctgctacacaggtaggcagtgtctaggctcctacgctgatgtgggaccaccatagttagagtaataagactcattacccagaaactgctattctgggttctaaaacaatcctaactaagccttaagcatagcacctctgggcaatctgcaggtacacaacaactaaataacgttctatccaggttgtaagtgtgttatgtggggaacagggatggacagactgtgcctcaaggacagacaggaagaggatgctgaaagctaggtggtctttgagggcttttctctaacacctcctaatcatatagacaatttctgtgagttaattcattctaaaagcagacaaacgcctacagccaagtggctattgtatcttataaattaaaagtgtagcgtgcgttatgcaaaaatgttttgaatacttaagcaaatttttcttgttcattataatagtgtcaaacaaaaacgttctttgtgcaaagaagggactctggatgtgatcacattaaaatgtctttgtgtaatctgcttaaagcctcttgccagccagggtcttgcaatggccgtggagaatgtgtggaaactatcaacaaccacacgtgcatctgtgacgaaaggtattacgggccccagtgtcagtnnnnnnnnnnnnnnnnnnnnggtattacgggccccagtgtcagtatggtaagcttcatttgtttgtttgtttgttcctgctggtgttcattagacccataatagcttagcattgctgtgcagagtttgtgtcgtgttggctttgcttacggacttctctctgattctgcatgtggacgacacacctggttatcttcaaagcatagttcagaggccatttcttcccacggtatttctttggacccccaatacagacaaacagttatcaagtagcggaaacaagactcaactccatcgaatcctcataactcttctcaaccctgcttctctctccatgaaagtggtccagtgtgagcctttggaggcccctgagttgggtaccatggactgcatccaccccttgggaaacttcagcttccagtccaagtgtgctttcaactgttctgagggaagagagctacttgggactgcagaaacacagtgtggagcatctggaaactggtcatctccagagccaacctgccaaggtgagtgactttagagtggatcttcgttgttgggacaaaataataccagttgggacaaatcaatattagcagttctaagaaatgggaagttccaaacagaaagctaaactttcacaataatatcttcctgtaaagatttcccaagtcagcatgaagtttcaatttacttcacaaggggtttgaaatatcacaaggagaaatgtgttgggatttgtcaaaggtgagcaggttacagtaaaaaatggggtattgtagacccttactgccaaggatgtcatagtcctactgagcttgcaggattaagaactatgaggttggatagaaacaattctatttttccctaggagagtgaggtattgggaaggtactcctgttcttctatagacagatgtgacaaggaacagtaaaagaacgaacatctgatacacagaatatgtcagagttatttaataacaaatcctatacacttattttggttgggtatttctggagaatatggaagcaaatcatagattctgtacttatggaatatatatttaatagaaactatttatgttcagggatcaagtttgaaggaaaatgagatgaacaggaataatcctgtggtgagatcccctaataaaatacaggtcctttatttgcaatgaatggccacttggcatcttactgccagcactggaggcaattatcctagaaacagcacagaggaccactgctaggatggccaagaaagagagggtggagtcatcagagtcctaggaagtcactcagagatgcggtgggagaaccggaaatgagagaatacacatgtgcaaagagaaaggctccagctcagccaactactatggaaaggcgcatcaaatcttcagaatgagactaagtttcaaaatgcgttttgatgtgtctgctgcacacaatggaaaattggaagaagaagacaagtaatggctttaaggaataaagaactgaaacaaaaattaatttcagtattaaccaactggactagatctgaccaattcacttatctctgaaactgtgactcttccccagaatgttacctccaccacaccgttggactgccctttagtttactcccctttaaacatcgtgcttgctttcttgatttccatcatatcctttttctaactgtctattttgtttgttttggtttgggttttggtcttttgttttcaagacagcatttctctatgtggccttggcagtcctagaacttcctctatagaccaggctggcatcaaactcagagattcgaatggggtaggaggcatattccaccaccagctggcttctgattgtttggttgactatagtgacttcttctgggttctttcatttgtacttatccaagctcataaactcttagtctcagtatctgtcttttctattattacgacttggtttgtttctttcttcaaattttctgaattttatggatgtatatatacctatgtgatctttggattaacaaatctgtttttagccatgacctccaaatatgctaagaatgttgtttggatatctacgactcaagtgtctccagtcagtttttttttcttttttgtggctgtaattacattccatggaaatgacatttaatgtcatttgtttaatgtcaatctgtgaaaagaaatggtgtgaaactctgccaccctactccaatacttgtgtaagataacacttgataaatcaattttcaaaattttatttcttttatggggctgaagagatggattagcttaagtgcactggctgctcgtacagcagacctgagttctattcccagtcatcacatggtggctaacagacatctctgactccaccccagatgatacaatgccatcttttggcctcctggggctccaggcacagaaatagtacacaatatacttgcatacaaaacacctatacatgtacaattcaataaaataatttttattaattaaaaaataggcactatcacacttggatataatgcacaatgattatattcatccccagccccattccaatcaaatcctcataactcttctcaaccctgcttctctctccatgaaagtggtccagtgtgagcctttggaggcccctgagttgggtaccatggactgcatccaccccttgggaaacttcagcttccagtccaagtgtgctttcaactgttctgagggaagagagctacttgggactgcagaaacacagtgtggagcatctggaaactggtcatctccagagccaatctgccaaggtgagtgactttagagtggatctttgttgtggcaagcttgtgtttatagtctgagaatacaggggagtcttgcctagaagtctgtttcttctgttgctgtataatttaaccagagttgggttgtagtttgatgcttttcaagtgttttgttttgttttgttttgttttgttttgttttgcttttctcactaaaatgaaatgcaaaacaccaaaccaatccaaaccaaacctagctaaacaaaagcaaaagtctttgaagtcatctggcattttataatctgatttacagcaatacattgaagttatactctgtatctttttttttctcattgttatcacataaagccttgatgaaccctagttgaactttggttcctctccttcaatgacacccattttatgtggtggccaacttagcaccaaccagtttctttcaggggatttacaggtctttcttgattgcttcagttggtaggttcttaaagtcatcttttctttgtttttctccagtgtaagctctcaggagaataacaacttctgcaaaaaacaaagccccactcttgattgttttcatttgcaatagagtgggttttcatcctttcttgactgacagggtttatcacatatagatgatggaaaaaaaaacctggtaactctgaagttctggataggctttttacatttatatttatagttccctagtttaattctctaaagtaaaccaaaatctatcgttgacatcatggaactgaattgtaatgaattgaatcagtgataagcctgcttcagggagtaggggtgtctgtcaaagctgcttaaggaaaaggctgaaagctttgtgatcactgagcatgtcccatgccagagtctgcctcctgagtctaagactgtatggtatgacatttccagaagtcttgcatgttaccatgctggggcagccttttggaatggctaccctataccaccatgggctgccaatgccttgttgtctctatctctgaccagttatccatatcacaagtctgaaagtacggtccaaagtaattcccacaagttagaaatttctagatttgtatggatggtttcattgataaattctggaggctctggtcaaaaccatgtaatgggggctggaaagaagaatcagtgttttaaagtacttgcttctctcaaggacctgggttgcttcacgccatgtggctcattaccatgtgccatttcctttccagataattctgtgcagcacacacatacattactcacccccataaaagttaaaaccatactgaaacaaaaagctttaggattggcaatgagactgggagggagatgggagaggctaaagggggtggtgcaaagatgaccaaagaacaacatgtataccatctctgaaaatgccataatggaatccatcgttatgcacgattaattaatggtaataagaaggtgaaaactgcctttggtcctgactgccctgttgtgttatgtcctccctgaagtgactcagtgcgcacctctagcagcacccaatcagggcacagtggaatgcagtcactccctggccaacttcagttttacttctgcttgtaccttcacctgctcagaaggaaccaacttaattggcaagagaaaaactgtctgcagatcatctggcacctggtctagtcctagtccaatatgtcagcatgagtaattttactcagaaatactgaaggcttaaagccggagctgatcagctagcagaagacagaaaggagataacaaacacttaagtccctttccctcaatacatgtggcctaagaaacaaatggatatgcagttgtgcactataaaatccttgcctgttcttaggctttcctttcatgataattattttctttctcaactctcctattgctttaaagtgtaaacccattgacatatttatgtatgacccatgtcttctattctgtcacaagtttatttccccgttaatcttttaacaatgcgtcctctaagctcactagtgactccctaactcccaacaagtgaaccgttctctagtaccccaagctgatgtctccccaatctgtctgtgcatgggaaggaccgcagcttcctcatgtgtatacaccgtgcatcagagtacatgaaaaaaaaagtgacaaaataattgtttgttaagttagcatatgaactagcagctaccagtgtctgcccaatgtaaaccgtcttcacagaaaatagaagcgataggccctgaagaagctgtcaaagaagatcgctgggtgtttggagtagagtgggggcagggagcaggaaggtggtaacgaggacattacagcaaggctgtatgccaggttcatcaaatacatttcctttccaaccgacttagttttcatttcctcatcttcagcaaaccaacagttgccaatatgtaaaagtagattccttcacctggaggtatcagaagatagattttttttttcaaattagtacttttcaataagagactgtaagccaacccagtttgtatatccaaagggtagaaatggccttttagttggtttgagtggaaatgaagggcaggggtccaactgcattgctatatatcattgcagaccctgggcatataaacaataagatttttgtgtatctcattcaatgtaagtagtagaagcagcttcctttgatcaacaagttacccagctcagatcgctgacttcattttccttacagtttagtaagctttctagttcttctctgtgctcagatatcaacctttaaacaagaccaggaaggaaacaccatgatgactacttcttgtttgagttttgagatacatccccaggacctccatgagtcacagatctgagaactgtggtcccataggcagaaggctagaggccagtccagctgtatacataccgtgggccttcccgtgttattcccctcatctgttacatatgttactgttgggggacatcagaagaccaaaatgatgactatcatgagtttgagtaagagaataattctgtggctcatgccatatgccttannnnnnnnnnnnnnnnnnnnnnnnnnnnnnnnnnnnnnnnnnnnnnnnnnnnnnnnnnnnnnnnnnnnnnnnnnnnnnnnnnnnnnnnnnnnnnnnnnnnnnnnnnnnnnnnnnnnnnnnnnnnnnnnnnnnnnnnnnnnnnnnnnnnnnnnnnnnnnnnnnnnnnnnnnnnnnnnnnnnnnnnnnnnnnnnnnnnnnnnnnnnnnnnnnnnnnnnnnnnnnnnnnnnnnnnnnnnnnnnnnnnnnnnnnnnnnnnnnnnnnnnnnnnnnnnnnnnnnnnnnnnnnnnnnnnnnnnnnnnnnnnnnnnnnnnnnnnnnnnnnnnnnnnnnnnnnnnnnnnnnnnnnnnnnnnnnnnnnnnnnnnnnnnnnnnnnnnnnnnnnnnnnnnnnnnnnnnnnnnnnnnnnnnnnnnnnnnnnnnnnnnnnnnnnnnnnnnnnnnnnnnnnnnnnnnnnnnnnnnnnnnnnnnnnnnnnnnnnnnnnnnnnnnnnnnnnnnnnnnnnnnnnnnnnnnnnnnnnnnnnnnnnnnnnnnnnnnnnnnnnnnnnnnnnnnnnnnnnnnnnnnnnnnnnnnnnnnnnnnnnnnnnnnnnnnnnnnnnnnnnnnnnnnnnnnnnnnnnnnnnnnnnnntcttagcactacaatagcattaggaagagagtctatgattgtctaagattttcgaacatctctttaagagtcataactttccgggtgttgacatgtggttgcccttgggagaaatccttgtggattctctctagaatctattcactgaggtcaccactgtaatctagtataccatatatatgtatgtgtaaacatatacatatttaaacatatgtgtgtttatatttgtatgcatacatatgtagtgtacacacatatacatatatagtgtactaggttacagtggaggatatatacacatcctaatgatatgcatacacacacagacacatatacagagagagagagagagaaatacacatacatatatccaatatccaataaggcagaaacctgaagaaaaaagggaaagggaaaggagagcgtcctcaaaatcttattctctatcatccaggaagtatataaactctgcacgaggacagaacattcttcttttgcccccttcctccctcctgagtatgcctttgccttcaggtcggaccaacgcaccagccacaggcccacagtctgctgcagttttgaggtgtgcactgccacatttgtccacgtttatctagcagatctactcaaaactgtaagattcacataccccggcagctttaaagattcccccgtattaaggtcaggtactatgagtaacctttgtgactcctttgtgctgcttcctgtggtagaagctgacggccacttagatttcccttccaccagactcaccagtgcacgttgtgtcacccagctcacccacactggcaactgaaagaaaatcgtctacccgtctctgacaatcttcccaccatgatttgatctcctgtccaaatttaaaaataggaggtgatagactcattttccaccaatccataagataatagaggatgcgctatgtaggaacagcactaactataacgtgtcagtactgaacagttcaaacttttcctctattgatggaaattccacggaccttggataccgccatcacacaggatactaagtatcgcctacggcaccagaacaaagctgagattgacacttttcttcctcttactgagacttcaaaacctcactccaactgtcttgctgccttgggtggggcaaagaggtcatcacacatgctccctgagtaaggtggccattagctcagtgacttcaaggagtaatgaggacgacaaggactcccaaatttcatctttttcagaggcagttgtaaccacaaaggaatttagtcaaagtcacccgtatttggtgggtgctagctggttaaggctaccttatgagtggggaggagaaaagctgtaggttgtttttaaagtcttaactttggagtcagtcatttctgtagacgatctcaaactgataacaagaaaacggcatgcccctgctgtgggaatctgagtagggcaaacaggaaacagataacgggtacttgggctagtggcagttatgccaccaaagagagtagcggttcccagagatcactaactctggagggaaaactcggtgtaactatgctgtgtccaatggtcttcaatcatgaaacagccactcatctctcaagcttgcaagggaatggctttgtcttccaaacattttagccataaattgactctttacaacatgaatcatgtccctttttttctatagagacactgatctaggtccctgagataaccctataggtgttcaatagatatgttgataagaatcatagtgaaaataataattctatatccatacatattacgtacatgttatagttttattgggttcatcagactggaaaggggacatgtgacaattcagagtatgaaggccaatggggtgacaaagcattcttctctcaggtggatgctatgacctggtgcaagggctgcctatgccctaatggtcttggcttctggattccctttaactcttctcctgggtccacaaacaaggaccctggccatgtgctctggtagaaacacttggtactcctagcttttctcattctccaaggcaatggcattttttttaggccaagctctaaaatctctttaagcaggagctcaaggcagaaatggctctttcctctgaaatagcacccctaaaaagcacttgctttcagggttacaaggcaatgctgttcctcaggcggaagaaatttccacctgacccaacacactggtttagtacagaacatgaacttgaatgcattctctcttagttctcttttcttcagaaagacacttcctcagtaggacaagacactctctcagtaggacaagaaattcccttagtaggacaagaaaatcccacagtaggattctgggtcttgtttacctattgtcattactttcattgttccttgccatatacatatggcaagaaatctcagaaaaggtagtgtgtgtgtgtagacgtatatatacacatatatttatttgtgaagatgtacaaatggactcaaacttgattattctacctaatctgtatatttggtccatatcatctacaagcaaaattttgaaagactagcttttatagaactttaaaatatcaaagacacaattgagtactgtctattatgtgccaagcaatggcctaaacattttaaataccgttttttttaacccaacaatgaatttaccatctatgtgggacaattctagactagcagtttacagccactgaaaaacaccaaagccacccctctctcaaaggattctcctttctcagaaagctttctttctgtttctttttcttctgtttcctacagacctcatttcttcacaccactagttaagcaatatttaaataagaatgtgttttggttcacaaaatgtactttgtatagtcaactaaaattacccaaagagtaagttagaggagagtcccaactgaataagcacaactaagctggagctgaggtttttgtttggacacagaaatgtgggttccagagttctatgcatttggtggaagtggttttcacacctagttccatgtggcctgttcaaaggggaaacagaagtatttatgacatatgaattgtatataagattccatatgatgtatgaaaatatgccgctcaaattggattgcatgatcctcactgattcctactaataagaccagagccaaactctcaggactcacataagagaagctgagagacattgaagtcctttagggaggggctggtaagaggatgagctgtgcctgggacactgggtcagaccagtagggagttcagccaaggctctggctttatgagcatcacagcaggtggagtggagtccccagaagcaggctcatcacactgttctgctacagctctaaacggttactggtaccccagatccacttagcaacagatgggtgtccacttaccaaatgcacaatgtatttccaaagacagttttggaggtgggcataccctttactttaaaaaaaaattgaaattgtttactttttgatgatactttttttttattcttttttctacgtttaggcaagaaatctcaagaaaggtaagtttttcaatgaagaatttccacatctgtttgtttctactttccttagggtgcttcctattatagatagaacacaaaccccgcagtagttatttacctgagcgcctcatacaaatagcatttccagataaggtagttgagtgctagctgccattaaatctttgtgactttgatgctagtggtctgaaacagatggatgtataatatgcctattaagaaaggagatttcatatggtgggaatgtttcctggtagtctctgaattttccttgagggttagaagcatgctgttatgttttttcttgtcttagcttacaggaccaacgtctaacaattgagaaacattcaattcaacaagcatttccaacaactaacatattgtaaaaggaaactgtccaggtgcaggccatcagtcttaacacagaagggtaaatgactactctaatgagtgctggccttcagaaatgagaaagagcagtggagcatggaacctacccaccacttccctaaagaagtatttgccccagttggttctcaacactgcagttcttccagtagagtaataatgtagattgttgagacaagatgcagacacatggaagttcctggcctatctggcagaaatgaagaaagggaggatgaaaaaggtggccagagagacagatggaagaggatgaaaaagagctggggtgacaagagtgggaaccatctcaaatgcagccagagtagccatcagatttccagagggtgcattaagggcatcagtgggaaggctatttagataaagacagaggtcagctggagtaaggatgaggaaccatttaggataatcatctggaagcagaatgtgttctgctctcttgagaatttgccacaaagagtgggagagtggtggggttgaggacatgggctcagtagagtctttttactctgtttctattgctgtaattgtgtagataggacccaagtaagaaaagggtctctctggggactggcctccctatctctgtagcaggaaacccacaggatgtaaatatttcttctgtgttcccaccagctgagtgaaagttcttttggcatatcctacccagagctgtgttctggccgcagaaacacctgctttgattgctactgcacggaagtggttcacttcatttcaaggatgcggtggccagcaagagatgctagtcaaaaataattagcataaaattgtctaatagatttaacagtttgttgacttttttgagtaattgacaattactcaattaacttttgtttattgaacgtttttttttattagaacaacactaagcttaactgagacactcagagcaatgagtccttgactctaacttcagggaaattcttatctaattgtggaatgaagacagaaatatttagaagtacagaacaatctaaggcagaaatggtcatagttgatgaattttgtaccgatgagaagaaaaatcattgcaagaaaggcagaatctgggagagaaccttcaaaaagttcagactaggaaggtaactcaaacatgggcatgagaagatgcgcagactttcctagagtccctggtctactgagcatctgggcaatgaaggcgatcatcctcacaccagcacatggctttagcttacccaccaggtgtactagaacttggaagctgattggctacctggagttaatctcactgattaactaaggtgataccacttcatacatttttaggctcgaaagactgaggacatcaccttaaaactgactttgtagttaggtaaataacttacccacaggccttgtgacagtgatagttacagtaataaatagtagataaaaacaaacttttatcaaatacacattccatgttgcatactgttttaagtgttttgagtcttaaatggttagatgttgtctgcaatcctgtatagatagggagtgttgttatccttaataacagtaaagaaacagaaggggaaacgacagtggcttaagggaagtcactggaaaaagggaaaaagctgaaacttgtaacaccagcatccagagacagtatccctgttactcgtatgattctagatccttgatttacttctatgttaggggttttactaccagagcccctcctcttccagtaaaatgacttattttcacactaaaccatggtgtgatggcactgaggaagggtgtggtggaagaaatagggtgtgtctctagaacaagccaaggggggcatgaacttttttttttttctaacttaagttgattctcacaggtctttgttcttgttcctattagtttttggctgatgaatgactccttgggcatttgtggttttgattcttgctggttattttgactcttctgcaaactggttctgtttatcacctcatttggtttctggtttctaaattctacctgggtaaaagctacacccatgatacacaggatacgatgccaacctcagaggagagggtatgtgcgagattctgctttcagaaacatttttatttctacactggcaagcaagtttgcagctgccacggtggtttaccctgacagttcagaacgagaccagagcctccgaatctggttctccttttgaaaggtgcaaaggcacagaaatatggttctcctccaccctttccaggaatggcacagttgtgacatagaacacagtggcacctatttcatgaatataaattcgtccttatctctctaaaccatactccaccagaatctcaaatctggaaccaataccactctcttcctgagtttttattttctccgatctcacattttatctcctacttccccacctctccactgtaaaatcagcatgcagtaacctccacaggttccacatggaaattagcagtattgcagaactatgaccagatgcgatctgggggccagcactctgaacatcatacttcttagagaatcgggacttcaggctgaatcaacgtttacattaaaatatttatttggagagaggggctggagagctgactcagcagctgagggtgtgtgctgctcttgtaaagaacccaagttcagtccctagcatctgcactgagtggctcacaactgcctgtaactctggctccaggaaatttgccccctagaaactgtaaccaagcaacttcagtcatgcgcacgggcacacacacatgtgcgcatgcgcacacatgcgcacacgcatgatgaaaaatcaaaataaatctttaaaacgttggcttggggatactacttgactgtgaaaaatgttgctgtaatgtctcttccacatttcttttaaaacgcttcacaccttgtccacgatctccaactagaagccttccgtgctctcttcttcacgttagtggctctttacctcctctgctagcacttcagtgtttgtggtttccttgcctctgtcacctagagaatgttcacctgtattactaacaaattcgtttttaccacttttaaaagctccttagtttaattttataatctgttgcttctctttcaggatggatgatccatactgattcatcctttgtgaaaggaaagccatgaagtgctaaagacaaaacattggaaaataacgtcaagtcctcccgtgaagattttacacgcaggcatctcccacattagagatgcagtgtttgctcaacgaatctggaaggatttcttcatgaccaacagctcctcctaatttcccctcgctcattcatcccattaaccctatcccataatgtgtgtctatacagagtagtattttatcatcttttctgtggaggaacaagcaaaagtgttactgtagaatataaagacagctgcttttactctttcctaactcttgtttcctagttcaattcagcacagaagctaatgccaaacacagtgaaaatatgatccatgagtaattggaaactcagactccttgcgcatagtacgtaccctatgtaacatcgacaaaaatctttcatttccacctccaaagaacagtgctctattcaagttgggaaagtcctacttcctctgtagacccactatctgtgagtgacagccactgtagctgttcacattaaccttccccatctccttttcctaggagaataattccacacactgcaccccatgatggccaccaaacatcaaagaagggaaaatctcctgcattgagttttagttttgagttttcccttctctttattagatctctctaggttccttgaagtcagtgttctgatgattattaatagttaatgataacacaacccactctcttggagctgatgttatgaagacaacaggtagaaaaattcctgggctcaggctggagtgacacccttttctttccctaacatcttctactcagatacctaaatttaagattcaggacagctgtccccaactcttaccatgtcttttataacttgctccttaacttgcccaacctgtaggctatctcattttctcgcttcactctgcaaggtttataacatgatgaatttaaatacagcctgttttttgtttttttttaaatgttacttagtctatttgtataccagaatatgtgttgtttttttcctagataaaattgtacccttcttgaggggagagactgtgtcagatctcaggagttcctagtttgttaattgacccttggtagatttgtctgactgcagtcagtgaatgaagctgtgtgaggagatttctgagagcttgtgagaaaacaccaagcaaacaagacgagcgtcttctaatctctgttcctctgtaacagggatgtgttctcggaatggtcttttgtgcccctccgaggtgtaaatggagtgggtttgcttcagattatccatcagttaccaatagtatttagaggatgtttccaagaacaggctctcctcctgactgtctatggcttgaactaatgtgaccctaccctcagcactgtacaagctgaaactcatgtgactttgcctaaacttatgtgaccttgccctcaggactgaatacagctggaactcatgaactttgcttatacgactttgctgaggcaagcagaactctgtgagttcaaggctaacctggtctagatagagagttccaggccagccagggctacatagtgagaccaaacaaacaaatggtgagaaataaatgaatgatagagaaagggaaggggagagatagagagagagagagattgagagattggaattatttcccatttcataagtaatgcagtttttatgcacattttacatcttatgtgagcattttttaatgaggaccatggtttgtttgtttgtttgtttgtttgtttttttaagtcacttctgattctattgcaattgcaaagccctttcatcctgtgtgtctaccagcaggtgtcaatcatgctcacacaccttagggttcatcctttggagaagtatagtgcacaagaacagactcaagagttcactaccctgtctgatgcttattcaggacaacagaaatcacagacacaattagatcctagataaggcgtcaggagaaaccaggttttttaaagtagagacaaagttttgacaccagagccagcagacaaatctcgcaggcttaaacaaaagccaagatggaaagaccatcacagtgctctaaagctcatgaagtgtgtactatgccatggtctttggaaagcaaaatcacagatgggcagaaccacaacagcattctaggaaaaaaaaaacctatatgatggtttaagaggggagagaaaacagaagcaggggaggcaagccattcaaaggcagttctcctggctcagcaacgatgagccaggaaggtccatgtgggcatcccgaagcctttgttctctgactaatgggagggtggagagtgggaggaagagtaccgagctcttagaaaggaaaacataagacaaagattctggttaaatatggcttatgcaaatcttcccttattcaaagatcttgtaggaaagtccctcctctgttatttttcctccacatgaatgtatctcctttattcttaatacaggattgagtcaaggatgtaacccaaatgcctgtaagctcacaaagacaactggagaagaggagcaatgggaaagggctccaggtcggaagtgctctttaaatgagggtggtgatcaattctacccacttacaagaaaacaagccaagtttttgaggtttcataaacacagtttaagtagagacactgatacagactggtcagcctctgtcagggtgcagggaagctttcagcaactcttcctcattgggctatgttggcctgtgaagtcagattcatagagattttgagcgtgtaggtagcgtgttggatgatgcactacttgctgtggagtatgtcataaccttctagatagattggctccccttagaaagcatctagagttgtcatagttttctattatagacatacttattaagctgcagagtggtgcttccatcttaatacttaagtaatttaggaaaacaggaaatcatacatggtcaagctatgctctgtgactttaaagactcctgctcctcctcctcctcctcttcctctccctccttctcctcctcctcctttcataagaagctcttggggctgatggtgtatatgaaccagccacaactcagcaactaaggaataacaccagctgttgagtaatgtttctattagtacttctgtccccaaggagaactgtttggagtgatttttctcttgctgatagcaataataaacaaatgctttgggttttttgttttgttttaagatttttcatcctgataatagttaaagtctggagattagaaaccatggcttcttacaccatgcagtgctttcaagggctagctcatgctgcagaagaccagagcttcactggagagtgacacgtcaaaacacccttgagcagcacaagacctctatctcttgatcttttgtgtgtaatgggaagggggaatacctagaacttatatttctgttttctttcagtactgggaattaaacaagagcccttgtgcatgattgacaagtgcccttccattaagctgtgttcctcaggctagttttaactcctaagaactccgtgacttcagatctccttctcatgcttttgaagtttaccagcaaattaagcaacactgtggcttccctgtgccatgtggtttgagcaagttactgacaccctgtatgccaggcttattatcactaagtggtggacagtttagcccgacttttcgtgttagctgtaaggactaaataggcaaatacatgcaaagaacttaggaagaaactggaaaatagtaagcaccagataaataacagctggtgatgcagtgaatatcatctttagtgtcaaagatctgtgtttgtggcatccaagagcattgtggtcttaggtacatgtataagagcattgtggtcttaggttcatgtcttgggcttctccactatcctatgcaatatcccaagacacaaggccttgtgtgtatcctctcccaggaatagtaaaaagcagagagagatattccatgtggccacactggggataggaacaaagaaaggggtccagtgaccccaagcccatgtttcacactactgacaggaactctattcttaagcagaaaaagaactggagtagaggggcaagaggaattaaatagtctctggtaaagtcttgtaagactatttctctactcctgcacccaacccaccatcacaggtacctgtccatcctgtaaggttttgttctaatgggatttgaggtgaattgtgagtcacaatgaagaatctatgatttttgttcggttgtttgtttttgttttattttgtttgtggcaaaagtaccttctacatgcctaattcagactcaggcttatttttagtgcccagattcttcatttgtaaggtaggattaataatagatgcttttgtggatagtggttcaggcagagtctcttaagtgctcaaagtgtgaaaataaaagactgtgaatgctcagccatagatgggacttctgcatcacacacacacacacacacacacacacacacacacacacacacacacacacacgtacatatatacacacttacacaaatgcatgcaacgcagatatacaagcatgctcaaacatgagtacacacacacacacaagtacacatgtgcacacgtatgcacacaaatgcacaggcatgcacatgcacactcatgcacacacatgtactcacacatgcacaacccccaggctcagagagcattacagaagaaaggtagaaagaatgttaaagccagatatgaggaagaatattgccctctaacataacatggccattgcattcatgaactgacagcagctgtggctaattgcccaagtagcaagccaattccaaattccaacatggagacaagaggagctcctgagacctctctgctagctggggagctattggcaattgatggctactagagaagaaagcatcacttttcgggggttcaggaaaggtggccactggctggttgcccatgccccaggggatgacccctcatccacacacaacttggcagcattgattggacttggtggattactaatacagaagacctgaagctgtaaataagacagctgggaagatgacttggtgggtaaggtgcttgccttatgactctgaggactagggctggcatccctagaaccaacattgaagctggagctcatgatggactgtgggtgctatgacccctgggtaggacccagagagtgcctatttctgctggcataccatgtgacagaaaatagaggatccaagcacactagtgaaaccttagattcggcctggcacagggcagggactgcttccctcaggtgctggcagcctggcactaacccacagtgccagtgggatagttggcttttccagagctcatgttgattccccattggtccaaaggcagtatttaaaacaaaacaaaacaaaacaaaaagcaacaccaataacaaaaaaccataataacaaatgctcgctgcttcacaatacagtagatttgcacctcgatgctgatctctggagtttatttccccggttcgtgactctgcctccctcatcccctcttacatccctgtttccacagtaaacactgcacatacaaggcagaaacaggaaacttctccatccagctggctagctagactagcactagtattaagctatgaattcagcaagagactgcctcagtatctaaagtggggagtcactgatgaagccacccatcttatcttcaatctcagatctctacatgaatatgcacacacatacaaacattcatacatacttgcacatgagcgcatgcacacacacacacacacacacacacacacctgtaaaagtcaaataaacaaatctgttgaatgttcacttctctaagatactcctgaagaaataggaaacccaaacatctcctgtattgaagataggatacattttacaaagcggggtagtggtccacacctttaatctcagtgctgcagaggtagagccagtgcttaatctcagtgctgcagaggtagagccaggcagatctctgagttcgagggcagcctggtctataaagtgagtcccaggtaagccagggctacacagagaaactgaatcagaatgttaaagtgcttcacaacagaacctgctggccttcatttgtacattgctccattctttgtcaaaactagagccaggctttttttattcttttctttttttatttaaaaaacaaactttttgtatcaaatggagttacatatctttcccgcctctctttcctccctttcacccctcccagctgcctgtccttgaagccctgtcatatccttcaactctcaagatgatagattctttttcacagaacattattgttacacatatacagtttaaatctcaggttcatcaaagaacttgtgtgtagcagccaagcttttcccataaagaaaacaacagaaaatagtcttccaagtattctttacacttatagacacgaaaaaggaatattctccaagtattatgatttgagaacatcttgattcacaaaccaggataaatacttatcaacaaataaaaattccagactaacctctcttgtgagactatatgtgaaaaatctcaagcataatattagcaggccaaatatactatccaataaacatatataacatgatacccaatttatttccatgatgtaagagtggaatttctattacaagatccataactacaaataacccatattaacagagtggaggacaaaaccctcatcaataatcaaaaaccctcatcaataatcatcaaatgctctcccaacatgcctccttcccttccctcctcctttgacaggtgtcatggctgcactctgctccaaagaccacccttgctactcctctagcctttcatgcataaacaatacccttccttagttcgtgcgttttgggaaacatattaatcctcactgcttctgtcccacattccattgcatactagagatctggtcagtgcattacccagaagtctctgctcctgagcctgtgttttagacacaatacagcaattacctttccgtgaagtctctgcctgcatgtctgtcttctaatctttgggttcttgtcagctcaactcgtgccaatctccgatctctggatactgagcttgggatttgaacagaaaatctcctaaatccccaaatttagataaccccaaattctataactgtgctttataaaagtcagagttcaatcaagaaacaccctgatccaccaattcaggtcttgcagattacaaaacctttccactcaccactgcccttcattagaataacggtgcatacagcaacagaactggagccaaacccctacagtgaactgcaagatcattctagaccttcactttctccaggcacagttcttcctgaaaacagcagcagcaataacaacaacaacaacaacaacaaaacaacaaccactacaaaaacaaaacaacaaaacaaaacaaaaaaaccaaaaaccaaccaaccaaccaaacaagaaaaactttttaacattcagttagcctgacatccaggaagttcctttgactttggctgtggcgatccattgtcattttgttttttttttttttttgagagagcactagcccagatagttctaaactggctgactcatgaagcaatatcgtggctacagatgacacaagagaatttatttctgctaagatttgaatgttttaaaaagttttgatagaagttggtggtattggtgaaaactttgcctcctggcacagggtgacaattaaggtgtgttagagtttgcttttcttcccagtgttggcactactgctctaaggccctgagagaaaggggcgaggggggaagaacctttggcaacattccctgaggttataggccaccatttccccttcctactgcactgacatgcaattgctggcaaagccctaacaattccctaggttagctctcttgtgtccacatttcccaaacatctcaagacaatgcccgtaagaaaggtctggggaaacttgtaggtttaagtcctgattcatgaaccaggcaacagcagcagaaggaaatgcacgtgacattggtgcaatagggtagacgaatgcaaactgaggataaatgtagctttttgctttgtgctgctggcaaggaccatgccaacagactcacttttctcagcggtaactcattatgttatgctatcctgttcatctgattagctattgattcatctattgttcatcagatagacaagtggctagctgtgctatgaaattccattcttaagtgactaccactgaccaaaaagtactagctgtacctaatctatttctagatgcagggaaagaggaagcatagaatacagtcggttgtcctgtagctatgagcatcctgaaagatgttgaaagaacggttgagtaagcatatgatacaatcacatcactaaccagttttctcaggaagctgtttaaaatagccttcatcctccatcactggatatagccaattttatagattggggtacagccttaggtatggagttcactgtatgtctcgattttcatggtttaagacgagcacattagtgacatcaactagatagcttcatggaattgcttgtcattccttccccaggtaataggtgaagcaggcaggataacactacaataaaggataaactggaaagtatgtaaaagaatcgtcaaaagtggtggaaatccggtggaccttgaaaacacagcatagctccatagagagaaaagtaaggtttcttgcacctttttctaccctgaaattcatttcagagccaggattcctatggcagaagagctggaggctccacatggtctcattgctgtttctgttgacagtacaggagactcctcgaccgctacagtctctgaacgtagtgtggaggggggctgctcaaagtacagttacacagtcaacagagctctccgtagttcacatctaatctgagcaactgaggatcagtgttagcagtaacccttctggtagagtgcagccatcctgaggctagctactgtccatagcatatctccatactaaagactactgtgattcaactacactaacacaagcagcagcctcatttctccaactatcctgtccaggcccagccgcaaggcccctacactggcttccaaacatatgcaatgccctatctccaccaaacaggtaaagccttggcttaatggataactgggtagcagccttggtgtcttgccaggcactggcctacagcacatgtatccttctaccacatcccaacaaccatttaagttccccttccggactgacagcacaccacatagctggccatcccatagtaactgtacaatcaaacccaacctgacagccattgagtggttaccatgcccatattggtgagtctgctacaactgtcctgtcctaaatgtcatcatcacaagcctgggatggtccccaaaccaaccaactagtaatccccatcctccagttatccccatcctctagtaatccccatcctccagttatccccatcctccagttatccccatcctccagttatccccatcctccagttatccccatcctccagttatccccatcctccagttatccccatcctccagttatccccatcctccagttatcctcatcctccagttatccccatgctccagtnnnnnnnnnnnnnnnnnnnnnnnnnnnnnnnnnnnnnnnnnnnnnnnnnnnnnnnnnnnnnnnnnnnnnnnnnnnnnnnnnnnnnnnnnnnnnnnnnnnnnnnnnnnnnnnnnnnnnnnnnnnnnnnnnnnnnnnnnnnnnnnnnnnnnnnnnnnnnnnnnnnnnnnnnnnnnnnnnnnnnnnnnnnnnnnnnnnnnnnnnnnnnnnnnnnnnnnnnnnnnnnnnnnnnnnnnnnnnnnnnnnnnnnnnnnnnnnnnnnnnnnnnnnnnnnnnnnnnnnnnnnnnnnnnnnnnnnnnnnnnnnnnnnnnnnnnnnnnnnnnnnnnnnnnnnnnnnnnnaaacaatagcatgaaggtcctcagctttgagagcaatgtgaacaccctggccaatgaatcctgattagatccaatccaatgaggcttctctgaagtgttacattaaatcagtcaaaggacaacgaaagaattaaaaaacaacatggaaaaaagtcgagtcacctatatggaaagcaataccaagccaacagcagattcctgctcagaaatattgcagccccaaagaccataggataatatattctgagtgttagaagaaaataatgccagtgaagtgtactatacaaagacatccttcagaaatgaagggaaataaagccttcctcaggcaaacaaaacctgagggagatcatcaatactacaaagatttgtaaaaactccttattaagggaggaactggcatcatgaaaacttgcaaacgattaaacctcaccggcagagtgcatacaggaataggaaagagcaagaaatcaaagcttctcactaccgaaaaccaccaaaccacaatgattcacaacaagagaggaagaaaaatacacaaaataacaaaataactaacaataggacaggcatagtcatatagactaataaggactttagtgttaaatggattaaactcctcaattaaaagaaatgttcctcagtcaaacatagatctttttttttttttttccattttttattaggtatttagctcatttacatttccaatgctatcccaaaaagtcccccttacccacccacccccactcccctacccacccactccccccctttggccctggcgttcccctgtaccggggcacacaaagtctgcgtgtccaatgggcctctctttccagtgatggccgactaggccatcttttgatacatatgcagctagagtcaagagctcaggggtactggttnnnnnnnnnnnnnnnnnnnnnnnnnnnnnnnnnnnnnnnnnnnnnnnnnnnnnnnnnnnnnnnnnnnnnnnnnnnnnnnnnnnnnnnnnnnnnnnnnnnnnnnnnnnnnnnnnnnnnn

SEQ ID NO: 134 - DNA, 2199 bp, Mus musculus
gaattctcgagctcgtcgaccacgccctccttgtgcaagaactctgagccccaggtgcaggaggctgaggcctgcagagagacttgcagagagacccagcaagccatggtgtttccatggagatgtgagggtacttactggggctcgaggaacatcctgaagctgtgggtctggacactgctctgttgtgacttcctgatacaccatggaactcactgttggacttaccattattctgaaaagcccatgaactgggaaaatgctagaaagttctgcaagcaaaattacacagatttagtcgccatacaaaacaagagagaaattgagtatttagagaatacattgcccaaaagcccttattactactggataggaatcaggaaaattgggaaaatgtggacatgggtgggaaccaacaaaactctcactaaagaagcagagaactggggtgctggggagcccaacaacaagaagtccaaggaggactgtgtggagatctatatcaagagggaacgagactctgggaaatggaacgatgacgcctgtcacaaacgaaaggcagctctctgctacacagcctcttgccagccagggtcttgcaatggccgtggagaatgtgtggaaactatcaacaatcacacgtgcatctgtgatgcagggtattacgggccccagtgtcagtatgtggtccagtgtgagcctttggaggcccctgagttgggtaccatggactgcatccaccccttgggaaacttcagcttccagtccaagtgtgctttcaactgttctgagggaagagagctacttgggactgcagaaacacagtgtggagcatctggaaactggtcatctccagagccaatctgccaagtggtccagtgtgagcctttggaggcccctgagttgggtaccatggactgcatccaccccttgggaaacttcagcttccagtccaagtgtgctttcaactgttctgagggaagagagctacttgggactgcagaaacacagtgtggagcatctggaaactggtcatctccagagccaatctgccaagagacaaacagaagtttctcaaagatcaaagaaggtgactacaaccccctcttcattcctgtagccgtcatggtcaccgcattctcggggctggcatttctcatttggctggcaaggcggttaaaaaaaggcaagaaatctcaagaaaggatggatgatccatactgattcatcctttgtgaaaggaaagccatgaagtgctaaagacaaaacattggaaaataacgtcaagtcctcccgtgaagattttacacgcaggcatctcccacattagagatgcagtgtttgctcaacgaatctggaaggatttcttcatgaccaacagctcctcctaatttcccctcgctcattcatcccattaaccctatcccataatgtgtgtctatacagagtagtattttatcatcttttctgtggaggaacaagcaaaagtgttactgtagaatataaagacagctgcttttactctttcctaactcttgtttcctagttcaattcagcacagaagctaatgccaaacacagtgaaaatatgatccatgagtaattggaaactcagactccttgcgcatagtacgtaccctatgtaacatcgacaaaaatctttcatttccacctccaaagaacagtgctctattcaagttgggaaagtcctacttcctctgtagacccactatctgtgagtgacagccactgtagctgttcacattaaccttccccatctccttttcctaggagaataattccacacactgcaccccatgatggccaccaaacatcaaagaagggaaaatctcctgcattgagttttagttttgagttttcccttctctttattagatctctgatggttccttgaagtcagtgttctgatgattattaatagttaatgataacacaacccactctcttggagctgatgttatgaagacaacaggtagaaaaattcctgggctcaggctggagtgacacccttttctttccctaacatcttctactcagatacctaaatttaagattcaggacagctgtccccaactcttaccatgtcttttataacttgctccttaacttgcccaacctgtaggctatctcattttctcgcttcactctgcaaggtttataacatgatgaatttaaatac

SEQ ID NO: 135 - DNA, 1119 bp, Mus musculus
atggtgtttccatggagatgtgagggtacttactggggctcgaggaacatcctgaagctgtgggtctggacactgctctgttgtgacttcctgatacaccatggaactcactgttggacttaccattattctgaaaagcccatgaactgggaaaatgctagaaagttctgcaagcaaaattacacagatttagtcgccatacaaaacaagagagaaattgagtatttagagaatacattgcccaaaagcccttattactactggataggaatcaggaaaattgggaaaatgtggacatgggtgggaaccaacaaaactctcactaaagaagcagagaactggggtgctggggagcccaacaacaagaagtccaaggaggactgtgtggagatctatatcaagagggaacgagactctgggaaatggaacgatgacgcctgtcacaaacgaaaggcagctctctgctacacagcctcttgccagccagggtcttgcaatggccgtggagaatgtgtggaaactatcaacaatcacacgtgcatctgtgatgcagggtattacgggccccagtgtcagtatgtggtccagtgtgagcctttggaggcccctgagttgggtaccatggactgcatccaccccttgggaaacttcagcttccagtccaagtgtgctttcaactgttctgagggaagagagctacttgggactgcagaaacacagtgtggagcatctggaaactggtcatctccagagccaatctgccaagtggtccagtgtgagcctttggaggcccctgagttgggtaccatggactgcatccaccccttgggaaacttcagcttccagtccaagtgtgctttcaactgttctgagggaagagagctacttgggactgcagaaacacagtgtggagcatctggaaactggtcatctccagagccaatctgccaagagacaaacagaagtttctcaaagatcaaagaaggtgactacaaccccctcttcattcctgtagccgtcatggtcaccgcattctcggggctggcatttctcatttggctggcaaggcggttaaaaaaaggcaagaaatctcaagaaaggatggatgatccatactga

SEQ ID NO: 136 - DNA, 40955 bp, Homo sapiens
atcattgtgagggctaaaggtcaatagaaataaaagggaaaaaattttttaaaaaaggaggtgtaaaaatagcacaagaggaagtaataagagagaaaaaggaaagatactaaaagaaaaaatattgagatgcatagagtaaacagtacagatgctacagaagggaaagatctagttttgtattcactcacctgggagcttaaaacatccacacaagtgctgggcatggtgactcacgcctgtaatcccagcactttgggaggtggaggcgggtggatcacgaggtcaagagatcaagaccatcctggccaacatggcgaaaccccaactctactaaaaatacaaaaattagctgggcatagtggtgcgtgcctatagtcccagctactcaagaggctgaggcagaagaatcgcttgagcctgggaggcggagtttgcagtgagcagagatcacgccactgcactccagcctggcgacagagcgagactctgtctcagaaaaaaaaaaaaaaaaaaaaaaaatccacacaagcgtacatgctaatgtgcacacacatacacagagagatatattcctaaaccctaacccacaggtaatttgccctgaagataatgaaaattaagcttcagggcccattacttagataaacctttaaattacaagggcctgggtcctaggaatgtgtttacatggtaatacatctttgtaagatctataaaagcaagacgcttttacgttccttttctcaaagagagacctcaaattatataaaccttggaccctgaaaaactcctgaatgttcctgaaccaacccaaaatattctgattcagtaggattgggagcgaatgttgcgtgtatatttttttgtttttttaatgttaccaagtgatttggatgcacaaccaggtttggaaattactgaaaaaggactataggctgattagtttaaagtgtccctgatgtctatgtggtatttctggagctttgccaccgttgattgggtcatataccatataacactatgtagtttgggaaaagtggacaatgggtaacattcatttgcacagtgcggtgatggtcacatccccccgtgttgagtaattagctatccatctgtatgtactggctgtagcaatatagttcttttcaacaagaaataaagagaattcagacacaacattcacagttgtaaatatcaagaaaacagaataaattcattaaacaaaaatccaattttggaagcaagatatatctgccaacagtgtaactgtccaatgggttccttttgtttgctgcccagataaaggtgatttatcaagatgggaactgcaatagagaaagaatttaattcatgcagagccagccaaatgggagaccggggttttgttattactgaaatcagcctcccccaaaattctaaggctaagatttttcaaggataatttggcaggcagaggaatggttgctgctgattggttgggatgcaatcatagcggtgtggaaaatggtccttgtgcatgttaagtctgcttctgggtggagccacaggacttgttgatgggtccaggtagagccaccagttgaaatgtaagaatctgaaaagacatctcaaaaggccaatcagattctatgatagtgctgttatctgcaggagtaattggcgatgttgcaaatcttgtgacctccggaataacagttggtaattgtttacatctacaccttagcagaattcaggctcctctcatcctcctaacctttcattggtggtcttttattagttttacaaaggcagtttagttttggagaagggctattatcatttaaactataaactaaatttctgccaaagatagcttggcccaagctcaggaattattaagggcagtctggaaggtaaaggcaagatgggggttgattatttcagatctctttcactgtcataattttctcactattataatttttgtcaaggcagttttaatagtgcagcatagacttgaaataaataaggagaaaccaggtggggcatagtggctcatgcctataatctcagcactttgggaggctgaggcaggtggatcacctgaggttaggagttcgagaccagcttggccaacatggcaaaaccccttctctaataaaaatacaaaatcttagccaggcgtagtggcatgcacctgtagtcccagctactcgggaggctgagacatgagaatcacttgaaccagggagatggaggctgcagtgagccgagatcataccactgcactccagcctgggcaacagagtgagaccctgtctcaaaaaaaaaaaaaaaaaagaaacaaataaacaaacaaacaagtaaggagaaacctgatggttagaaataaggaaatgtttaatggcctggaggttcaatgaggtagaagtaaaaagcattgcaatgagatacttgagcaatacacttgcaagaataggagacagtggttaaagagtgaagtgtttgaacatgtgactttagagacggtacagtcttaggtgttgtcgaggttgaggctgtgcctagggaaggaggtagctcaagtctagtggaggaaaatgtcattggagagctgaggatctgggctgtggtattggttgtgccatggatggtgaagtcccgtaagactatgagaagtgcttacagggaaaggaagatcaggaactaggtgccaaagccaatcttgcatgaggagttgagaggtcactacaatgaggacagtgagatggtttatctcagtgtcacaagcttcaaagaagcagagttattttatttcttctttgtgtgtgtgtgtgtgtgtgttttacaagagggcagatgaataaacatatataagaggcactcattataaaggagaagattgcccctgccttccaaccctgaagtatgtgctgtgtggagaataaatattgtcatcttgagagatctgcaggggaagtgatgtcctagggaggcagtcgggctaatgacaaagcaaggaggtaggagaaaagtttgaacaggaaactggaagattgaggggagtttggtgatggtgaagacaggaatcccagagatggcaaggaagcatttgggatgaaaatcaaggttgggtcaggagagaacagtttaggtgaactgtgtaggagatagatgacagacagtaagaggggcttacatgccaaatgtaaggaaatgtgagccatggtgatttgtcctgataggattgtggaggtaggtgggcagttagttagttctctactgcacattccttttacccatgataaactgatagcaactgcagtgagtgcagccttggttggcagcaatgagcaaataaatcttgcggtcatctgtaatggaggcgtaggctagggaagggttgggtagtggtcctttgaccatcccttggacccagggatgctgctttcaatggcattcactggtacttccctcatgtctcatggcaggcaaacggttcttcagcactgggtcctctctccagggttttgtgatggttttataatgctcaccaactcgatctagttctaccttttgagggccacaaaacagtctaataaccactcttttccttaccacccatcaaatggctgttaatatatctccatgacctttcctattccaaatcttcttttggctgaatgtacattaaatatttttttttattgaggtgaagttcacacaacataaaacaaccatcttaaagtgtacaatccagtgacgtttatcgcattgtataaccaccatctctgatatggtttggatccgtgttctcactcaaatctcatgtcaaattgtaatccccagtgttggaggtggggcctggtgggaggtgatttgatcatgagggtggggtttctcatgaatgatttagtaccatcctcttggtactgtcttcatgatagtgaatgagttctcacaagatctggctgtttaaaagtgactgtcacctccccacatccctctcttgctcctgcttttgctatgtgatatgcctgctcccctttcaccttctgccatgattgtaagcttcctgaggccttaccagaagctgagcagatatcggcaccatgcttcctgtaaagcttgcagaagtgtaagccaattaaacatcttttctttataaattaccaagtctcaggtaattctttataacaatgcaagaatggcctaacaaaatgtctatctagttccaaaatatttttatcagaagaaaactctgtaccctataagcagttagtccccatttcttcctcagcccctgggaacctctaatctactttctgtctctatggatttacctcttctatatgtttcatataaatggaatcagacaacatgtaaccttttgtatctggcttcttttggaacaggaattaaaagaaattaaataatgtgtaagcggaaactcagttgtatgtaacaaaacccaactccccctgagaaagagaaagagctggagccctttaaaaattaactgcctgtttttctgtggctagtgagacttacctctcctcctttcccaggcattgtgaagaccctgtttctctagctgtgcagctgcaaggtcactagacagataaactcaagtcgcaaaacatgtttcttcttgaaaagtaagaaatgatgtaatgcatgtctcaattaattgaataactgtctttatttctcacttctgtagtatgcttccccctgcacagatacccctctctcccaccccacaaaatgcttaaaaggtaacttaactctttgttcagggctcagtcctttggatgttaatctgacttggccagtgcacctaaataataaatatcctcctgaaccccatcggtctctctgatttcttaaaaaatcccgcaatatttccactaccaaaatttgttgacacattggatatgacttgtgaaaaaaaagagaggtgtctcagttaactccaaaagttttggtctgagtaactggaaggatggagttataatccactgagatggaaaggctgtgggaagagccctacagattggaggagaaattcagaagttcagtttgggatatgtaaaatatgagaggcttattgaacaactaaatttgtttggggatggagatgttgagtaggcatttggctacaggagaatggttctggttgtacagaatttagaattcgttcgcatttaaatggtattcaaagtcaagagtgtgaattggaccaccaagttagtgaggttagacacagaagagcaaagcggtgatctctggagtactccaagggtttggaggttggggagatgagggagaatcaacacatgatacagaagaaatagccagtgaagtaggaggaaaaccaggagctccctggtgaagtaagatgaggatggagaataggctgtttgtgttagtgaagtgtaggaccttggtgagagcagtctcagggaattggtgtggctgaaagcctgattggacaagcttcaagacagaattacagcctgagcaacatagtgagatcctgtctctacaaaaataaaaaataaaaaaattagtcgagggttggggcatgtgcctgtagtcttagctacatgggaggctgagggagaaggggcactagaccctaggattccttgagtgcaatgagctatgatcgcaccactgcactctagcctgagtgacagagcagcattcccatctcttagagaaagagagagagagattgagagaattagaggagaggacttagaaaaaagtaagtctagatacttctttcagggtatagtgggagcactggcactttcacaagtctccctggctccacgtttttccccattttaccatgtcttccaagttcctgccataagttcagcttaatgatcaagagcatggatttggaactgattggcctctgttcaaattcccaaccatgtctcttactagttatgtgactaaggcaactttctttttttaaactttttttaaattatactttaatttctgggatacatgagcagaacgtgcaggtttgttacataggtatacatgtgccatggtggtttgctgcattcatcaacctgtcatctacattaggtatttctcctaatgctgttcctcccctagccccacatcccctgacatgccccagtgtgtgatgttcccctccctgtgtccatgtgttctcattgttcaactcccacttatgagtgagaatgggtaatgtttggttttctgttccagtgttagtttgctgagaatgacggtttccagcttcatccatgtccctgcaaaggacatgaactcatccttttttatggctgtatagtattccatgatgtatatgtgccacatcatctttatccagtttatcattggtgggcatttgggttggttccaactctttgctgttgtgaatagtgcctcaataaacataagtgtgcatgtgtctttatcgtagaatgatttataatcctttgggtatatacccagtaatgggattgctgggtcaaatggtttttctagttatagatccttgagaaatcgccacattgtcttccacaatgattgaactaatttacacttccaccaacactgtaaaaagcattcttatttctccacatcctctccagcatctgttgtttcctgactttttaataatcgccattctaactggcatgagatggcatctcattgtggttttgatttgcatttctctaatgaccagtgatgatgagctttttttcatatgtttgttgactgcataaacttcttcttttgagaagcatctgttcatatccttcactcactttttgatggtgttgtttgttttttcttgtaaatttgtttaagtttcttgtagattttggatattagccctttgtcaggtgaatagattgcaaaaattttctcccattctgtaggtttcctgttcactttgatgatagtttttttttttctactgtgcagaagctctttagtttaattagatcccatttgtcaattttggcttttgttgctgttgcttttggtgttttagtcatgaagtctttgcccatacctacgtcctgaatggtattgcctaggttttctcctagaatttttatggttttaggtcttccatttaagtctttaatccatcttgagttaatttttatataaggtgtaaggaagggatccagtttcagttttctgcatatggctagccagttttcccaacatcatttattaaatggggaatcctttcccaattgcttctttttgtcagctttgtcaaagatcagatggttgtagatgtgtggtgttatttctgatgcctctgttctgttccgttggtccatatatctgtttttgtaccagcaccatgctgttttggttactatagccttgtagtatagtttgaagtcaggtagcatgatgcctccagctttgttctttttgcttaggattgtcttggctatacaagctcttttttggttccatatgaaatttaaagtagtttttttctaattctgtgaaaaaagtcagtagtagcttgatggggatagcactgaatctataaattaccttgggcagtatggtcattttcatgatattgattcttcctacccatgagcatggaatgtttttccattcatttgtgtcctctcttatttccttgagcagtggtttgtagttctccttgaataggtccttcacattccttgtaagttggattcctaggtattttattctctttgtagcaatcgtgaatgggagttcactcatgatttggctctctgtttgtctattattgctgtataggaattcttgtgattttttcacattgattttgtaacctgagactttgctgaagttgctgatcagtttaaggagattttgggctgagacaatgggattttctaaatatacaatcatgtcatctgcaaacagacacaatttgacttcctctcttctatttgaatacactttatttctttctcttgcctgattgccctggccagaacttccaatactatgttgaacaggagtggtgagagaggcatacttgtcttgtgccagtttttaaagggaacgctttcagtttttgcccattcagtatgctattggctgtgggtttgtcataaatagctcttattattttgagatacgttccatcaatacctagtttattgagagtttttagcatgaaggggtgttgaattttatccaaggccttttctgcatctattgagataatcacgtggtttttgtgattggttctgtttacgtaatggattctgtttattgatttgtgtatgttgaaccagccttgcattccagggatgaagccaacttgattgtggttgataagctttttgatgtgctgctggattcagtttgccgtattttattgagtattttcgcaatgatgttcatcagggatattggcctgaaattttctttttttgttgtgtctctgccaggttttagtatcaggatgatgctggcctcataaaatgagtgagggaggagttcctctttttctattctctggaatagtttcagaaggaatggtaccagcacctctttgtacctctggtagaatttggctgtgaatccatctggtcctgggctttttttagttggtaggctattaattgctgccttaatttcagaacttgttattagtctattcagggatttgacttcttcctggtttagtcttgggagggtgtatgtgtccaggaatttatccatttcttctagattttctagtttatttgtgtaaagatgtttatagtaatctctgatggtagtttgtatttctacgggatcagtggtaatatcccctttaccattttttattgtgtctattgattcttctttcttattagtctagctagtggtccatctattttgttaatcttttcaaaatgcagctcctggatttattgattttttgaaggctttttcgtgtctctacctcctatggttctgctctgatcttagttatttcttgtctttcgctagtttttgaatttgtttcttaacctctttgagactctttagaatggggataataatcatatctatagcagagagctgttataaagattaaacaatataataaatatggggcgctgagcttcagagtttttgttgttgttattattattttcctaaaaatgcaaatctgatttgcatttgactcattgactcacatcagtgggtcttcctttttattgtccttcatcatatgggtcctaatttcacatgcagtcttataaaaccatctcattttatagtccaagaatattaaaggtacttgtaggctcccaaacctacacggtgaaaagctagagagcatgggctctcttcaggggttaacttcaggaagtgccactaacaaggacgtccactaggtggtgagcaaggaaagacggaggtgaaggaaccgaaacgagtcaagtccactgcttagctctactgaagttttgcaaacatcataaatatgtctgaaatgcagttttgatttgtagtatttgcaatttccaagggccatttaccacaggtagccaagagttagtttagcatttatgaaaaagataggggagggtggtggaaaagaaggaggaggaggagagagagaaggaggaagaggagaacaagaaccaaacaaaaacaagaacaagaacaagtagaagaagaggagcaggaggaaaaagaagaggaagaagaacagcaacaacaatgagtgaaggaggaggagggtaaggaaagatgcataggagaatggaaggaaggatagaaaggagggaaggaagagagaatctagtcacattactttctgatcagcagttcatttttgtctcagtgggaggcaatagaggccagtctaggaaaggggtggggaaagaggaaagagaagtgcaggaggaaggggagggaaaaggggaggaggaggaggatgtgagactgggttagagaaatgaaagaaagcaaggctttctgttgacattcagtgcagtctacctgcagcacagcacactccctttgggcaaggacctgagacccttgtgctaagtcaagaggctcaatgggctgcagaagaactagagaaggaccaagcaaagccatggtgagcctttcagcctaaaagacgtttagatgctcagatagaaactcttggggttgtagaggcaggtggcaaggataggaatcaccccatttcaattctggttttaaataatatagaaactaaacattttctcagaccctcaaaaaaagtgatcctgaaatctttcttctcagatatgctgatttcctcttcttgactttgtctctggggagactcttgaagaaatactattgaaatcagatcttttgcaataaacactgtgtctacctgagaagtgatatgctttggaagatagaatttttttaaaattatactttaagttctagggtacatgtgcacaacatacaggtttgtcacacatgtatacatgtgccatgttggtgtgctgcacccattaactcgtcatttacattaagtatattttaaggtgtgcaggaaatttgtgactttgtcatttcagttgctcaaaaaggtatttctttttattaaaaaaagaaatacttttctttcctggtgtctggctatctaattttttttttttttaggtatttgaggcattgacccattatgatcaagagtgaggctataacattaaatataagcatcaatagttaattaagcagcaacaatactttaaaaaatatacatagtaaatattaaatagttttatctaatagctcagcagaaaagcaggtataaaaattaccaaaccatagaaaaaattcagggcagtaccgattagcaacttgagactaaagcgtaaaaataaaatagaacaaaacaaaactgtgcatcagttctgatgtaaatttgaagtaatttttcatctatgtctgagaaacctgttacctcagacagggttagtagacatatgtgttttattctgattattaagaaagttgtaagcaccacctcaaaggctataaatgtgtggtttaagagtatacatctaaatataattttgtatttcatttgcagatatttccatggaaatgtcagagcacccagagggacttatggaacatcttcaagttgtgggggtggacaatgctctgttgtggtatgttatgatatttatatatcgctaagtctattttacttatattcatttttcttaaatatccactagttatacatagtctaagggaaaattatttcacagagctgttaattctatcccttctgtaaacatctcttttcttcttacctttagttcttccccagaaactcctgaacactatttttaacctataatagcccatgctgtagagttcaaatcccaataaccccacaaaatccctcaattataaaggaataatgttaattaagaaatctctgttaaggtacttacaatctgtaccaaatatttagcacctcattttctattttttattcatagttcagtgtacattaatgtcatttctacaattacaatacgagcttattaagggacgggggtttatcattttttggtccttctcccattgttgtgacaaattttatatctgattcttgaagactctccagcaatagctttgaacttggtttttcatttcctaagtaaactaatgtcttctttctccctagcctggattttcagctctagccaagcaaacatgctaactctcccgttcacacattccttatgccatgtctgcactgtgtcacatagaaacttagtgctcttttcatacaacaggtattttctgagtccctacaatgtgtgaaatttatgctaggcactaaggatacagcagtggacacaacagttttttccctcttagaacttgcattctagtggaatgctcattcaaaactctgttcaaaatgtttattttatgatgctctttaccatcaattatatctgtttctttactgtattaaatagtgattcatgtagatcataccatgcttagaatgccatatattattatgaagtcattgtgtaattatgtgtttaattagatatcttcaaagccctcatatttgatgggtccatatgtttattaaacatcatcagttgagtctctttgtgtatagaacatgatctaatgaatttcataatcctataccatttggctttgtaaattgttctttttaaaaattatacagttagatatataagagttgagtggtatattgggcttttccagaagcagttcttcctatggtaaaataaaatgttttttatgtaaaagaggttacttaaaagtatgtcactgttcttcctgtccttattatgcttctcccataggtacatatgtgttggccttcaagaaatgattccaggattaaaaagtatacgtaaattgtatagttatatgatattacacggtaattagttgtaaatcattaacagctacaaagaaaaagaaatatgaatgtctaaaatatgttggttaaatttcacctgaaataattttgagaaaaaaattaataagaaaataaacctagaaaaccactaaatttgtttcaaatagaaccttagataaaagcatcttatattcaagccagaaggtctaggttctacttcaaatctgcaaacaactattctgtgatcctgagatggtcacatacactcttaggctctgtttcctcatctctaagtgtctagctcagcctggagtagtgctaggttctttttagctgtaacattatgtaagtctgcataggtcacactgatgtcttgcagatttcctggcacatcatggaaccgactgctggacttaccattattctgaaaaacccatgaactggcaaagggctagaagattctgccgagacaattacacagatttagttgccatacaaaacaaggcggaaattgagtatctggagaagactctgcctttcagtcgttcttactactggataggaatccggaagataggaggaatatggacgtgggtgggaaccaacaaatctcttactgaagaagcagagaactggggagatggtgagcccaacaacaagaagaacaaggaggactgcgtggagatctatatcaagagaaacaaagatgcaggcaaatggaacgatgacgcctgccacaaactaaaggcagccctctgttacacaggtagggagtgacaagacggctatgctgcctcagactcaggaagggccacggttaagagaatactcagatttaccccatggaaaggtggggggatgagaacagcttctggttcattctaaaatacatctagccctctatataatcttgcatcgtgtcactcctaagaatttttggtgtgtaagatttgtccctgtgcacaaaagctatacccctaaatcaagttacatcaaaatgatagatctacgtaggaagtacagaggaagagctagacaatcagtgcctttgataataaggcaggggaggagaagctgacagctggggccagttggaaacttaggctcacatcacctcagttttcacattgtgaagtagagagtgtggtgctgcgtgcttccttcttggtctaaccttatataattttatataaaaattgcactatctttggtgtatgaatatttctgtaaaatcttctacaattccaaaacagccagcattttccaagtgatgttttaataatgaaccatagttaatttggtctcttataaattggactctaccgttttagcaaatttggactttttaatctttgatttctataaagaaagggattgccaagaaataattgcatgcagaaatgattgaggtcaggtcatcatttaaccttctcactcattaaaaacaagtaatttcaagagtttcaaggtatgccactaagtttcctataagtgttacagaatattagtattggtaatttcattccaaaagcaaataaatgcctatgactatatgcttagtgtattttatacgtaaaaattttagcatatgatttttatgctatgaatttacaaataaacctttcctgattatttaaatcatctcagacaaaaggttatctatgtctaaagaaatgactttgagtactaaaatgtaatcacattaaaatattttttttctgacctccttaaagcttcttgccagccctggtcatgcagtggccatggagaatgtgtagaaatcatcaataattacacctgcaactgtgatgtggggtactatgggccccagtgtcagtttggtaagtctctttcctttctttgcttcttcttaggtaaagtcacaggaatcattatagcttatcatgaagctggttggaacaaaatgatactagccactctgagaaatgggaagttttgatcagaaagctctgctttcacaatattgttacctttccgtaaagatttcataagtcagcatgaagtttcgactcacttctcaacaagtctttttgagtaccacaagaagcacagtgttgggataaaagctgtcagggttaccataaggaattagcatggtagattcccgctctcaagaagctcacgatctaatgagcttgttagattaattagaactctaaggtctggaagaaactatgccatttatcattaggaggctgagttacccagaaagtatcttgctttttccttctagtagttcctttccttcttgcagttctccacacttaacacatgtgctctgtagcacactgactttgctggtggccttctctctcattttgcacatggccaaaaaacatgtcatctttaagacattgttcaaagacagtttcttctaggaagctttcttagttctgatagctccacatatttcttcctcatttctcccacttatgttgaagtcatctgttcacttgtccgtctcctctggtactgaaaacttcttgagatcagtaagtgtcctatttatcattgcatctttgggatccacaaaatgcctgtatatatgaggcacttgcttgtgagcctgaattgaattggacaatttaattttttaaaaaagcaatgtttgtaaacaataaagaattaaaaccaaaatacatttaaatgtcaaccaactgaaatagatctatagatctaactcatttcacttgatccctgggccatgactccttcctaatactttaccctcaccccatttttgaactctattttttaacccttatgttattggtatgcctattttactcatttttaattattggtatgcctatttcactcatttttaacattttacttttctttgtcttggtttctctcatatcactcttttctcattctttctacctgtgatcatttctcctgagatccttcatgagcacttatccaggaccataaactactataatttctcagcttttgtcttttgtatattgctcttctgactctaatctacatgtatcctttggtcaaacttactgacttttgcggactcacaaatctatgtgatctttggactgataagcctatctccagctctgaactcaaatatgctaaggatgtcctttgggatgtttaaaagactataaaaccaattgttcccagtcagcttttctcttcgtatttcttatctcagtatgtggaatcaccatttacatgggcaccctggtatgagactctcttaactcccccaacatttatgcagggtaacattctaccaatttttacaacttagtgtttttctaatttgtcttccacttgtcaactctactaccattgccgtcattatctttcttctagattcttgcaatagtttattagatgagttccacaattttaaattagctcccctcaaatacattattcatactacagggagactgatcaattaaaagcaattaaaacacatcacacatacatgacaatccacccattaatttctacctaccattttgtcctacagggtgaaatctaagctcttcaagccccagagtaatgcttgatatataatagatactctttaaatcaatgaaaaaagataacattttctcttagttcccatgtttctccctaatctcatctcatatagtttccaaatacaaaaattcttctgattccttgagtccattcttccttgaagtctctagagcaaggtagcaataatggcttaaatttgacagatgaggaataagacatgaaagttgtactgtttactaaatggcatggcagggtctaaaatgtgaaaactttgatttccaagtcttaaatttacctattgtaccaccaatcagaacagggaaatagatacagtttctggagagggttgtcaaaatcaaaagagttaaaattctggaactgagctagaatagaagacagaattgaggtcaaaatgcttcctagacttttatattctctccttgcaaagaaggcttattatggagacccactctttctctgaacatcttgctcccaatactctagtagactcaggggctctgatgtgatagttatttcccgactaagctggtcattcccagttacacctatttggctttaaggattctcactacagataatgctgaagataataatatgaagactagctaatgtttacttagaatttctgatgagtcaggctttgttctaaggtccttgacttatgctaattgaattacatttagtttccatatcaatttgataaagataacacaatttcattattcctcttatatagatgaagaaactgaagttggagggttcaagtaaccttgtttaaaggcacatggttatcaagtggcagggctaggattcaaatccaggcgtcagttcctcttaactcttccccatactgtttctttccctattgaagtgattcagtgtgagcctttggaggccccagagctgggtaccatggactgtactcaccctttgggaaacttcagcttcagctcacagtgtgccttcagctgctctgaaggaacaaacttaactgggattgaagaaaccacctgtggaccatttggaaactggtcatctccagaaccaacctgtcaaggtgagtaacttcagactagaggttttgtcatgcaatcctgggcttacagtcagaacattcagtagaagtttgctgagaagtcaaacttaggagcctaatttaacctaactttgtttaacctactgtgatgtttctcaaaggacttattctaactaaatttttttgaaaaacctcccaaacaaaaagtaaaaaccaaatacccctgaagccatctcccagtgtgtaacatgacttatagcaatacagcatggttatactgtgttttttatttttctcattgccattgcataaataatgtcttgttgaacctcagttacattttggttcttctcctctcaataacacctgttttatgtggtgtcctacttaataccaaccagtttccttcccagggtagtggaggtctttcttggttgttttatttggcttattcttaaaatcacttttacttttcctcatgcataaacttttaggagaataacaactgaaaaacaaaaacacaatctcttgatcttttcaagtttgaaataaggtaggtttttttttttttttcatttttaactgccaaccttatctccatatgggagaaaaccaatgtcatctgaacttacgaagttttggttaacttttctacaagtatgctcctgatgcattagtttaagtagtttaattcttagaagtgctatcaaaatcccttattgaaattataaaactgtcaacccacctactggaatttacggaagttggacttgcttcagtgaattgggatgtttttcaaaatgcttgggtagatatcagaacagatgaaacggcagagattctctgagaatatcccataagagcccttgatgcagaggccatatggcatggtacttccagcagaaggggagggtcaccttagctagggcagcagcctggagtagctactcctctccccacagctttcaatgcttccttgccttcatctctcattcaccacccaccatcattctcaagaaaataaagcctggaagcaatatcacaagtaatgtagtcaggcagctttggctaaaaatcctttgctcaagggagggtctctactcagaaatactgttttgtcttttttttttttttctttttcattgaagtgattcagtgtgagcctctatcagcaccagatttggggatcatgaactgtagccatcccctggccagcttcagctttacctctgcatgtaccttcatctgctcagaaggaactgagttaattgggaagaagaaaaccatttgtgaatcatctggaatctggtcaaatcctagtccaatatgtcaaagtgagtaagtttgtcctggaaaactgaaatcttaacgatggagctgatggatgagcagatatgaggaaagacatacataaacatttacatgttgttttgctaagaatatgtggcctagaaataaatttgtatgcttaactcactgtaaaatctttggctggtctttcctcctcctttaatgacaatcatttcctttttttgttctcacctcttgccatcttaactcctaaaatctgaactcactgatttactttttacccattcttctattccactacaatctaacatctctgttagcccattgaaatgcctgtaaaaggtcactaatgaccacctacttccccaaataatggatactcctgaatcatcactaagctaatgcctccaaaatctatctgtatatgagaagaatcatgtcttgttcatctttgtataccctccacctgacacagtgcctggcaataggtgctaaagcaaatgcatgttaagctagcatgtgaaagaatagctacctgtgtctgctcctgagactatctgcatggatgacaaaagtctttaaatggtaggatctacagaagctgtcagaaatgctgatctctgtgtgctgcgtgcccagggccagggagtagagtggatgagcagagagaggcagggaggcctttagcagaggactgtgtattaggcctatcagagacatttccctttaaggcctagctagtgttcatttcctcctcatcttcatcaagccaacaggtaccttctgtctggagctcctgggaacttgagccttctctcaatcatatatttgggtgtggggatcaaatcaccttgaaaaggttcatcaaagtaatgggaagaactaaggatagaatcagaccctctgccaatatgtaaaaaagtagattccttcaaatgttagtatcaggagacagatttttttttataccagtattttcaaatagaggctcccaaatgaacttagtttacacttacaagagtatctctaaacatgcccttttacttattcgtgaaggaagtagagggaagtggtaactactgcattggaaagaaattagtgcaggtccttggcatgtaaaaatcaagtgcttatttttgcacaactgctttaaagtaaaagcattaatgatttcctttgactggtgaattatccagttcagatcattggcttttatttttcctgaagttgtattaggcttttagctcttctctgtgtttcagagttccagtcattgaacaagtccatggagctaaatacaacgatgaccattcttgccaacatttttaggtgcattttcaggaactctatgaaccacaaatctgggcattgagattctgtaggcattagactagcaaggctggtccagtctttgcctatgctgtagactcatcaggggccttcccatgccagtttcctcatctgtcaaatggcatcaaatgggctactactgggagatgtaaggaggaaaaaagtcaaatatcatgagatagactaaggaaataatgctggtggtctcatgctatgtgccttactgatttctctttcagaattggacaaaagtttctcaatgattaaggagggtgattataaccccctcttcattccagtggcagtcatggttactgcattctctgggttggcatttatcatttggctggcaaggagattaaaaaaaggtatgtgagtttaacttcacatgaaaagaacacaactttaaagtgaaaaagaaaaaaaaaagaaacccacaggaaattaaatgtgatagattcaacacaagcaggatgccaagctttacattctagagccatcagtccctggagacatgtaaatcagcccaggacacaccttcattaaaacaggttggctgattttcgcttttcatctgataaacttttaaaaatgtctattaccttcaaggcagcttgctaggctgataacaactaagtgagatattctaatggttctttgctcttatgtaattctttaatacttttttttttttgagacagagcctcactctgtcaccaggctagagtgcagtggtgcaatttcagctcactgcaacctccgccttctgggttcaagctattctcccacctcagcctcccaagtagctgggactacaggagcgtgccaccatgcccagctaattttttgtatttttagtagacacggggtttcactgtgttagccagagtggtctcgatctcctgacctcgtgatctgcctgccttggcctcccaaagggcttggattacaggtgtgagccaccacgcctggcctgctcttaattaattctgaaaaaatgacacactatctctgtcctctaagagcctacatgccttggatttcaatgctacaattccactaggaagtgggtctaatgtccactaaggtttcaaggcactgctcccaaatacctgacctcttcaagagtcacctggttcccaacacatgggcattgcattaaccctgggagaaattcccatgtattctcccaagtatctattcaccaaggccacagctctaaccaaatgcaccatatatgctttccaaccatccgtcactggagaggaaaagagaaggaggactgccttgagaagttaacatctgctgcccagattatcactccctttaccttaaggcatgagtgtgtctcagctttaaagtgtgagcaacccactagcctgcagcaggccttgggtgtatggtgccacatttggccaaactcacctggaagaaccattcaaggctgtaacattcatggacattgggcagcttttaagatatacctgttttggccaggtgtggtggctcatgcctgtaatcccagcactttgggaggccgaggcgggcggatcatgagctcagcagttcaagaccagcctggccaacatggtgaaaccctgtctctactaaaaatacaaaaattagccaggcgtggtggcgggcacctgtaatcccagctactcgggaggctgagacagaagaatcacttgaacccgggaggcggaggttgcagtgagctgagaccgcaccattgcactccagcctggtgacagagtgagactctgtctcaaaaaaaaaaaaaaaaaagatatacctgtttcaagttcagggatgatctcgaaacaattgctaaccaactgctctgtgttgcctttctgtgggctcagttgattgtcattttaattttccttccatcaaattagttagtacgtattctgttcactgaatatggtatgtaaaggttgccccctgtccatttacactggcaattacaaaaatattatttatcagtccctaattgcgtgccactctgatcttatctttcatttaaatttgagaatagtgggtgctaggtaagttttctaaccaatccagaaagacaaagtgtgtgaggggggtggggattgttgatatgcaagaacttcattagctatgtataacctgagagcactgagcagttaaaatgtctctgcccttgctattagaaattctgtgctgattgaatctcactatcttatagtattatacagtactaagtactatacagtactaagtataagtatcaagtactgcattaaggcaaaagaagaatgacagttttctccaaccactgattattctttccattgagacttcaaatcttgaccccggttgtcctgtctttcttcctaccttgggcgatgatggcagaactgacggatagagaacagggtgggttattacacactgccccctgggataaggtggctattgtctaaataattttaaggactttggggctgtaagtcaccttaataaggaagctatttatttccgaattctaaaatcttttaataagtgtttgtagaatcaaaagaatagaatcaaactcatttgcatgtagtgaggggttagctggctaaggctgttttataagcaagggtaaaaaaattagaggggttgtttttaaattttttaccttggagtcatttctgtacaagatctcaaaccgataacttgaaaactgctgtgggaatcagtgtggggcaaacaggaaacagataacgggcagttaggctagttacagttatgccaacaaagaaaacagaagccccaaaagatcactggcttggtaggaagcttagggtatctttaagataacattaaatagtcttcatctgtgggccaggcaccttggctgtcacctctaatcccagcacttttggaggctgaggcaggaggattacttgagcccacgagttcaagaccagcctgggcaacatggcgaaaccacatctctacaaaaatacaaaaaattagtcaggcatggtagcatgcacatgtagtcccagctacccaggagactgaggtgggaggatcacttgaacccaggaggtcaaggctgcagtaagccatgacagcaccactgcactccacaacagagtgaggccctgtctcaaaaaaaaaaaaaaaaaaagtcttcatttataaaacaacatcttccattttcaccaacttacaaatgattctgctttccaaagattttagttgtaggttggtcctttaaaacatgaagagtatttttcctatggaggcaatggtagaaataatggctacattcccaggctaaatctaagacaaaatatagttaatggcatttacaaggataaaagtaaaaagtcataaatctctatgtgtgtgtttaggtgtgtgtgtgtgtctatgtgtgtgtgtatatgtatatatatacacagagagagagagagagagagagagaatttataggctttttgggttctaatagttagaaaaagggcacaggtaactatttagagcatggtagccaatgaagtgactagagccttcacccctattcttctgtcctcagatgaatcttctgactctagcactttgtcccctgccctagtagtcttagtatggagactttccctcctttcttttaggaaaggaataaggaacagttccagaaacatgtgtccttgtgcatgggctcatctagacacattttgtgcaccaggcattatcattttctgattagtcactaccattggccctgtttggtaaataaggaaaccagggcaatgatgttttaggccaaatctcaaaaataccatatcagcaggacccagagtcagagattagactccagtccagatacatcttctaaaatcactggtcttcagatttgtgaactggttttttcctcggttggaagaatttcccaccagaaccaacacacagggttagaccagggcatgaaactgaacacatgcccccttagttcctttttcttcaaaatgaaactctctcagtaggaacagattcttactcatctattgctgttaggttcatcatccctaaaaaaaatatttatgtgaagctaaccagaatctgaaattaattcagatttgattccccctgctcaagtgcacttggtcatcagcaggctgaattttagaagaaaagatttcaaatagtagtctttaatactttaaaggattaaaacagtaatgcaacactgtctacgtgctaggacctgaactaaatacttggaaatattttattttatcaacccaatgaggatgatacaattattatgcctctttaacagatgaagaaattgtagtttagaaaagaaagtagctgttcaaatacacactacactacaggtggcaaaatagggctttcacctgggtaggatgattctagaatgccactttacagccactgaaatatattgcctcccaaatgattctttctgctcaaagagttttttttaagttatctacttatttatattctgcttttttcaaaaagaatgtgagaacagtacaaaatgtgttcagtatagcaaattaaaattaattaaaaagtaagaaaaagaagccaatttgggcaacccactcgggtccccttccacgctgtggaagctttgttgtttcgctcttcgcaataataaatgagcttgatgttttattgagtacaaaaaaaaaaaaaagaaagccaaatttaaacttagggtacaaaaatcatttggaaccaaggttgaagttatggcacaaaaatgtatgtcacaaagttttatatacttggtaggagagggtctcagatctagctctgagtttccttacagccagtcaaaggagaaccatgtgatattccttgtgtttgtaagataaaaacacattagttactcagatgaggctgcacaattcctaccaacaagaccaaagtgaaattctcttgtggattctcatagagatgatgctgtgagctgtaatggcacatagttttacagtattagcagctgtccctcaagggaagaatctgcaggtaggatgagatggcagattgggaagggataaacacttgaatggacatattgggtcttgccaccaggcaatttagcaattctgtcttcttgagtagcacggagaatggaatggaacctcaggaggcatctgcatcaacatgtctgttctgtattagtgtctaccactgtttattaagccagttcctcaaatctcctttgacacagatagggtccacctaacaaatacctaatatacttcaaaagacagttttgagagtgggagtcttccttctcccttacttgaaaaactttaaattgtctaatttttgctaatgccttttctctattttctattttcaggcaagaaatccaagagaaggtaagttttattagtggcgaggagtttccacatctgctgattcattctctacttccttaagttacttcctgctctagctagacacattaaccccatagtagtttatttacctggggtcctcatccaaatgaccagataaggtgataaatctactagcttcctttcagagctgtgctttttggtgctagtggagctgaatgaatgaatgaacgaacaagtaatccctattagaaaagggcagtttatgtaaagggagatttttctgattacctcagaattttttctgagggttaaaaacattgtggtgtgttcttcttgttcttaaatatattatttaagaaatattcaattgaacaagcacttattgagaaatgaataaatgcttattcaattgactatttgcattcaattgctctaacaggcattgtccttcagaaatgtgggaaagatagggagcatgaattctacctacagcttccccaaggaggcaagtatttttcagtttggtcttgaagctcaaatttcttctactggagaaatagcacagtgggaggagatgcagacatgtgaaagttgatggcccacctggcagaaatgaagatggaaaaatatttctcagtatctagggtttagtgacttgctctggaattttaggaaggagagtttaagtaaaataaactatgaaaggaggactttggtgacatattcagtacccagctggacaactgagcttcctttaaaatgctagaaatgaagtgagatgatttctgaagggattggatgctggtttgggcaaccatcctaccaatcacaaacttagtatgggccattgcttagaatgcaaaggaaaaagtggggaaaaatgaggcaccagaagccagatcataaactaatgtataagccatgtgatatgggctttatcttgaggtcttttgggatatcactaaaggggtttaaacagtgagtagccttacctctggcatcttataaggtcaccctgcagagcagtatggcaagtgtgggagacaggtgagcctggattcaaagagacttgttttggaggcatttgcagttattagattaaaaccgatggcgcctgtctagggaactagtagtaagaatgggttcatgaaataagaggaggtgatattaactgaatgtgtctgttaattggctaaaagtgagagagaagaatcaaattatcatctttctcacctggaaactggcggatggtagtcctgtttacttctgagaagggaacataaaagaatgagaggttttggaggtaaagatcatgggttcagttttgtactgagctttgggtgtatgcacatcattcactgtggctcattggacctatccaaagcacagaggctatggcaggagaagtggatttgggtccctcacatttcaggaggtaactgccatctcaggagtgggtactatcatccagggagggtgtgagtgctttaagaatggaagaggacctgggagagagtatgggagccagaggaacatcattatctaataagtcacctaagggaaagagaaatgaaaagatgttgccaggcagggagaaggaagaggagaaagagtgtggggtaatgaatgccaaggaaacaaagaaaggggaacggtttcaaacattgccaagagaaccagtaagtatcccctggatgcaacaagggtgtcagtggggagactatttgcagtgcagacatcaagacagaggtcagacggccaagcattgagcattactgaggatgagaaagtagagacagaacaagcagtcatctcttttaaaatgtttggctgtgaaggagaagtggggcaggggtaactggatgaggatgtacgatcagtggaggttctttttattctttttaattactctgtcttctctttactagtgcaaatggagtctagtgaggaaaggcttctttctctgggctggtctccctatgtctgtggcaggaaacccacagatgtgaagatttctttcaaactcgcacctactgagtgaaagtattttctggcacaatctacccagagctgttttctggctaccggaaccacctgttttaattgccactagatggaagcagatcaactagattttttttttttaagatgtccttgaggcacaggaggagagactggctggaagaatattagcaaaaagctaattaccatgctaagcaaattgctatattaagtttaatggttcactgattttttataatcagtcaattaatagttgtttattgaacatttttgtgttggaaactgctaagctttcttgagacagcaagaggagtcagcctggtccctgatttcaggaaaattattacctagctggggagttaagacaggaatatagaaagaaaaaaatcagaaaaatacaaggcagagcatggtaatggccaatgggtgctatatttaagaaggaaaaggtcatttggcttggtggttatagaaaatgttataaagaaggttgcttatgaagaatagataggatttaggtatatggagaaaagcaggaaaggaaggcagtctgtaggaaggaaattgtgtaagcagtggtatggtagtgagactatgaaagcatttttcaggggccactgagcagaactttcttgagcccatggcttattgaggagttgtggagttgaagttggaaaggaaggctggccccaataacataagtcttgaatgcttcaccagatggtctagaaaggcctagcaaagaagaattatttgcccagctctcatttattgaccaaggctgtattaattcataagaatcacagaattctaggtctgaatatgatcttggtggatatcacattcaaactctttttgtagttgaactaattaagtaagttttctataggccttgagcaagtgacagagttagttacaataatcataaacctttatcaaatattaattccatgttgtatactgttatgaatggtttacatgtcttaaatcatgaaatatgcctttaagtctgtgggagaagggtctatgaacatcttcattactgataaagaaacaggcacagagaaataaaatagcctgaggtcacaataaatggcaatgctgagatccatactcatttggatccaggaatcatgctcttaacgcgtatgcttttagaactcaagacccttgactaccagcttagagtggcaagtcccaggcaccctccttttccagtaacgtggttttttttttcacactgaaaccattgtgtgacggcactgaggaagggtggggtagaagtatggtgtgtttttagaacaagtcaaaggtaaaatgaatactatcacactaaacaccatgagcctttttttttttttttaagttcttgggtgaattttcatagtagtttgtgttcatttctattagcttttgaatggtgaatgaatgactccttgggcatttgtggtttcatttcttgctgggttattttgactcttctgcaaaatgactctgtttatcacctcatttggtttctactgtctaaattctggcaggatagaagctacacccaagatacacaggaagatatgatgccaacctcagaggagggcatatgtgaaattttgttttcagaaacatttttttgtctctattttggcaagcacatttgcagctgctgaactgtggtttaccctgacagttcatcatgagaccagctcctcagaatctggttctccctttgaaaggtgctgtgaagacataccatatttcattctctccttgtcctttccaagaataagacagttgtgtcacacaaaaaaagtgtcacttatttctttaaactaaatgtgttaccatctcattaaattatatcccaggatataatttatcacgagtttataaccaccactatttcatgagtttaaattttctccaatttcactttccatttaagcatgccttctaattccttgactttccactgctcaaaatcaatctacagctgggctcggtggctcacgcctgtaatcccagcactttcggaggccgtggcaggtggatcatgaggtcaggagtttgagattagcttggccaatgtggtgaaaccccatctctactaaaaatacaaaaattagctgggtgtgctggcacgtgcctgtattcccagctactcaggaagttgaggcggaagaatcgcttgaacccaggaggccgtggttgcatgagctgcctccgtgccactgcactccggactgggcaacagagtgagactccatctcaaaaataaataaataattaaataaattaaattaaattaaattaaattaaaataaacataaatttaaaaaatcaatctacactgtccttcagactcattagatctggagacaaagaccgtatgcaccacaaaaatttctccaagtggggtctgtgcgccagtggcataagcatcactaaagagcttgttaggggtgcagaatctcaggctccactcagacctactgaatcagagtctgcattttaacaccatctctgagtggtaagcacatgaaaatctgagaagtgctgctactagggtttgcttacatttgttcatcttcagaggttcctaaagcctggcctcttgtctgagatttccagctgaaagcatttccttgctcctcttctcatctctaatgaatatttacctttactactaacactccaagttttgcaatttttaaactcttattatcttttgtttttctttcagtatgaatgacccatattaaatcgcccttggtgaaagaaaattcttggaatactaaaaatcatgagatcctttaaatccttccatgaaacgttttgtgtggtggcacctcctacgtcaaacatgaagtgtgtttccttcagtgcatctgggaagatttctacctgaccaacagttccttcagcttccatttcgcccctcatttatccctcaacccccagcccacaggtctttatacagctcagctttttgtcttttctgaggagaaacaaataagaccataaagggaaaggattcatgtggaatataaagatggctgactttgctctttcttgactcttgttttcagtttcaattcagtgctgtacttgatgacagacacttctaaatgaagtgcaaatttgatacatatgtgaatatggactcagttttcttgcagatcaaatttcacgtcgtcttctgtatactgtggaggtacactcttatagaaagttcaaaaagtctacgctctcctttctttctaactccagtgaagtaatggggtcctgctcaagttgaaagagtcctatttgcactgtagcctcgccgtctgtgaattggaccatcctatttaactggcttcagcctccccaccttcttcagccacctctctttttcagttggctgacttccacacctagcatctcatgagtgccaagcaaaaggagagaagagagaaatagcctgcgctgttttttagtttgggggttttgctgtttccttttatgagacccattcctatttcttatagtcaatgtttcttttatcacgatattattagtaagaaaacatcactgaaatgctagctgcaagtgacatctctttgatgtcatatggaagagttaaaacaggtggagaaattccttgattcacaatgaaatgctctcctttcccctgcccccagaccttttatccacttacctagattctacatattctttaaatttcatctcaggcctccctcaaccccaccacttcttttataactagtcctttactaatccaacccatgatgagctcctcttcctggcttcttactgaaaggttaccctgtaacatgcaattttgcatttgaataaagcctgctttttaagtgttaactagtttgcctagtttgttattttgaaattatcatatgttttgttttctccccagtgagattacatgctccttcagggcagagtttgtgtcagatccctggagtatctagtgcattacttgacactcaataaatgaatgttcaaataaatcagaaagagcatacagtgcactgctgatataagtttcagcaaaccctctttctctatggcatctgatgacctgggcagatatcacctaatgtcaacagctgaattcttatgagagaatagagccctttcagaagctagctggaaatacctccttgtcccatggccaatatagatttcatacaaatttgcacacattatgagaataattttttggtaatgattacacttttctttctcaaagacatctcagattctgtattatagcaaaagctgttgcaaaagattctccctatagtacactgtaaatcttggatgtgcaaatcacattcatgtggtttagggtacatcccctggaggtgtacagtgcacacgtgcacagacacacatggcaaccctgacaaaaatgtttattccactaacacatcagggccaaggaacccaaatggacactactccttgtaattatgatgtatatagatttaaaaataaagttctatattcaagctctaggattcctatatgatcttaggaattacataatagtaatcccataaatcaagattcataatataaaattctccagaaaccttggtcttaacctccctgagacttacttcctatgcccataaaacaagaatgaaatttgccttgcttaccccacagggttattgtgatggtaccttaagtatgaaactgctttgtgaactgaatctgaaacacagactttttttttttttttcctcactcaaatcttacctttcatgctttcatggtgtaagattctggttcttatcctaaggctggaacagatggagctctgagtccttatcctgagattagaagccaggaagtctttcacttgtgttccaataggaactcagccctcagattttcactgcacagggtcagctctgccccctgcacttctgcttgcgggaggaggaagggcctgggacagggagtcagaggcatcagtgggaaccctgcctctgtctccgtgatgtgaccctggccagttgttactctctctgaacttcagatttatttatgaaatggggatcccattatcttcgtcacatgattgtgctccacattttatgaaataactcctcctatgctttactcagagtaccaagttcatgaaattgtcagagtcccaggaacacagaattattcattccttctgatttgttcacccaagatcaatgtgcctgggctgtattattgtagtttcctacagaaatagttcaccaaattaaaatctaatttttaaaaaattagctgggcatagtagcacatacctgtagtcctagctagtcgggaagctgaggcagaaggattgcttgagctctaatgatttaatgagaatagaaagaagcaagaaagaggcttcttgtccaaattgcactgtggaaaatgaataaatgtattctttagacatctatatttttccccttaaacttcctcccatctgccagttgacttctctgtacagttctttctccaaagttctttgcattgccctctttcaacttcagcaatttgatttttcccttctgttcaaatgtcctattatggacattttatggaaagaaaatctgccatcaccataacagcctacccaccatttatgacaaaggacagggaaattattaggagaaataatgagatctttacttccctttggcctttgtggccttgtctgatccagtgggccccaacattttatgagatatatacagccttccctgcgagactctgaaagggttttagttaaaagtaatataataattatcacgcgtgtcggtgtgaagagaccaccaaacaggctttgtgtgagcaatgaagcttttgaatcacctgggtgcaggtgggctgagtccaaaaatagagtcagcaaagggagatggggtggggctgttttataggatttgggtgggtagtggaaaattacagtcaaagggggtttttcacttgtgggtaggggtgggggtcacaaggtgctcagtgggggagcttctgagccaggggaaggaatttcacaaggttaatccctcagtcaaggtggcgcaggaacaaatcacaatggtggaatatcatcagttaaggcaggaaccagccattttcacttcttttgtgattcttcacttgcttcaggccatgtggatgtatacgtgcaggcttgggctcagaggcctgacatttctatcttcttatattaataagaaaaataaaacgaaatagtggtaaagtgttggggcagtgaaaatttttgggggtggtgtggagagataacgggcgatgtttctcagggctgcttcgagcaggattaggggtggcgtgagaacctagagtgggagagattaagctgaaggaagattttgtggtaaggggtgatattatggggttgttagatgaaactgtagcaggacaagacacagacaaaacccctcagacactgagttaaagaaggaagggctttattcagctgggagcattggcaagactcatgtctcaaaaaccgagctctccgagtgaacaattccttttcctcttaagggcttacaactctaagggggtctgcgtgagagggtcatgactgattgagcaagcagggggagcaagcagggggtacatgactaggggctgcgtgtactggtaattagaggaacagaacaagacagggattttcacagtgcttttccatacaatgtctgtaatctatagataacataactgattaggtcaggggttgatcttaaccaccaggcccagggtgtggcatcaggctgtctgcctgtggatttcatttctgccttttcatttttacttctttctttggaggcagaaattgggcataagacaatatgaggggtggtctcctcccttaaaacatttgtcgtatagaatgattggtgatggcctggatacggttttgtatgaattgagaaactaaatggaagacacaaggtctgcataagagaaggagaaaaacaggtattaaaggattaagaatcgggagaacccaggacatctaattagagtgcccaagggggttcagcataattacttgcttggttggcaaggtttttggctctatccttgagttttttttatgttgtcatataccaggccagattgatttaggtaaaaacaacactcttcatttaaaaatatgcagagtccccttttttagcagtgagtaaattgaggactcggtgattttggaggaaagagaaattgtaaagccagcaattgtttgttaaagaaggattagaaatggctaggagagagtgagtgagattgatagtgtggtggagatagctggggagaggtagagagtggcataagaatgggaacaagaataagagtgaatataaaagtaaagaatagggctttattagggtgaaagtattggagtgtaccttgtcactgaagatcttctatccactttaagagagacttaagggtggcggtttgaggtaaaaccaggagatatcagttatgatggtttggaggaaaagtataaatcagcactgtaaaaaagggcagggcatttacaagtagttgagaatggtgaataggagtatgactagacagaagattgtagggatgacaagtttttggggcacagttcaagttgggctggtgtctggaatgagactggggcctaataaaaaggagcgtccatacagaatcttaaatgggctgtaccttgtagcatttcgaggacaggcccgaattctgagaatggcaagtggtaaaagtactgtccagtcctttttaagttggaggctgagcttggtgaggtgtgtttttaaaagaccattaatcagttctacctttcctaaggattgaggacggtaaggggtatgaaggtttcactgaataccaagagcctgagaaactgcttgcgtgctttgactagtaaaggcttgtccattatcagactgtatagaggtgggaaggccaaaccaaggaattatgtctgacagaagggaagaaatgaccacggtggccttcttaggccctgtgggaaaggcatctacctatccagtgaaagtgtctacccagaccaagaggtactttagtgtcctgatttggggcatgtgagtaaagtcaatttgccagtcctggggttggggagattagctggacatgatcagcagggagagcacgtgtgttttcatgaagaactatgcctggataggtaatggatgaagaagaaatttgggttgactgaggtaatgggggctgtccatgaagccttgcggcagtacagcccaggtaagttgctgaggctgatgggtgtcagggtcagtccaagtgaaagtgaagagaggctgggatgaagggtgcaaatgaatagtaaagaaagcatgttttgagatccagaacagaataagggttatggaggggttttggagggaggtattgaggataggagagtatatgggtttggcaccatggcgtggataggcaagacaatttggttgataaggcacagatcctgaactaacctgtaaggcatgtccagtttttggacaggtaaaatgggggaattgtaaggagagtttacaggctttaaaaggacatgttgtaacaggcaagtgataacaggctttaatccctttaaagcctgttgtgggatgggatactggcgttgacccaggtaagggtgattaggttttaatgggatagtaatgagggtgtgatttgttgccagggagggagtagaggtgtcccatacctgtgggttaaggtagggggatatgagaggaagtggcaaaggagttgccacttttgggttgggaagaagggcagcaatgagatgtggctgtagtccaggaatagtcagggaagcaaataatttggttaaaatgtctcagcctaataagggaactgggcaggtggggataactaaaaagaagtgtataaaagaatgttgtttaaatcggcaccagagttggggagttttaaggggtttagaagcctggccatcaatacccacaacatttatgaagacaagggaaacaggaccttgaagagaaggtaatgtggagtgggtagcctctgcattgattaagaaggggacggacttaccctccactgtaagagttaccaaaagcatctgtgatggtccaggaggcttctgaggcgatcaggcagcatcagtcttcagccactaagccaagaagatctgggaaggagtcagtcagagagccttgggccagagttccaggggctctgggagtgggtgctgggcaagttggacagtccgatttccagtggggtcccacacagatggaacatggcttaggaggaatcccaggctgagggcattccttggcccagtggccagatttctggcacttgaagcaagatcctgatggaggaggtcctgtaggaatgcttgaccactgtggcttaggcattttgaagttcttgtgtactggagatgtggctggggtttctctcacagtggaggcaaggaattgcaactcagaaatatgttgctacttggctgcctctactctattattgtacgctttgaaggcaaggttaattaagtcctgttgtggggtttgagggccggagtctaacttttggagctttttctaatgttgggagtggattgggtaataaaatgcatattgagaataagatgaccttctggcccctctgggtccaaggctgtaaaatgtctaggagttgctgccaaatgagccatggagtgggctaggtattcatatttgatgaaaaaaagcctaaatactaactgagatgggagaggttggataaagaaaaaggagcattaaccttgactatgcctttagctccagccacctctttaagaggaaattgttgggcaggtgggggagggctagtcacagaatgaaactgtaagctggaccaggtgtgaggaggggaggtgatagaaggattatagggtggaggagcggacgctgaggaagaattggagcctgattcagcctggcggggagcgacctgaggaggagcagtctggggaagaggggagaggtcagatgggtcagtagaaaaggaagattggaaagactcagcgacacttggggttgggactgaggggacaggcaggagggaaagaaggaggatttgggatgagttgcattgggaacagagactagggagggaccgacgtgtaaaagaatgcccagatgtcaggcacctcagaccatttgtccattttacgacaagaattatttagatcttgtgggatggagaaattgaaagtgccgttttcaggctatttggaaccattgttgagtttgtattggggtcaagcggtattgcagaagaaagtaaggcatttaggttttaggtcagacgtgagttgaagaggttttaagttcttgagaacacaggctaagggagaaaagggaggaatggagggtggaaggtggcccatagtgaaggaggcaagcccagagaagagagggtggagacatggagagaaggggttggggggtacttgccccccaggagaggtggtgcttgccccccaggagaggtggtgcttgccacccaggcaaagtggtacttgccactaaggtgaaggatccaggcaggcgtccctgcagtgatcagacagctctgaaatgtgggtgaataatcaggcaggcatccctgcagtgattaaacatcaagggaagactgtctttccaagtccatgaccagtgctggagttttgggttcacagatagaacacgtttcctctgtctctaccagaaaaagaaaggaactgaaattaagggaagggagagattgaagcgtggtgccaagattgaaaggagaaagatgttgagggatagtgagagaggctggagaagagagtaaaaagaggccacttacccaatttaaaattggtgagatgttccttgggctggttggtctgaggaccagaggtcataggtggatctttctcatggagcaaagagcaggatgacaggggactgatctcccaagggaggttccccgatctgagttacggcaccaaatgtcacatggtctgtgtgaagagaccaccaaacaggctttgtgtgagcaataaagcttttgaatcacctaggtgcaggcaggttgagtctgaaaagagagtcagcgaagggagataggggtgaggctgttttataggatttgggtgggtagtggaaaattacagtcaaagggggtttttcacttgtgggcaggggtgggggtcacaaggtactcagtcggggagcttctgagccaggggaaggaatttcacaaggttaatccctcagtcaaggtggggcaggaacaaatcacaatggtggaatgtcatcagttaaggcaggaaccggccattttcagttcttttgtgattcttcacttgcttcaggccatctgggtgtatacctgcaggcttgggctcagaggtctgacaataatatttacttgacatcttggtttgaagcttgatctggtagtggtgttttcaataccaattgttttaacactggtagtaaccataatgatgataacagtaagtaatgtgatttcttttaaaagtttttaaatcttggttgagtgctgtggctcatgcctgtaactccaacaattagggaggtaaaaggcaggaggattgcttgaaaccagaagtttgagacgagcctgggcaatacaacaagaccccatccctaattatttttttaaaagtagctgggcagagtagcatatgcctgtagtcctagctactcagggagctgaagcagaaggattgcatgaactcaggactttgaggctgcagtgagctattattgcatccctgcactgcagtctgggtgacagaataagtacctatctctaataataataataataataataataataataaagtttgttaggttaaacttatcttggcatccagttatcttagtaggcatccaaatccctttttaggagaaagctatcttcttttgataagcctctaatatagcaggtgtgaccctacagacgtagtgttggcaggaactcaaacaatagtaatatgtaattaaggcactctgtgttaagaaaacttagaggagttaattttctctgctcccgtgagcacatgagaagaaaaaaaaaaagagagaaggtaatgaaagtagagagagaagaactagaaatgtgagaagctgaagagctctgtggcgggaggggtaggggtggcagaagcagcctggcctctggggactagtatggatttaaacagcatgactcctcctctgcatcacactaacctctgtaacatcccactaggaatacaaacccagacctgtatttaggttgctttgaaggaggagtttaaggtgaaggggctgcttctttagtttgggaaagtggatatgaagaaatagccataaaaggcaaaattgggacaaaatattttggtagaaacaaaatatttagaagaaaatcggtgctatggtgagcatgaaaattaagctctctgagaattttgagaactcttagagagggtttgcggccagtatttttaattcattttatctggattttagagagatggtacctgacatctggtttacattcctcatagcatttaatccccggccatagatggtattgtcctcattttaaattttaagaaactgaagctcagagatattagtttgtctaagttcatatagctagacagtgtctatagagttactgaatgtctgtttaatagataacgaaaggtagtttaaaagagctgtgtgtctaatgccatagagaaaagggaataaaaaattacttagaatagatttggtttcaaacactcttgctgaagtgggtagtccaaaagtaggcagccagttctcaattcacaacaaaatcactcttgaaagcaattttgagagaataggctatgtctcttgatttcagcatcctcggaactgacccctatgtcaggaagaaaatagatcaaaatagttgttcaatgacaaaggacacaggcatgtttagcaaaaagagaggcttaaggcatgggacagttgtcttcaattaaccaattaaacatttgctgaaaatgtacgactgcaagacatactaccaggggctatggacacataagggcagagttcctatccctggggatccagcatctggaaggggagggaaggtaaacaccctgaactgcaagctaaggctgtgtgtgctatggctatgctaagtgtgcaagctcagagatgctgcggctcagaggaggaagagatcacttggcaaagggcaacagaattcagaggcaaaattagatcctagatcaggtttaattagaaaccaggaggagagtctagtatctaagacaaaggtattgaagttagagatgttggacaggttatactgccttggcagagacctggggatgaaaaagagatagagtggctttcaactctaaagcttataaagtttgtactctagtttctgggaaaacttgagcaagagtggaacaggatcacaatggtattctgggaagattaaggtgtcagagggtttaggagtggagataaacggaagcaggggagaccagtcagtgaatgtaattattcaggcgtgatgatgagggtggggccaggaaggttcaagtgtaaaccattgtgaaggctttggtctctgactagttggggtcagggagcgggggggttggctgggaggaggtgtaacaaagtattcagaaaggaaaatataaaacaacagttctggctaaatatgacttatgcaaatgttccatttttcaaagatcttgtaggaaagtccctcctttgttatatttcctctgcatgaacttagctgttta

SEQ ID NO: 137 - DNA, 2324 bp, Homo sapiens
ctccctttgggcaaggacctgagacccttgtgctaagtcaagaggctcaatgggctgcagaagaactagagaaggaccaagcaaagccatgatatttccatggaaatgtcagagcacccagagggacttatggaacatcttcaagttgtgggggtggacaatgctctgttgtgatttcctggcacatcatggaaccgactgctggacttaccattattctgaaaaacccatgaactggcaaagggctagaagattctgccgagacaattacacagatttagttgccatacaaaacaaggcggaaattgagtatctggagaagactctgcctttcagtcgttcttactactggataggaatccggaagataggaggaatatggacgtgggtgggaaccaacaaatctcttactgaagaagcagagaactggggagatggtgagcccaacaacaagaagaacaaggaggactgcgtggagatctatatcaagagaaacaaagatgcaggcaaatggaacgatgacgcctgccacaaactaaaggcagccctctgttacacagcttcttgccagccctggtcatgcagtggccatggagaatgtgtagaaatcatcaataattacacctgcaactgtgatgtggggtactatgggccccagtgtcagtttgtgattcagtgtgagcctttggaggccccagagctgggtaccatggactgtactcaccctttgggaaacttcagcttcagctcacagtgtgccttcagctgctctgaaggaacaaacttaactgggattgaagaaaccacctgtggaccatttggaaactggtcatctccagaaccaacctgtcaagtgattcagtgtgagcctctatcagcaccagatttggggatcatgaactgtagccatcccctggccagcttcagctttacctctgcatgtaccttcatctgctcagaaggaactgagttaattgggaagaagaaaaccatttgtgaatcatctggaatctggtcaaatcctagtccaatatgtcaaaaattggacaaaagtttctcaatgattaaggagggtgattataaccccctcttcattccagtggcagtcatggttactgcattctctgggttggcatttatcatttggctggcaaggagattaaaaaaaggcaagaaatccaagagaagtatgaatgacccatattaaatcgcccttggtgaaagaaaattcttggaatactaaaaatcatgagatcctttaaatccttccatgaaacgttttgtgtggtggcacctcctacgtcaaacatgaagtgtgtttccttcagtgcatctgggaagatttctacctgaccaacagttccttcagcttccatttcgcccctcatttatccctcaacccccagcccacaggtgtttatacagctcagctttttgtcttttctgaggagaaacaaataagaccataaagggaaaggattcatgtggaatataaagatggctgactttgctctttcttgactcttgttttcagtttcaattcagtgctgtacttgatgacagacacttctaaatgaagtgcaaatttgatacatatgtgaatatggactcagttttcttgcagatcaaatttcacgtcgtcttctgtatactgtggaggtacactcttatagaaagttcaaaaagtctacgctctcctttctttctaactccagtgaagtaatggggtcctgctcaagttgaaagagtcctatttgcactgtagcctcgccgtctgtgaattggaccatcctatttaactggcttcagcctccccaccttcttcagccacctctctttttcagttggctgacttccacacctagcatctcatgagtgccaagcaaaaggagagaagagagaaatagcctgcgctgttttttagtttgggggttttgctgtttccttttatgagacccattcctatttcttatagtcaatgtttcttttatcacgatattattagtaagaaaacatcactgaaatgctagctgcaagtgacatctctttgatgtcatatggaagagttaaaacaggtggagaaattccttgattcacaatgaaatgctctcctttcccctgcccccagaccttttatccacttacctagattctacatattctttaaatttcatctcaggcctccctcaaccccaccacttcttttataactagtcctttactaatccaacccatgatgagctcctcttcctggcttcttactgaaaggttaccctgtaacatgcaattttgcatttgaataaagcctgctttttaagtgttaa

SEQ ID NO: 138 - DNA, 1119 bp, Homo sapiens
atgatatttccatggaaatgtcagagcacccagagggacttatggaacatcttcaagttgtgggggtggacaatgctctgttgtgatttcctggcacatcatggaaccgactgctggacttaccattattctgaaaaacccatgaactggcaaagggctagaagattctgccgagacaattacacagatttagttgccatacaaaacaaggcggaaattgagtatctggagaagactctgcctttcagtcgttcttactactggataggaatccggaagataggaggaatatggacgtgggtgggaaccaacaaatctcttactgaagaagcagagaactggggagatggtgagcccaacaacaagaagaacaaggaggactgcgtggagatctatatcaagagaaacaaagatgcaggcaaatggaacgatgacgcctgccacaaactaaaggcagccctctgttacacagcttcttgccagccctggtcatgcagtggccatggagaatgtgtagaaatcatcaataattacacctgcaactgtgatgtggggtactatgggccccagtgtcagtttgtgattcagtgtgagcctttggaggccccagagctgggtaccatggactgtactcaccctttgggaaacttcagcttcagctcacagtgtgccttcagctgctctgaaggaacaaacttaactgggattgaagaaaccacctgtggaccatttggaaactggtcatctccagaaccaacctgtcaagtgattcagtgtgagcctctatcagcaccagatttggggatcatgaactgtagccatcccctggccagcttcagctttacctctgcatgtaccttcatctgctcagaaggaactgagttaattgggaagaagaaaaccatttgtgaatcatctggaatctggtcaaatcctagtccaatatgtcaaaaattggacaaaagtttctcaatgattaaggagggtgattataaccccctcttcattccagtggcagtcatggttactgcattctctgggttggcatttatcatttggctggcaaggagattaaaaaaaggcaagaaatccaagagaagtatgaatgacccatattaa

SEQ ID NO: 139 - DNA, 51281 bp, Mus musculus
  misc_feature (3889)..(5506): "n" at positions 3889 through 5506 can be any base.
  misc_feature (12248)..(15107): "n" at positions 12248 through 15107 can be any base.
  misc_feature (34241)..(34260): "n" at positions 34241 through 34260 can be any base.
  misc_feature (35928)..(35947): "n" at positions 35928 through 35947 can be any base.
actagatttaaaaggctgaatatgacctcacaggcaggcctgaggatgactgatatgtattgaatgtcaactgcgtactatgaacagttcgcgagcctgaataaagcaatgtgtaaaaatagacacagtactggccttcacggaacttatagtctagtgtaaggcgtcagaggctgccacatcatttcacagataagtagagagttgtaactatgataaaggctctaaagaaggtttgaacagagcatgaggtgggagattgtacagagtgtgaactgggggtgtgcacagagtaggaagtggggtttgtacagtctaaagtgggggtgtatacaaagtaggaagtagggggttgtatagagtgttaggtggaactttgaagagactgtgaaggggatggattttctgaatcagactagataggaaagcctccctgaggacaaatctatatggggaggtggttttggggacagaagagaggaacagaaatccaggcagagaacagaaacatttgtcataactccccctttccagggcctgcggcagtctgtgactgggtctaggaataatcaacgtgagtctccagaatgagtccccccaccccccacatgcaatcctaagagattttttattttgagagtctaagccttgtgtcctgaaatacttccaaacacatcctaaccactagctgggtgaccttgaacagatttccctttaagcatcaatggtctcatttgtaaagttggggtgacgtgttccttgaagaatgtgaaggtgacattcaataaagcaagtataaacgtgtgcatgacagccagacacactaacagaagcgagcaggtgggcgtggtgtgtttggctcaggaagattttcaggcacaaggaagatttgcagggcgtagtagggaagcctgacccaaaacatagggacatggtgctttgaatgcaaattgccctcataggctcatgtgtttgcatgcttgggctgtagctggtggactgtttggggaaggattgggaggtatggccttgttggagatgtgtcatttgggtaggctttgaggttacaaaagaacactctgcttccgagttagtggaaaaagcatctgcccccagggaggccagtttcccatcaagccattgcttctgtctcgtgtcactgtgactccctacaacctgcatgtccatttgactagactctgatggacttctggtcgaccaagaccacccaggagccagaagatagcagggcataaaagacaacacataaaaatctcccagggcacagtccaggaaagggaagacatctaggaagtgaagaaaagacagattttttcatttctgttttagtgactggctttgttctaagcatgttacatggattgtgtcctttgcttctcatgataaaaaacaaaagtataggtatgtatgtgtgagtgcataagtatgcatagacacacacagatggagggtgttaaatttctctggcaaagcagtaaaaatgtctctcttgcttagacgaaggcagcctactgacgtagagttaaattatttcggtaggtgttaatattgcagcttttaaagaagctgcggtagaaaataggactcattaatgtgcagtgtgctgagctccaggctgtggacagggacagggacagcaggcaggctgagctattgcctctgctgcagttctcagttctgctccgtcactgcctgcgtgggtggtgtgtgatcaggagacaggtggcctgcttctgagagccacgggaatggctgtactttgaccaacagcagggacactggcagaggagctcttccccattctgccttgtattgggaagaccagaaataatctcaggaaataaacacacactgtagtttgtgctcctagaccttagtgtgcctaacagccaacacaaagctcattaaagaggcaggttcctgggtgccagctgaaggacttcattcagttaagctgatcagggatttagtaatctgtctttcagttacttcttcagggatgcagggttgtctattagttcagtgtaattcttttgagtgaaaatgtggtgggtgtcaagctgataaagacaggaagattctctggtgaccagttaccgtatttaaacccattgatgtaaagcacattgtagaaaggtgttaagggagtaagtagaccaatgcgagaatgtgtacacatagttaaagggtcatgagcgtgggtgtgggtcttagccagatgtgatcagagtactctgcaaacggaaacaacaggagacagaatcgatgatggtatagaaagactggcctccctaggggtgggaggtgagcgcttcttccagtaacttctagccttatccatctcatcttcaggatgatcagaaggccggagtcagtaaatataatatgaattgtctctcccgaagttggaatggaccaccttcgttctctaaaggagatacttaccctgtaataagatgttacgtcctctgagagacctgaccaatacattggaattgatcatcaaaataaataaataaataaataaataaataaataaataaataaataaatgggagagtgtttttaagatcttttgtactagcggcataggcttgtatgtgaagatctcctcacccactgttctctaactgtaaacatcactgaacctctcaaaacctaagcctatacgtcaactaaatggaaatgatgaaaggtggagtctgtgcccaggaacacaaatatgaactgggatcatattaagccccagggaagaatatatatttcttgtttctctggtgcctgctggattatgtggtgtctatacgtattatataaaatgatgcacacgtgaaaggtactgttattacttcacacgcaattaagcttgagctattataaaggtgacttgaattaggagatttgtcatggaatggcatcacaggagcactttctggttgtgtactatccctccccaattttcccattcttgaatccagaactctctttgggacattctgttagcatgctcttcattgcgaacttcaagttgcactaggaattgtgatcttgtttgctccatcgaaagtgctatatttaccaaagcagtgatcttcacacatctgtcagtctctggcctccattcatcctcacagatcccagacatctatttaagagacaaatcacaggagagcttcctgcattgggcatttcagctaacttgacttaatatcactattcactccaacacacattcttgggtagtctaggctccactcctccaggaaaatggcttctccatttctctgctgcttcaggtgctcctgagtgcccctccccaagtcatgctccccctttagtgttcagtccttgccttcatgactgctccccctggaagcttgctctcagacatctccacaatcacactcatccacgtgtctaatggaaccccatagaatgacagaactgtatcatcaagctttgttcattccgtaaaccctgcagttacttctctacacaaagattctctgctgcatgcagagcccaggggttgctcattaccctgatttacttgatgatgccctcaactccggtgtctagtgtttctctgaggtcacaatgccaaccttcatttgtatcaagcattacagtttataatgtctttaaaagactattatttcttattattttattagatatttattttatacatttcaaatgttgtcccctttcctggtttcccctctgaaaacctcgtatcctctcccccctcctcctgctcaccaacccacccacacccatttcctggctctggcattcccctatactgggcatagagtcttcacaggaccaagggcacctttgcccattgataaccgacaaggccatnnnnnnnnnnnnnnnnnnnnnnnnnnnnnnnnnnnnnnnnnnnnnnnnnnnnnnnnnnnnnnnnnnnnnnnnnnnnnnnnnnnnnnnnnnnnnnnnnnnnnnnnnnnnnnnnnnnnnnnnnnnnnnnnnnnnnnnnnnnnnnnnnnnnnnnnnnnnnnnnnnnnnnnnnnnnnnnnnnnnnnnnnnnnnnnnnnnnnnnnnnnnnnnnnnnnnnnnnnnnnnnnnnnnnnnnnnnnnnnnnnnnnnnnnnnnnnnnnnnnnnnnnnnnnnnnnnnnnnnnnnnnnnnnnnnnnnnnnnnnnnnnnnnnnnnnnnnnnnnnnnnnnnnnnnnnnnnnnnnnnnnnnnnnnnnnnnnnnnnnnnnnnnnnnnnnnnnnnnnnnnnnnnnnnnnnnnnnnnnnnnnnnnnnnnnnnnnnnnnnnnnnnnnnnnnnnnnnnnnnnnnnnnnnnnnnnnnnnnnnnnnnnnnnnnnnnnnnnnnnnnnnnnnnnnnnnnnnnnnnnnnnnnnnnnnnnnnnnnnnnnnnnnnnnnnnnnnnnnnnnnnnnnnnnnnnnnnnnnnnnnnnnnnnnnnnnnnnnnnnnnnnnnnnnnnnnnnnnnnnnnnnnnnnnnnnnnnnnnnnnnnnnnnnnnnnnnnnnnnnnnnnnnnnnnnnnnnnnnnnnnnnnnnnnnnnnnnnnnnnnnnnnnnnnnnnnnnnnnnnnnnnnnnnnnnnnnnnnnnnnnnnnnnnnnnnnnnnnnnnnnnnnnnnnnnnnnnnnnnnnnnnnnnnnnnnnnnnnnnnnnnnnnnnnnnnnnnnnnnnnnnnnnnnnnnnnnnnnnnnnnnnnnnnnnnnnnnnnnnnnnnnnnnnnnnnnnnnnnnnnnnnnnnnnnnnnnnnnnnnnnnnnnnnnnnnnnnnnnnnnnnnnnnnnnnnnnnnnnnnnnnnnnnnnnnnnnnnnnnnnnnnnnnnnnnnnnnnnnnnnnnnnnnnnnnnnnnnnnnnnnnnnnnnnnnnnnnnnnnnnnnnnnnnnnnnnnnnnnnnnnnnnnnnnnnnnnnnnnnnnnnnnnnnnnnnnnnnnnnnnnnnnnnnnnnnnnnnnnnnnnnnnnnnnnnnnnnnnnnnnnnnnnnnnnnnnnnnnnnnnnnnnnnnnnnnnnnnnnnnnnnnnnnnnnnnnnnnnnnnnnnnnnnnnnnnnnnnnnnnnnnnnnnnnnnnnnnnnnnnnnnnnnnnnnnnnnnnnnnnnnnnnnnnnnnnnnnnnnnnnnnnnnnnnnnnnnnnnnnnnnnnnnnnnnnnnnnnnnnnnnnnnnnnnnnnnnnnnnnnnnnnnnnnnnnnnnnnnnnnnnnnnnnnnnnnnnnnnnnnnnnnnnnnnnnnnnnnnnnnnnnnnnnnnnnnnnnnnnnnnnnnnnnnnnnnnnnnnnnnnnnnnnnnnnnnnnnnnnnnnnnnnnnnnnnnnnnnnnnnnnnnnnnnnnnnnnnnnnnnnnnnnnnnnnnnnnnnnnnnnnnnnnnnnnnnnnnnnnnnnnnnnnnnnnnnnnnnnnnnnnnnnnnnnnnnnnnnnnnnnnnnnnnnnnnnnnnnnnnnnnnnnnnnnnnnnnnnnnnnnnnnnnnnnnnnnnnnnnnnnnnnnnnnnnnnnnnnnnttttggcaatgtttggaggctcttctggttgttacaatggagacgacaggagtacgtctgaaatcttattgatagaggccaggcatgatgctcaagtgctgcagtattcagaatcctccacagcagagattcactgggtctaaagaatcagtagcagtggagtgggggaaacttgatgctaggtcattaagctttcttacagggattctactctgatagttcccacttggaatccttcttctcttcaggactacatgcagtgtcctatggtcctactgtgacagttgagtacctcgggcaataaaatctcctcactaagagaaccaaactgattatttcaagtctgtacagtgtcctgcgaaaacagaggcaagttaacattgaccttttgaaatgtatttacttttttttatgtgcattgatgtttttttctgaatgcatgtctgtgtgaggatgttagatcttggagttacagatagttgtgagctgccatgtgggtgctgagatttgaacccaggtcctctggaagaacagtcagtgcttttaaccactgagccatctctccagccccaccattgacttttttaaaagctttgattgtctcagccccaaattgtttaccttctaactgtttgaagagtaactggtctaccacatagaaagcaggtttcaagcgcatagttgttttaccttattctgcatcttccagtaatttctcagcatcatttctcacaattctctcattgcctctagtatgtgcattttacacctcgttggaagctgctgggactaagtccagatgcttgaatggtgggttccacaacagaaaagcaatggatcatgcaaaagtaactgtcagatcggtgtgaattcaggccccaaaaatgtattacctaagcacttgtgggtttccacagcttctataactcaggcaatgacaagtgctggcgaggagatggaggaattggagccatcatctgatgctgctagggatgtaaaatgatgcagctgctttggaaggcatcctagtagttcctcatcaggttaaacataacgttaccattagctcagcataagagtggaaacagccgggtgtcacccttatgaatggttaaacaaaactcatatattcacacagtggaatcaggaaggaagtacaaatacatgccataacttggatgaacattcaacataaaccaggttaaagaatttggtcatgaaccatcacattttgaatgattccattaatatatccagagtagaaaaattcatagaaatagaaggagattatttgttgccttgggctgaagagttgaggagaaacagtgaccacgaactggttgaggatatcttgatgactaattgaaatggcctcaaactgattgtcaagatggttataaaactctttgactatatactgtcagtgtgtgatataccttaactggtggtgtacaaattagatctccataaagctactgataaataagaaataaagaaaaagaaggaagagaaagagaagccaaagaaaagacttgtgtagtctcttgattatcccttggctgcatttcttcaaagcctcccaagttattaggaatgtgaaggagtgaagcctcatctctctccttgccttagtaagaactaagaacccgatctttagttctggttataaattaaattatctttaggcagattaacaagagacgaggcatacaagttttactaactttatgtgtctgggaaatttccacaagacagtgaagtctgaaaaaaaaaaagtccaaagcaagactcttttctactttgtaaacaaagagtaataaatcttagggtagaggctagacataagagaatgactaaacacagggaaaacagtggagagcaaatatacggaagaattcaatgaagcaaggcttgtctgcagtcccgactggcacctggctctgagctgataaagctagcatcagttaggaatgattaatgccctgtcattaggcagaaatgagaaaagcagaaagtttctctgtgttggaatatttttaaggccaataaacatcaatgttttgggttcctttggcttccaggagaaatatcctctagtagtggtgagctccagctttggagttacgatgactgagtgggattagataggcttccggattactctcttctcccaccagtgtggatcccagaacttgggtgcagtatgaggactctcccttcagcatgcatcagaccttctgggggcttctcaaactatacttggctgtattccactgacagagtgtctgaggcagggggattgagtgagcagagagagagtctacattcttaacaagtttcttggtaacaaccatgctgctggtcgtagaagaacaatctgagataatatttagccccctaggcttgtagacatactttgcaaacaacacagaaatccatagtttaaattagttatgtatgttaacataaaatgctttataaatattttatttgtaatgtccaaatgttgatctaaaaacataactgcagttttgataaaatgataagaaggattgaatcatggaatcaaaagacccaacccatacatctctagctctagtaattgaggtaaagaatttttcagactataacatactcaatagtgaaaaattaataatggttcctcagtatagatcatggggttataaaggaaatgtatgataacctacctgaaaacacattgcaaatcctaaatgcacttctcctttggctcttcttcttcttctgtctgttctgacctattctggtttttatttatttatttgtttatttatttattattattatttagattcttatttgtatccttataagtgagagaaagatgtggtgtagacttgggtgggcggggaaatgggaagaatctgggaggagttggagaatcataatcatactatgttatattttaaaaatctactataaatataagataaatgcaaattaaaaagagatactccaagtgattcaaaatgctagaataggtaagacatttttaaaaatgtgttccataccaaaaatctaatgaaaaaatttctcaaaatcattagccaggagacaaaaatattcatgccaaactgccgctatacgcctattaaaatgaccaaaatgtaaaagaaaggataattttctggtgccatagcacagacagcttcttttaaagtttgacagtctcttacatagcaacctggaaatcagtcatgagtatttactgaagcaaaatgaagaagaaactttatacgaaaacctctgtgcacttatagcaattttattcgtaagcacttatgcatagttatatataaatttttacaaatgagatattccacatgtgcttcagatgatacctttgaacgggacacccatactgtggaacccttctcagcaattacaagaggtcagtgactggcagcacagtcgagtctcaaaagcaggggtaacagagactgacccgtgtggtgtgaccccagttattaacaatctggaacaggcaaaactgtagagacgaacatccgattgttgggtagcagaactaggtatcgggaacaaagaggatgcagagggctatgaggaggtgctctggactatccagtctactctatagcatgatttcagagctgcctgcaggactgtatgctacacagttgaaaagctggcctttattttatacacttcacctcaacaaacagaaaagtcaatgtaaagtttgaaagtgccagctgaaaaaacttaccattcatttgagcttaaccagttccatacttaagccagagctgaagggaccactttcagcagctcaggcagatgctgaagcagagataacgccccgctgctctctccatggaccaatagcacttctacctgaacgttagacattttaacagtagacctgaagacagatcatctgcttctacccccaattaaaagacggactaagaacataaaaagaatccaggcacctaggtttgcagaaatctaaaggttgagttcctttaacttatcaacgtttgtgttttgaaatctccgcctggatttccgtataattctagagagctaagcaggagaacagctaccagatacctggtttgctagtaagaaggggcgtggcagaggggcagcatgccgagagatgagggaaggataggtaggcaattgagggggtctttctcaggtgtttctgagcagagtggagcagctgcctctggtccctctccgtgaagtgattctctggggagatttccttgatttacatgttccttgcatgttcatagaattccaccttaaaacaagctggacgcaagcaaggccagtttctcagcgtggaaaagcttttgcttgagcaatgacacactgcagttggatccagttcacccacatctgggaaccacatgtcagcggcagctgtataaagtcagcccagcaaactgagggtgacattttttttgccagaagccgggcagtatggacctcactcttctgtgggttcttctgccactggtgaccacagcctggggccagtatggtggctacgggtacccataccagcagtaccaggactacggtgatgatggatgggtgaatcttaaccgccaaggcttcagctaccagtgtccccacgggcaagtggtggtagctgtgaggagcatctttagcaagaaggaaggctctgacagacaatggaactatgcctgcatgcctacaccccaaagcctgggggagcccactgagtgctggtgggaggagatcaacagggccggcatggaatggtaagaagcagagagtgctctagagatgggaacatctgtgtatgtactgcatgggagaagtttggtccttaaaatagcagggctcataacctgggcacatcctaaacttgctattgcatgctctggcgggcaggtgtgtacaatgtagataacattgtaaggtgaaaaaccaggatgggggtatgtcccatgaaggatggatctggttctactccttcaaaggccatccctaggctcagtgtgtcccgcaagctgggtgtgtgtacgcagaatgcttaccagacttccaaaatagagatgtcttaaggaatttatagaaagtgggcatccctgtgacatgggaataacacttccattttgggatgatttaccgttttccaaaaatactgctccagggtggttgggacaaaataaacaattgggtcctcagtatccatatcctgaaaaaaaaatattgattcaaagtaagtgattgggtaaacaagactgagaactagaaacaaagggtcctgaagttaagtagtgctctgctgttctgatgaaatatgttctggcgagttttactactgagatttctctgtctccctctctctccctttctcttgaatttaaatagcctctgttgctaggatatagtttaccaaaggtttttagaggtactgtcctgacttctgccttttgcctaatcattggaactgcattggtcccagtttgtgcttctctgtggtgtttgactatcccagccctggcatttgctcagaagcccatcttaagagacaggggtggctatactggtcattcatagctgtccaaatggagcccaaatttcagggcttagggagatggtggaggctgaccctaggagaggcagactgagggaggaggtagcccagctggaaggctgccaggtgtgccctctgctgaacaagacaactgcatgaggggctcctgcagggcactggcagagtgagcatctgggatggatcaacataaaacattagtggtgatactttcagccatccagggagaaatgccctgagcatacatcacaccacacactacattatctgatctgatctaatgctttaagcaagcctataaatcatgctgtaggttggcaaactgtggtctggagataggtgggtttccttagctagaaagacaagatttggatccagaaagtctgagctacagcggtgggcttccaagagcctgctgcctccaccctaagtggactcctgttgacagagccagggccccagaaccacactcaagctgagagaaggtgggaactacagggactggcccagtgtggtaagtggcagtttgattagagctctgctcctgaggacagggcctatctacccgtgttataggcagcattataggaacagaagcagactgaagaatctgtagaggcctcttgagcagggctgttaggccatccttctccattccctctgcttctgccaaacagatccaaacccccttcagacacagatgactcagagaccaaacttgtcttgaggacagaggacagaccctggtgagtcccagcaggcaggctcattgcctggcttcaagggtagaaatgacctagttgtaactgcctgtccagtccacccaccccaagggaccatcacatagacgggccagctttctaacctcttgaaagagccacagaaggacagcactgggtgaagattgcctaacccctaactgggggcagggcaggggggagccctggggtgagtcacaagctgggttttggttctggtgctaatgataaaatgtaatgggaccttaggccaagcttcagctgtctccctgctgctgcctttggaagatgaaccctcaggctttgcagtctctacacaaagcagccactcacttcagcgtgcgcttggcttttgcttgcattctcttgaactgtgtgttcaccnnnnnnnnnnnnnnnnnnnnnnnnnnnnnnnnnnnnnnnnnnnnnnnnnnnnnnnnnnnnnnnnnnnnnnnnnnnnnnnnnnnnnnnnnnnnnnnnnnnnnnnnnnnnnnnnnnnnnnnnnnnnnnnnnnnnnnnnnnnnnnnnnnnnnnnnnnnnnnnnnnnnnnnnnnnnnnnnnnnnnnnnnnnnnnnnnnnnnnnnnnnnnnnnnnnnnnnnnnnnnnnnnnnnnnnnnnnnnnnnnnnnnnnnnnnnnnnnnnnnnnnnnnnnnnnnnnnnnnnnnnnnnnnnnnnnnnnnnnnnnnnnnnnnnnnnnnnnnnnnnnnnnnnnnnnnnnnnnnnnnnnnnnnnnnnnnnnnnnnnnnnnnnnnnnnnnnnnnnnnnnnnnnnnnnnnnnnnnnnnnnnnnnnnnnnnnnnnnnnnnnnnnnnnnnnnnnnnnnnnnnnnnnnnnnnnnnnnnnnnnnnnnnnnnnnnnnnnnnnnnnnnnnnnnnnnnnnnnnnnnnnnnnnnnnnnnnnnnnnnnnnnnnnnnnnnnnnnnnnnnnnnnnnnnnnnnnnnnnnnnnnnnnnnnnnnnnnnnnnnnnnnnnnnnnnnnnnnnnnnnnnnnnnnnnnnnnnnnnnnnnnnnnnnnnnnnnnnnnnnnnnnnnnnnnnnnnnnnnnnnnnnnnnnnnnnnnnnnnnnnnnnnnnnnnnnnnnnnnnnnnnnnnnnnnnnnnnnnnnnnnnnnnnnnnnnnnnnnnnnnnnnnnnnnnnnnnnnnnnnnnnnnnnnnnnnnnnnnnnnnnnnnnnnnnnnnnnnnnnnnnnnnnnnnnnnnnnnnnnnnnnnnnnnnnnnnnnnnnnnnnnnnnnnnnnnnnnnnnnnnnnnnnnnnnnnnnnnnnnnnnnnnnnnnnnnnnnnnnnnnnnnnnnnnnnnnnnnnnnnnnnnnnnnnnnnnnnnnnnnnnnnnnnnnnnnnnnnnnnnnnnnnnnnnnnnnnnnnnnnnnnnnnnnnnnnnnnnnnnnnnnnnnnnnnnnnnnnnnnnnnnnnnnnnnnnnnnnnnnnnnnnnnnnnnnnnnnnnnnnnnnnnnnnnnnnnnnnnnnnnnnnnnnnnnnnnnnnnnnnnnnnnnnnnnnnnnnnnnnnnnnnnnnnnnnnnnnnnnnnnnnnnnnnnnnnnnnnnnnnnnnnnnnnnnnnnnnnnnnnnnnnnnnnnnnnnnnnnnnnnnnnnnnnnnnnnnnnnnnnnnnnnnnnnnnnnnnnnnnnnnnnnnnnnnnnnnnnnnnnnnnnnnnnnnnnnnnnnnnnnnnnnnnnnnnnnnnnnnnnnnnnnnnnnnnnnnnnnnnnnnnnnnnnnnnnnnnnnnnnnnnnnnnnnnnnnnnnnnnnnnnnnnnnnnnnnnnnnnnnnnnnnnnnnnnnnnnnnnnnnnnnnnnnnnnnnnnnnnnnnnnnnnnnnnnnnnnnnnnnnnnnnnnnnnnnnnnnnnnnnnnnnnnnnnnnnnnnnnnnnnnnnnnnnnnnnnnnnnnnnnnnnnnnnnnnnnnnnnnnnnnnnnnnnnnnnnnnnnnnnnnnnnnnnnnnnnnnnnnnnnnnnnnnnnnnnnnnnnnnnnnnnnnnnnnnnnnnnnnnnnnnnnnnnnnnnnnnnnnnnnnnnnnnnnnnnnnnnnnnnnnnnnnnnnnnnnnnnnnnnnnnnnnnnnnnnnnnnnnnnnnnnnnnnnnnnnnnnnnnnnnnnnnnnnnnnnnnnnnnnnnnnnnnnnnnnnnnnnnnnnnnnnnnnnnnnnnnnnnnnnnnnnnnnnnnnnnnnnnnnnnnnnnnnnnnnnnnnnnnnnnnnnnnnnnnnnnnnnnnnnnnnnnnnnnnnnnnnnnnnnnnnnnnnnnnnnnnnnnnnnnnnnnnnnnnnnnnnnnnnnnnnnnnnnnnnnnnnnnnnnnnnnnnnnnnnnnnnnnnnnnnnnnnnnnnnnnnnnnnnnnnnnnnnnnnnnnnnnnnnnnnnnnnnnnnnnnnnnnnnnnnnnnnnnnnnnnnnnnnnnnnnnnnnnnnnnnnnnnnnnnnnnnnnnnnnnnnnnnnnnnnnnnnnnnnnnnnnnnnnnnnnnnnnnnnnnnnnnnnnnnnnnnnnnnnnnnnnnnnnnnnnnnnnnnnnnnnnnnnnnnnnnnnnnnnnnnnnnnnnnnnnnnnnnnnnnnnnnnnnnnnnnnnnnnnnnnnnnnnnnnnnnnnnnnnnnnnnnnnnnnnnnnnnnnnnnnnnnnnnnnnnnnnnnnnnnnnnnnnnnnnnnnnnnnnnnnnnnnnnnnnnnnnnnnnnnnnnnnnnnnnnnnnnnnnnnnnnnnnnnnnnnnnnnnnnnnnnnnnnnnnnnnnnnnnnnnnnnnnnnnnnnnnnnnnnnnnnnnnnnnnnnnnnnnnnnnnnnnnnnnnnnnnnnnnnnnnnnnnnnnnnnnnnnnnnnnnnnnnnnnnnnnnnnnnnnnnnnnnnnnnnnnnnnnnnnnnnnnnnnnnnnnnnnnnnnnnnnnnnnnnnnnnnnnnnnnnnnnnnnnnnnnnnnnnnnnnnnnnnnnnnnnnnnnnnnnnnnnnnnnnnnnnnnnnnnnnnnnnnnnnnnnnnnnnnnnnnnnnnnnnnnnnnnnnnnnnnnnnnnnnnnnnnnnnnnnnnnnnnnnnnnnnnnnnnnnnnnnnnnnnnnnnnnnnnnnnnnnnnnnnnnnnnnnnnnnnnnnnnnnnnnnnnnnnnnnnnnnnnnnnnnnnnnnnnnnnnnnnnnnnnnnnnnnnnnnnnnnnnnnnnnnnnnnnnnnnnnnnnnnnnnnnnnnnnnnnnnnnnnnnnnnnnnnnnnnnnnnnnnnnnnnnnnnnnnnnnnnnnnnnnnnnnnnnnnnnnnnnnnnnnnnnnnnnnnnnnnnnaacatctctaaagccccatttcatgtataaagcaggggaagtatcatgctagcaatttttgcccatttcatagaattgttttgatgattaaaatgactaaacagataccatatttaacagaatactcaaccatgtaactccttgtgaaggtttgttcatgatcactgttagggacacttggttctctgagacaagccacacctagctagtaagtttcaaaatggaagtggcaggatacatggacttttggaatatataattcagttagaatctatgaatatgaaatgtacaatttcaagcatcttgaatacttgccacaacttaatagatactgagctggcattatgccaacaggttataaagtagtttaataacttttgattatgagccctccacccttaagcctgcttgctgtcttttcatagtctgaaagtttaggtttaaaaggacatatcacaaaacaagcgggatctcctccaatgccctttgaatagtcgctactgactgcttttctacagtacatctttctgcctgacaggtcatttctgcttaattcttggtagacagtccagcagctctagaacatggagtctggtgacagaactcatatctaggaacagcaagaacagagcagcctgcgtacagctgaacgttattttaaaagaccgttcatgcccccatcattggggcaggaaaataagtgatgcagtatttatcttcaaaaagcttgtcttgtcacactgggggtgggtgggcagccagatgaagactagttgaaatgaaatgtgtgcatcgatacatcccaaggaagaaaaacatcaatctgagtcagaaagtgtgagacttattagggagtagagactgggactgcatcttaacctctgaaactggacgcattgttgggggagttcagtactaacgattcttcatggaggacccaaggattataggggcttcttaaatccataaataataagttttaaatggaaaaatccagaaattcagttttttagactaaacatccttatcctgcatcaaggtttatatccctgcctgttacctcaacattaccttaccaggtcactaccatgacccgtctagtcccctgctctgtgctcttccatcatcagtctcactttgcttctttttaaaatgtctgcactgtcagaggacctgcttgtcagtacctgaaccccaagaagaagaccaggctcagtacagagcaggctttaactttaatactttttgaaatatttaatgggtaccctaaatttctgtggattatgttttaaatggttaatggtaactaaagaattattccagggaagaatagaattaaacacctaaagtttgattctatgttacaattatccactacaaggaatggaagaaaatttaggaaaagttcaaaaggctgtgtcacatggttccttcaattcagggagttggccactggtatgaaacatgggcaaaactactcttattccatgccagccatggcactggagacaagctaacagcccttaaaatatgtgtgttatgaagtgagacaaaactaacccaaccagaatcttccaatttagaaattttttgagagctactgaccaaggatggtgctgtggcctttgcttttatacccaactcaatcctagtttcagttcattgatatcttgggttttccatacatttgaacatgggctagcagagatcagagttggtgggctaaaactccacaaaccacttaaaaagaaaaaagaaaaagaaaacctgccctccccctcctcctccctccccctcccctccctcccctctctttcttcctcctacctctgactggtgtcattcgttcttccagtctgaccatcccagactcggtgaagctcacatataagggacagtctagctgaggagctgttgggagcagatggacagcaatgccatttttgtttgtttatttgtttgttgtttgttccgtacctccttgaagggaagtgtgcataaacgttttggtaaaaaaacaagtcgcagatccttttctagttagtgactggcttggctactctcattcaggtgtcacttcattgagtcctcaccaggtctatgaggacccacggagcacattcatgtcaaggtggaaaggagactccctgcctgcggattcctcagaatgaggtcctcccatgatctattatttccattttaccattgcagacagaggggtccattttctgtctctgcttctaaggtggtgaccttgagataaatcgttttcagaaaggccattttcctcagaacacgggagcaaatgttgttgtcacgggaagagtaatagcctcaagccttcccttccagaaaactcccagcctttggcggcgtggaactgatatcgctcttgtgtttgaagctgaaattgaatagcaaagagataatgaaaaaaaatgggaggggactctctgaagcagagcacctggccctcgtgtgccaagggaacattttcttggagtctgatgaggagtcgggctcatgccacaactcatcagtaaagctacagccttggagctgacacggtattcggcagaccattcaaaagcaacaagccagtgctgtgaagtgtcccagagcctcgacatgcccttgtaccgttgtttgttttctttggttgagctgaaatgtgtggatcaatgcagaaccttcccgctccctccctcagcctcatcagctgccctcatccattctcacctccttgaaccagggcctgtaattctgaattctgcagctctactcaatgttcacataagctttgttatctaagaggttattgcgaaggcgactgagggtataaacagggcatgcgagtactgcatgaagcagtacccatttggcaccttcatcctccaaaaggactgctcctgcagcagacgttggaaacaggaagattaaccactgctccagtttccataggaacaacctaggaagagttccagagcctttcaaaggctcaaatgataggcccttacaagttaagtctacctccaatagcaggagacagctggtcagtcatttgctcattcattctatcaaacatttacgggacaagcctcaggcattacgacgaggaatacaaaataaaaattaaatggtcttttcccacaaggcctgtactatctgcctggggtgatgagagatagcagagcatctgtgtacagagtggccgaggcatcctctctccgtgagtttcatcctaggggcacaacagctcagaacacgtatacaatgcttcagtgacactcagcatgggactggctctcacaaagtagactccaactggttgtgtagactacaccaaagtataatcacagtaggtgatttacacagccccaaaacaccagcattctcagggttttctatgcatcctcttatttggtttttagagaaatacaaatatatattatgtgcattttacagagaagaaacctacatcattagatgatgtggtaactgttctaaatgactcagctaacggtgaggcaccagtctagaagcatagcccacgatagtaatccccgccccgccatgtccgtctttacattgtgaatacataccgctaccaaagtccagttctagaaggaacaattccataccaccaaactcatatcaggctcacattaacaaattatgaaggccatccagctgacactgtagaggaccactgatattcagttacctttctccaaatggtctggagccggggtcatgtagggagcagccactcttcacagggaagctttatttgagggggcttgtgaaaacgacagtactcttcttgcaagggccatgaggctggctggctagcggagcgccagaagggaatttgtggaactcggactgctttcagaactgggcttccatgaaatgagtctgcttaccttcggatattcattttccataagggagttcaccaccatgggaactcttttccttataggaagctgagtacacagaacagaaggatagaagtgtcttggggataaaagcacacccgagatgggagtaaaaaggctctgctttggaggaaagtagttatttaatgaggacaaaacaggaaatctcatagcacaccagtgtgctctgccttctccctctgaagaccttagggtttgcctatgactcttagagcatagactgatttcctcccatccacactgatttggaattgagatgagcagacccacctgagacacaggaggaaagttatttctccatcacactatgacagtcatagtgtaatgccaaatgtataagcccaaagtgacaatacttttgcagttaaaaaaaaaaaaaggctagataatcaaaagccatccatctcaatttacatattgaatttcattattgatcgctgagttctcactccaaacttgttaccactcttgagaacatagttgagtaagcacccagtccatctctaaattcccttttcatcatacatacagtggttaaaacagaatagtagtaaggtataagttgttgatgagtgaatgtatatttaagtacacatatgaatgaatacacacataaatgataaatgaataaaaaggaaagatgcatgagttaatttccaccaatgggggaagaaaaaagatgatacttaagtaaatgccccagtatttcagctcattagattgcctgtaggttttaatttttctcaaaccctattttttaataacattcttgaatgctttcaacccccttccagctcacagaggtagtggaaaagaaaagttattaggatacaggggaagtggacctgcttagaaattgttctttggagcaaatcccatctgccttgtcaggaaatccacagttcagttcatgggtcagcagtggcagctccatccatttgcaaacacttcatgaatataccagcagtctagtttggtagagttggggtagcaaacacgaatcagcaggggtggcacaacctagcagaaacagccaaggcttggctgaatcagcataagtgagcaggaggaaccagggccaccagggatcccaggagttctttgttgtacctctctcaacaaagtggaggtcagcaaagactcgagacccagaagcattgattgcaaagctagctatgcaagcaagtgctctctgtcactgtctgttgagtccaattgatattccctccaaacatcatgtgtcctccaggagtctggcctcaccacatgtcttgcctcagcccatgagtctgttttagcaaaactccacgtgagtctgtaacagcagacatcactctgccaatcagctggagtccaaggaagcagcaagaagccaccagagcaccaccagaagtgttttggtgcatttctctctacagagtcataatagacagagctcagctacacattgtaaggcaaaccaacacttgcacttcattagtgaagaattcttcatcatgcatccttccacgtgcttgctttagcaaaacatccttccacctgtgcctgcttcatgaaaacactccatcacgtgtctgtctgtcccagcaaaacaccatgagacacaactgactttccaaagaacccttaagtttccacttcagtcccccactcagtagtcagtgaagggaacaatcccccttccatactttctagaggcagttttatttgcaaatcaaggttaatctagcagccttcagtactatgtaccatcagccacccaccttctgtctcacacgagagaggacagatcgatgtcccaggtacctaagaaaccaaaggatacagaagaagctgaagacctgatttggaggggcttgtactgtagtttgaatctgtttcatgtattataaactaaatccttgaacctgtgtgtggacagcattgagacataagtcctttggaaggtaataggaaacagataagggccccgtgatagaattagtttctctgtaagcagggaaagaaaaaatccaaactggtgtgctgttctgttttaacaacagaaaccggcctggaaaaacttagaaaatatcatgttctacataagacaaggaagctccgaggccaggaaggaaacagtcaacatccaaacagaaaggaccaaaccgtcaggcagtgtgtgggtggggcaaaggcaggaagaggaggagcctcactgttcctcacttagagagatgccttaaagatggaaggggtgggccagcagcaccggtagatgaaagtgaaaattccctcccaaattaggaccaggatggaggacacaccatgaagaaaaaaaattggaaacgataggaaagaaaaggggcctctggaaagagtttgaactcagttggcctgtggattttctgttgtgagtttttccaggttcctggcttatctgtaggttctaggggtaaagttcagagacccaactagaagatgatagaaagattcctggatacgcagacagaatgttgactatgatcctaagcttctcatcaggttcccaaaaccagcactgcatctatctatactttgtgtgccgtgtagggagagagtaaaatattaatttgaagtttaacaactcattacagttcttcgtcagctttctagtttaaattcaagtaaaatgatttatagcatcctcaattgtaaaattcacaaactttctttcatctaagcatacatttatggaaagtcattaggagcagggtctcccaagcttccttccattcaaagttactgagacattggaacctttatggcacacatgtaatttctacaatgcaacagctactctttgtatcaaatagaataacttgtgggagtgtgggtcaaagagcatattaactgtgtcaagagggtctgaggaagaggtctgcattcatcagtgctctgatgccttcttctcttcaggtaccagaagtgctccaacaatggattggtggcggggttccagagccgctacttcgaatcagtgctggatcgtgagtggcaattttactgctgccgctatagcaagaggtgtccatattcctgctggtgagtctggtaactaaatcttactccttagagctcctgggggtgggggtgggggaacctacaatgatctgttccttcaaataagcccaggatgtcacaaaccagtgtgataagcagcagctagacaatagaagagaaggaatggctgagggagaccattcatactggaaaaagccctacaggtcatccaacccaatgtccctgtatacttctttgccatgcaaaaataaacagaataatgcctagtggctcctgtccccaagcctgttccctctgtcatgatgatgaccttgcctcacatccaagtctgtttgggacctgtatccctgcagcacttccaggagtgaccaagtctcttctggaccacattctgataaagagttggagacaggaagcaaagcaacaatcacagcaacagcaaaacagcactggtgttttctgagttgcttggcagccccagcctgggatgtcctatttctctgtctctccctgggatgaagcccagtgctccctgactctggcttccaatcttctatgagatgacacacacacatttagtcaccctgataactcacaccagttaaccgcacaacttatcccaaattctttggcctccaaacaacccaggcttttaagccttggatagttatccaaaatcaacatttgaagcttggctcattcaagggcttcgtctctccatagtctgatgtttgggaggagagccttgcagtttctgttctctgtaatcatggtgttactccacagatgtgccagtggtgcacaaagtctctagagtccaatagttcttcttgcagcagtgacagtaaattcacagctcaaagtcagctgaagtctgaagctacatgccagaaaaaaacctcctctagcttcaccaaaactgcttcttaccctaccatgactggtgagcaggtacaccaagggctgatgattgagaccaagcagatccagaatcaaagaccaaagatctgcatgctatgttgggcccaaggaatgctggtacaggcaagggcatcctgaatctcaggctccgtgccattttttactgtgacctctttcctcgttgtcccctctataacgtccctggaaaggcacctttacttctctgaaaacctcaatgcatcattggaaatgatggcaaggtttatttactgtgtttccataaaaaaaagtctgatgaaaactgcagtttgcagtctgtaaggatgagaacaacacactattacattctgtgtatggatacctctttctacccagactttgaatacctggtataggaaaactcattgatctttgcataaccaatgattgtctagcacagtgtttgggtcttatatgtctgtgtgtgcacccatatgcatgacagagagacagacagacagacagacagacagacagacagactaggctgaagtttcttgttttcttgcgttaccaggaatccgtcattctaggcaagtgttctttctagggctgtaccatagtcccagtcataagtggttcattaataggaagagaattcttttttgtttttttgttagaaaaaaaccataggttgttgttttaaacttaaatagatttttaactcttcattcctaccctccctcctctgcgttatgagctctgagctcacagagatcttggtacttatgtatgccaagccctttaaaaagaatttttatatatttttctctgagtgtgtgtgtgtttgtgtgtggatgaacatgtgttcagatgtgtgcacacatatgtgtggatgttagatgtctacctgggatatagccccttaggcgacatctttctgggagacatctctctgaaagagtctctttctgggacttggatcttgctgttctaggttagattggctgaccagtgggcctcagataccctcctatcttggattccccagggctggtgatcactagtgggatcaccatgctctgattttgacacaagtgctgtagatcaaacccttcatgcttatgcagtaagccctttacagactgatctctctccccatgtcccaagaccctttggtgacatcagatacacagcagacactcccatttgttcaattaatgaaggctttagcctacgccctagctttctagtgagggttaaatgtgataacaggatcctggctttgccatgggctatgatcacacaaagctgggttgttttcaaagcagagtcccttccactttcctcaatgcagaagagaccttctatcctaataagcctttcaagggcagaaacacccaacaaggccaagcattgccttgcagaaaacagaacatgtgacaggagttggatgtgcagaggaacaggggtgagccaggggtgcaccgaatcgtgctcacccagggagagaaagaggattctgggacagacacatttgccatcacagtaagagcctagggtctctgccaggatgaataagagagcccacagtgtctgcagacagatcatcatgcctgctgcctggggttctgggcaaacagaactacagggaatgggcttggggcccaaagctttcagctgccaggcagataaatgcccaagaaaatcttactgacaacagaggctgaacatgacaaaggcagaagcgtctaaattttctgtaatccttgtcttctaattgagcaaccaatgaaatgatgcatattctgcattattgtgtgtcaacacttggagcgttgatgcttgaaacttaccctgtttatggccggatacagataaatcactgtgtaccaaattctactacccatctaaggatgccccagactccagcggtcatctgccttgcttccccacaaatattacatgtcctttctctctttaaaaatgacttccaaagtttccccttagatacagctcatcacttataatactaagaatttaatgactatggaaaggtacagataagggacagagaggatcttggttaatttaacaatggtctaaatgagatgagtaactcttctcgaattgacagaaacattcaggtttcataaaattcacccccgagccttggtcttcagggttcttccacttgccttcctgacccccaatcccttattctccctcatcccacctgggtccagatatatcacaattggtcagagtcactgggcagtgagaatgatatcacaactcaactttgaagcagacgccacaaaatgactgcttcaacgtgattggctatagctcagacagcaccgtgtcagaacctcgtggttctgtggaaatgatacttttctcaaggaaacactggagaagtggcataaacactgtgcaccaaacaccacgcaacacagcatatgactcactgttccaagggtgtctggacattttagtgggatctttaaattgcctgagtcatggtgttatattatacccttctaaattgaatgaagcccccaaggtcatacattttcaattcttcagtatctcagcatactgtctggcccttagtataaaaggtgtcaaaagcgtaactatatgttgctagctcttacgagcagtaattgcagtgaaattaatattgatagagtgagtttttaataaatggtaataataaaaaaacttcttttcaccgtaataaaaataccctgaaaaggtaacttaagggagaaaggatttattttggctcacagttggaggatgcatgtgctcacgtacagaggtcatgaggcaggagcttgaggaggcaactggtcatattgtatctacagccatgaatcagagaatagcaaatgctgtgaccacttggctttttcacttttaaactacttcgtgtatatgcatgcatacctgtggtgattcaatatgcttggcccagggagtggcactattagggggtgtggcttattgtgcttgatccttttaacagccctgcatggtgaatggacagctatgttctaccttccccacactgacatgctgctaagccctgtccttggtaccttctcttacgtcactttagctgacttgaattaaatggtggaactagacacatgaaaggatgaacctttccacctacatgtgtgtgtgtgtgtctgtgtgtgtgtgtgtgtgtgtgtgtgtgtgtctatgtgtgtatctgtgtgtctgtgtgtccaggcaccatggaatcctaaggagaccattagatcccttagatgtagatctataggagattgaaagctaccctatgtgggtgctgagaattgaactttggtcctctgcaggaacagtaggtgctttgaatcactgagacacctccccagtcctgtgtgtttgtctgacacaagttttatatatccttggcttgtctaggactgcctttgtagatcagggattcttcaaactttcagcagacatttcctgtctttgtatcctgagagtgctgggattgcaggcatgctccaatgcagcctccttcccttctacattgaaattctctctgcagcatgcatgagaagcctgtcaagtgaatgtctggcacctctgtattttcgagcatttagagactcagaaataatatcattccgggatagaaaaacaaaatcatcaccaactcccagatgcatgtgggatttatttgtttggtgggagccaaggtgctgttctgatttcagcgtgatatctctctggatatcacaacatcactgaaacctggcaagaaagtaaattcctgctcgatgcaggcatgccatttctaatcggttcccactggactagatgagtatgtaaatgcaacacatatttatttagctggaagaatccaaatttgtagtccaatggtctgttaacagccaacacatgtcaccaaaagggcggcaaacaagactacggagaccttttgcctcttccactgtcctcaaacagctccagctcctccaggtcacatcccagtcagtcggcctgctggatggaagctgcgcatatgcatcctgggaccgaggggtttgaatttaggaacgtgttcgcttctttattgttttgcctaatgatccttctctggatctatgactgatcagtaggtttgtagaatgatctgcttggacacagtcacttgtttaaatgacctttacattgcctttcactgtcactggctttctgtgacactcaaactcagcattctccatcatttcccccctgacttccccatcatgtccagtttataaggcagagagtagcttcgcttaattcctggacattcctagttctcaacaacaaaagtcagttaaagagagcatttgtctcttctcttccactgtgaataatccagtcaaagaaaatctttgtgaaatcgggcacctttgttctgattttaacactagatgaggtttcttggcaagaccattcctgtgatgctgtgtccaagtcaggaatgagctcataggccttccgtcagggagtctgtcagcctgccctggctggctggtctcctgtagcatgtttcccagaggcctgataaaaagaggaactgtacacactgatggctctgagctagcataggagctattattgcagagatggaagctcctatatcttgataaaatgaatctggatgttagtgtttaagagggcacactgcatgtgggtactcctgtttttcacaagcagccaccaccctgccctgtgtacactcattctggagaaccacagctcccctgagcctgcgcagaatcaattgtccctttcctcagctggagcagctgtcacagttactgtcccctatttataatgttggcatctatttgcgcatataggagatactccgttttgtgttcagacttcaaacgcagacacttcaaagatgtgtctgatcgtcagagtatcagctcacccaacctgagccacttagaacaaagcaaacctgtcaatcacagccaagtccacttcaatcgacaggactctagaagacatccttcatttctttatccagttagttactaaatgtgaaagaatagaaaatatgtaaatttcacagatttaggagaagttctgaaccatggctattatattgatttatttagtgatatcatccctgtgctcgtggagaccatgagatatggaagctgtgatgctcttcaaaagagtgagcttgattcagaaaggtccagccacttctagatcccatgttatgtgtatagtgtacagccacttacctttatcacaggaagaaaataagaatacagatcaagtgttaggcagcaacacagcagacatctaatggcaaagtgaaggaggggggggtgtttgctttatttggagggaaggagaagttggaggtgaaactgtccttgttgatgtacagctcagggtagccaggcttatgactgtcaacagtaatcaaaacaaatgtgaccactgccgaccagccctgggcttgaagcaagagctcgaggctcccttccaaaacagcaatttgaaaaaagttcagggactttcctcttctaatttaagtcacagacatcctgagaactgtgcttccgctgtgtggtgatacatatctgaaccgtttgaaatagaaacccccaaatgccacagaggatagacactaacattttatgttccctctcacagcccaggttcccagaattcagtctgtcgacacagacaagggcactaatgtgactgtagaggacatggcatgtggtcctatttggccaatgcccagctctctgggagggaccaagacacctgcttctttgcccctgtctatttatatttattttttaatgtaagtccatttgggttttgttgtagtaaacatttaacctcaattgagggtttctaccctgtctttgaccattcagttctcagataaaggacacacaacctttatatttatatccccaatgaaggatctagagaaaagacccaaggagctaaggggtttgcagccccataggaggaacaacaatatgaactaaccagtaaccccagagctccctgggactaaaccaccaaccaaagagtatacatggagggactcatggctccagctgcttatgcagcagaggatggccttgttggtcatcaatgggaggagaggcccttggtcccatgaaggattaatgccccagtgtatggggaatgccaggacaggaaagtgggagtgggtgtgttgatgagcagggcgagtgggaatgggataggaggtttttggaggagaaaccaagaaaggggataacatttgagatataaataaagaagatatctaataaaaatgtaaaaaaataaaagggaaatataaacacacacacacacacacacagtagtaaaacaagaaagaaaccaaaagcactggagctgggcagatatctaccctatgtgttattatgtctacttccctatcaataaccctgagttattacttgctatattccatctgggctgctcttaagtccaattggccagccctcatggtcatattttcatgactcacctaccccatggtgtcttctctctccaccttcttctctctccccttgtggtcctcctcagacacccagtccaagaattgaagctccaccttcctctctcctgctcagctataggctgtcagcacctttattcaaccaatagttttcaattaagaagcaagttcacatagcattactttgtgtatgtgcagattctctcatccctgggacaacccggccttggaggtcagtatgtggcgtcacaacacctagcaaaagaccaaaaccccaacagtgttttatcattctgtctttgcaaaaatagcttgaacaagtcgtgatgtagtatggattttgcatgtcagaaagttatcatctttgatttacatatacattgtaagccagtcttaacatatcaagcctatgcttgcttagtgtctcttctatgctctgtaaacattagctcataaaatacgtgtatgatgccgtacaccaatgatgcctcaaagacatctccatacccaccagccagtgatgcactcagcaactgttcatccagtctagtggtacctattgacaagatctgtgactcaaaggtcacagatgggaaagtcctgtgtcaatctcccttcggttcaaactgagttttttcatatcctttaagttattcctgtcttatccatccctgtctgtgcaagaacttatacaaatcttaagttttccacttctctacgttttggaacaaaaaattgagacgctgtaccccaacagatactttttgaaagtgttaggaaagtgtacacgcatggatgtggtcacacgcacatgcaaacacacacacacatgtgaatatacataaacacagtggattttttgatgaaaagagcataaatatgccccctatatttctcagaaatactttaaaatacactaatttctttattacactgcccttcttctcctcttgtcaagccgcagacgtacttgtttattttacctgggctagaaatgtgtgccaatgctctgtatgagggactttgccaaaaacctgtctgaaactgcacaatgattcacaggaaagctgaaaccacactgaatcttactcttatctgcatggaagacaatactgtgtgcaataaaacattatcatccagtttccgctgccctctcttgactttctgaaaaagtacataaactttgtctcagttttaaccctgtaagtttaaagccttttattttcttgattaactattactcaggcttttatttattaggacagtgtgtgtgtgcacgcgtgcatgtgtgtatgtgatatcataaagaagtaaataaacatatatctattggactaaaaagatggaatcctagattaaattgaaaagaaattcttgctgcgggtggtgtttggaaggctcttattttattaatgattgagaccgtttctgtttccatatctttagtttccagcctccttcactatttcccctaattcaaggttcgggaagaaagtaagtttgatctcctggttttatgatgaaaactaagcaaaacacaaccaaaaatcaaagttaacactaatttggaccaataccaatggcagacacctcaccttctctgggaaactctagaaagtcactggtcagctgactctgctactgcagagggaaacttcctagaaacctatgcactgaccacaaggctcccatctgctcactaaattaataagaaatcctcaccaaagaaaccattaaggaaccgtttgcccctctggaacctaagccctattgatgtttattctaagtgcaaaattttctttccggctttattccagatgtttttaattgtgcaagtgatctgtgggcagggcagagggtcaatagaaacaacagtcaactagtttgggcaattggatgtagcctagcacaatagtgccaaatacagacaatgctagagcaaaattaaaagttttagtaatgaagtttgatacgttgtgtctaaatgtagctttttaaagttctagaatgttttatggaatgaagaaaacacacttaaatcctacttacattatgtgtgttctcaacagtccaccccccttctctggataaactgtcatacagcagctggcactgaattctcaggtcacaagccagtgggatccaactgaggcctggttaggtccctttatgtagcacttagatggatttttgttgttgttgttagacaaagaaaatgctatttcaggatctctttacaagcccaaaagagatttgaattttcctttcatgaacatatcgattaaaaatgcatgtgagattgggcttggtatctaagatggcctagtgatttcttccaaagaaacaaatcaaaaagggagtgagttattcaaagccaaaggaatgactaagaaaagcccaaagagacaatttagatttctgactaagtccacctatcttgtgctaacctaggccctgctgcacctaagcattccttgtagaccctcccatcagcccttctagttcataaatcaggtttgtttgtttttaattctacaaccttaagaaagaccattggattacacaatggcctagtacacccaaatcaaatgggattactggcacttacaaattagctgcttcctgagccgccctgaggatacagatgtgatccagaagcgctggtacatcatgtaaacttggctcttgggaggtgaaggcagaagtgtctggagttgaaagttatcctagctacatagtgaatccaaggccagcttaggctacatgagacctgtctaaggaaagacattgatgtctttttcttttttatcctgaatggatctattttggtcttgaagaattccagtggcaattttttatgagatccaggggattctaaatttgtctcaggattgactcaatctttgagaataaagaaggaagaatgacaaaaggaaggaaaggggcaatgctggcagcggaggagaatattgtttaatgattctacacctgccttagatcattttatcacacatactttggctagttgcagcgaaatgtataaaacagtttttatttttaataggttgggggaaccaattaaatcactctcacaaagccgcttgtttattcagaaaatatttgccatgtagcaggaactgttttagctgccagagataccatagtggacagatagaactgtacctttgtggagttcatattttacctagatattttaaacacatcgactattaccagttatgataagaaatgtgtgtgaaactatcgcacaatatgtgcaaacaataaatgcatacatatatttaaagttttcatgcacaagctctattataagcaaaacaccatgtcaattaatgcttcctgttctggcaagttctcttttaagctggtgtattagttatattttctcagcactgtgacaggagcaacttaagggaggaaaggtttaatttttgctcacagttcaagggtacagtccatcatggtggagaaatgatgaatctggaaacggatgcaactctaggttgtaaggccatgtatcttagtcagggttctattgctatgaaaagacaccatgaccaaagctactcttataaaggcaaacatttaattggtgctggcttacagtttcaggggttcagtccatgatcatcatggcggcaagcatagcattgtgcaggcaaacaaggcactggagaagccaagagttccacatcttgatctgcaggcaacagagggagactgccttctgcatgcagccaggaggagactggattgcacactgggcagagcctgagcataggagacgtcagaacccacccccacagtgacacactttctccaacaaggccacacctcctaatagtgccattccccttgggccaagcattcaaacacatgagtctatggagaccaaacctattcaaaccaccacaccatggttctgtctaccttcagcctcaataagcacaatctagaaaattccctccaaggtgactctagactctttcaaattgacaatcaatataaacctagtcataatcatttcaattgattttatgatctaataatgagtcatgatccaatttgaaacagcacccctggctgacttgaataggatggaaataattcagcatgactttcaaaggcaggagagtcttttgcctatgttatagctacagttgctgatgctgacgcggttgctgtaggtgctaagtggacagtttgatagctagggaaaggaagtggagaaatggaagaaggtatctatcatcatggcttggcagaaaccacctaacttcagttgcgatttcccaagatctcccgctctccttcacactgacctcctgtctgctccaaccctttgttctctctgcacaggatgacaacagagtacccaagccactatggggaagacatggacatgatttcctatgactacgatttctatatgcgaggagcaacaaccactttctctgcagtggaaaggtgagagaggtaacccctgtccagtgatctcagggctggaggctgtgcagattcactcccttgctgaagtcctgactgtggggtcttttacctgatgaccccgataatctagtttcctacttagtcaaggattagactgtgggtttggttaggcggcaggagccagtgagnnnnnnnnnnnnnnnnnnnntgtaagtttaaagccttttattttcttgattaactattactcaggcttttatttattaggacagtgtgtgtgtgcacgcgtgcatgtgtgtatgtgatatcataaagaagtaaataaacatatatctattggactaaaaagatggaatcctagattaaattgaaaagaaattcttgctgcgggtggtgtttggaaggctcttattttattaatgattgagaccgtttctgtttccatatctttagtttccagcctccttcactatttcccctaattcaaggttcgggaagaaagtaagtttgatctcctggttttatgatgaaaactaagcaaaacacaaccaaaaatcaaagttaacactaatttggaccaataccaatggcagacacctcaccttctctgggaaactctagaaagtcactggtcagctgactctgctactgcagagggaaacttcctagaaacctatgcactgagcagaaggctcccatctgctcactaaattaataagaaatcctcaccagagaaaccattaaggaactgtttgcccctctggaacctaagccctttgatgtttattctaagtgcaaatttttctttccggcggaggagactggattgcacactgggaagagcctgagcataggagatgtcagaacccacccccacagtgacacactttctccaacaaggccacacctcctaatagtgccattccccttgggccaagcattcaaacacatgagtctatggagaccaaacctattcaaaccaccacaccatggttccatctacatttagcctcaattagcacaatctggaaaattccctccaaggtgactctagaccctttcaaattaacaatcaatataaacctagtcataatcatttcaattgattttatgctctaataatgagttatgatccagtttgaaacagcaccctggctaacttgaataggatggaaatagttcagcatgacttcaaaggcaggagagtcttctgcctatgttacagctacagttgctgatgctgttgttgtaggtgctaagtggacagtttgatagctagggaaaggaagtggagaaatggaagaaggtatctatcatcatggcttggcagaaaccacctaacttcagttgcgatatcccaagatctcccgctctccttcacactgacctcctgtctgctccaaccctttgttctctctgcacaggatgacaacagagtacccaagccactatggggaagacatggacatgatttcctatgactacgatttttatatgcgaggagcaacaaccactttctctgcagtggaaaggtgagagaggtaacccctgtccagtgatctcagggctggaggctgtgcagattcactccttgctggggtcctgactgtggggtcttttacctgatgaccccgataatctagtttcctacttagtcaaggattagctgtgggtttggttaggcggcgggaaccagtgagaagtgagaattcttgggaacttgcctcacaaggcagtgtgaccttgccaagaaggacagagaccaacctactgaagtaccactgcagccgtgaacttggcatgggcattccttaatgtcctaaacaattcctgcagtcagcctcagacactgcttgcatgccaaggaaaggttgannnnnnnnnnnnnnnnnnnnatttcctatgactacgatttttatatgcgaggagcaacaaccactttctctgcagtggaaaggtgagagaggtaacccctgtccagtgatctcagggctggaggctgtgcagattcactccttgctggggtcctgactgtggggtcttttacctgatgaccccgataatctagtttcctacttagtcaaggattagctgtgggtttggttaggcggcgggaaccagtgagaagtgagaattcttgggaacttgcctcacaaggcagtgtgaccttgccaagaaggacagagaccaacctactgaagtaccactgcagccgtgaacttggcatgggcattccttaatgtcctaaacaattcctgcagtcagcctcagacactgcttgcatgccaaggaaaggttgagatggctggaagggcattcgccctcaaactggatccccttctagtcctgtgcctttgtgtgctcctcacttagaactgtaggaaaggaagagaagaaaagaagaggagaggattcacaaggaagaacacacaaaatccattctctcactacattcagtctggtctaatgcaacatttgagactagacaacttataaaagtcagaactctactgtccacagtcccagagacttggaaattcaagttcaaggaagcagaagatatttggcaagggctgatctttgctttgaagacggaccctctcattgtgtctccacacagtggaaaatggtcttactgcttcagtttcttgagggctaggattacaagcatagttggtatacccactaccacctcgggtttccaatctaagcacagtagattgtgaggttcctgcttccctcagcacatgctcatgcttggtgtgcatgcacacttccccgtaagtccatttgaaaagcaggatatttagggttgttagagggaggggagttgccaaagcccatggagctagtaagcaattcaatctcccatgatctcacccctacccttatacaacataagctgttgttacaaaggcactaatacgactcccaaggacagcataattttacataatcagcccccaacccttacctcttagtactacttagttctatgattactttagacactagtttccagcacacagattttataacagacattaacatgcagaccacagcatctaactaatcatatttagaaatgaaaagggaggaaatcattatgtgatgaagtcagaatatttctggagtaaaaagacgacctaagtaactcaagaaggaaaagcactaagttgcacttcggccctgcttctcccctcattcctttctgggcctctcccaaggacactgaaaccataagaaaagaagagtcaaaaaattcctgtagataagatcatcatatggctcttgtgttatctctccattaatccatgaaaaagtatggagaaatgcagaagttaagagatgagttgactagctttcactccatgataataatgtcacacaaaaatgaattctggaagattacccacacatgctttgcaaaccaaataaaaccgaaagccaatcctctaacgggctatgagctggagtcaatttgagtgccatctccttttgtgtatatgcttccaaagaaagttgcatttcacttagctgcagttaacttatttactatgaaacccacattttaaagacataaaaatagctgtggaaaagcacattgtcttttccaggttccatagacaaagattctggtttcttcacagaaggacaccacagttttcatatgtaactggtctctgtttgagattgggttttaacttacttggttaactgctttctaaaagccacagtttagaagaggaggaatactatggataaactcagccaatgaggagaaacaactgagtggtaaagatacttaagacgagaccaacccaagaactcaaagaatatggaaatctaatgtcattgagcaataaagtgtctgccaaagttcaggacacagtgccagtatcaagcattcctaaagattcccggggtaaaggggaaattggtcctgagttttctggttaaaaatataaaacaaagtggaaacattaaagaatgaatgactatcacctaaaattggtgctaaataaatatttttttggcagccaaaatggccaattctagctggcttggaaatgatcagttacataaattgtacagaatcactgaagtctgaggcttagtgtctctaaattattttaaaatgacttctgcctcccccagataaacataaaattagcataaataaaattagcatgctaattaattagttttgattcggtcttcaacaatcagtggtttggaaatccacagttttagtttgttcatttccattgaagatggggtgcttacccccaatcccattggacaaaaaccagctgagcaagggcttcccttctggaacgaagctcacttgtctatgtccacttgtgtatgggatggtttctcattctggggacagatcattcttccttgcaagggtctgttctatgattctaggtgttagccccacccactaagtgcaactggtatctatctacctacagggtgacaggcaaaactctttgcagccattaccaaatataccatggagtcacttagcccctagatgaaagctactgtctggcatggaaaacagaaccaaggtagaccccccttgattcttttaggaccaagtctaaatttttctcaacttctattaactgcctcttaaacttatatcacagatgcctggccacagggccttccttaccttcttcatgcatagatgcgcatttcttagctgtggtaattaaattcactctcaaaacacactgtaccagtttgttagtcatctaaagcaagccgtatcctctgtgggtgatttttacaagaacaaatatcaatacacatctcattcccccaggcccttaaagacatgtgccggagaacactatccccagtggcactgcataggacacgctagaaaaacagactcagaattagaaagcttgccttgccttgggctatttgctcaccatcccccatcccccaactccaaatagcacagtcatcccacatacttccttcccatccagaaaccagatactggagctgtcagccattggtgtttggtatacactggatcagaaatgagcccagcaggttcaaagagaaggaagaaggactgtactgtggaagaaactgctcagctgaatatggataaagtagttccactctttattgggattatgccaagagcatgacagctgtgtcctctggtggcattaaggacacctggcaagggaagcagcatggtacaagagaaagaccaatatttgagttcagcaccttcgaaatctgacagcatcacctttcactggttggtaatcccttaaagcaagtccgattacactaagcctatttcttcacaaaacaatgagtcacagtggggattactgataggacaggttgtagagcatctagtgcagggttgggcacattggaagcactagggacttcacaatgacaatggtcgctgtcatagttaaatagtatcagaccgcaggagtgctgggcagagtatataactccctgcattcccattaagtggttgaaaacaggacatggtcctaagcttagcaaacagcaggtatctgcaccatgttttccaaaactgaacagttctgtgccctctcaattttatcctatcacttaaataggctattccatttctgataggtgaggcattttcttttcacattttaaggtgccttgagtggtttcccactcaccttagatgtggtttcaaaggggaaacacacagtgcatctcctggagcctggcatatagagagtcctcaggagaaaggaaatattatgggaaattgcattaccttttagaaggaaaatagattcttcaccgtgaaatagaggtagtgctagtaaatgctgaacttgtgagtcctggatgttgagccatggaggactgaccaccagccatagtaaaaccctccatgtgccccattaccagcaacgggcaatccaacctcacagatccatcagttctctggagactttattgaaggtttctgagaacaaggtgagaatctccacagctccgaatcctgccaaagcccatcagtgcttttccccgggagccgctctttctccactcactgacatttccttttctggcgctcctcctacagggatcgccagtggaagttcatcatgtgccggatgactgactacgactgcgaattcgaaaacgtttaggctcgccgcgtacagaagtccgggtgaagggtcagggcccaggtgtcctgagggtgtcatatcacatatgttaatattgattagaacatctacacttctttcttttgctctcttccctgggatgggagctatggtgtcggctgcctaggcctttctcaccacgatcacacatataaataaactcacaattaagccatgtttctccctttcaacacattccaagacaatcatgtctagttgctgatggcagcttccttgcacagcacatgtacagagcctgcatgcttacagcctgccacccggagcacctgtcgcagccttgctgtgattcgcactataacttgagcttcagattcagcttcgtgaacttggagagaaagaaggagcttgagagaggtgggataaaggttctctgtagccaagtctgtttgagtgacagcacctagagacctcacctggggtggtggggggtcactctctgtcttgagggaacacgtctactctctccttccacaaaagccacatagacttagaagttcaagtaaagatctatgtgcttcagaagagaggggacttggaggtgaaagggggaggtgagagggtttgaggactgagctgaaagactttagacagaaagaacgtcctctattcaaagatatacaccagcagacccaacagtgagaatgaatatgagggccaggaaaacctgtgcgaatcagtctcaagacagaaacaatgaaagaaagataagtgaatgagattcacattgggaacctggggagacaagagtggtcagaggagaagagatcttgggttatcagcagcttgagacacacccagtattcatatgaagactgtaatatccctagaagccatagggacgccatctctggattggtcctgaaggataattctccctttcccatggcacttgaaagtgtattctgcagagatgacactgtaatatctctgtctctagccatttgtaccttcttctttaaaaaaaaataaaagtatcaatattcactgtgccataaatattaaaggtcaatttgtgccccctatgctccccttttgatcattcattaacccattctgaaaatacagcttcacactgtgatttgtgaggaggcttgaagactatcatggtgggagccatgtgagatgattggaggaatcagatcattagaacacaaagttcagagtgctcctgtcaccgaagggtcggacaaaggatggaaccatgtttctctggctttagatctagctctttacctgctatatcacatgaccccatctagcacatgaaattgtagctgtaggaaactcatagctcctttatctgtatcacttgcttattaactgcttcagcttctccctgaataggcccaggaaaggcgctagaagaggaaagccccagtggggacactttgctatataccccagggaaatggtgacatagaacatctcagccaacagtggctgcctttccctcagtaagctcccagctttgggatgggcaagacagaaccaaagatggcttcctttgtctcaattcttaagaactctttgataacatctgtctgctgagttccgctatttctttgctgctgcttttctgcagttttaatttataaggagaagttccctggtgttatttttcacagagggtgccattaatattttagcaatcgcagcactggtgcaggatgacaaccaggaagtggccttagctgggttcatgtggagcccagcaggaagggagacaaaccatgcagactggctcactcagtagccacatccctggcggcaacaaaaaactggtaggaggatgggatgtgggggtgagaggcctgtggctggaggagctgtcaggagactgtgaaaagcacaagtcaaggaaagaacagaaggccatctagtaagaggagaccgtgccagatgaaataaaaggggcttttacaaaaaagaaaaaagtaccctttgtgtgcaagccaaggaccatgacaggaaagacatcttcagcttggtttggttatggatcatttacattttatattatctgtcaatcagcacaagagctgagcctccaagtaaggaacaagttccagacctgacgatgagtcttgggtctcattgctccgttctttctactaaccttctctactgtcttggacacaaaactaacattttctaggccagctgtctaaaatgaagtcatttatttaggtcaatggttctcaatcttcttaatgctctgactctttgatacagttcctcatgttgtggtgacccccaaccataacattatttgcattgctacttcatgaatgataatgtaaatatctgtgatttccagtggccttagatggcccccgggaaaggtctattagactcccaaaagaagatccactgatccaggtgactgttacatttcttgcagctttaaaatcgtctgcactctttcccaaatggttgataatgggattcctgaggcaatctctcctgagtaaacagcctggcactgtgacagaagacctaggccctaccccagaatctggcagaatagagttatacatctccaaacctatgttttcctgtgtccaatgaagaaaaaaaaaatccctttcccaggaacctcacaagatgctgccacttaaagcccagtgaatagcaggagagacaggagattcccacttgacaggacatgtgtgtgctgggaaaacagagtcaaagcaggccagtgaggcagaaaggggaaactggggaagctgagtccagatctggcatcgatgaatgaacagaaatgctatgggctatggatatcagccctgactctgtcagttcccaacatcatcatcttggccaagttagccacctttcttgattctatttccttacccaaagagacaacaatatctccatgatggacttgatatgaaattaaacgcaatcacgtaatgattgacctgtaagaccacagtaaatgcagtacaagtagggaagagtgtgcacacacacagaggtataatttctcagaaaacagggtcttaaaagaaatcatatcaatctttccaatgacaggaaaaccgagtgggacttagatttgtctctcattcattcatttggttagttactgaaacaatgaattattatatgcttattataagccagctgctgaataaggttcccatagtttagactctaaaatattgaggatgatgaacaaaaattgagagaaacagccttgtggtatagtggtgagcatagtcaccttctaagagtcaggaaaacaaataaaactctatagttccgtttcattcatgatgatgggtgtaaagcaatctatgaacttaaagagaatttcctaaggaatgggcctcgccaacagggtcttggagtttcatcgtatagccctaaagctatgagcaagaactgatagctcttgacaacaccataaagcatgccattatttgtgcatgttattgaaatttattatttttcctgaactcttggatatctaaggaaatggacggacacacacactcaagaaacatcacacacttgtatgtgcacaatttctccgtgtgctcccttcatcctgcctcttggtccacacacaactgtctttaggttccacttctttgactcagacataattttgacagaatgaaacagggaggacggtgggggcagggagaaactagaataaagtacgatacatacatatgaaaatgccatgatacccttgtattgtgttccaacctcaaatatcgtgtggtatatatttaaaacgatgtctgtgatggctgagagaagaggtagtcagtcttcctcaagtgtgagccccctgattagcttcccaatactaagtgctgagccctaaacacatatccatacaagcaacactagtggactcattgcagcggattgtatttatatatttatgtgtgtgtatataaatgtaacaataataatttaagaaaaaagaaaacaacagtaataataaaagtagggggacttggagatacaggaaggggaacagagggacagggaacagggtctgctaataggggattgaatgagatcaagtattctatactcgtgcatggaatgtcacaaggtaggtaacttatttgtgcaactttaaaatgctagtaaaggtagaaacagatactgagactcgagctttccttaatgcctccagaagaattacagaaagaagtaaaagaaagtaagagagacttagactactagacatgtctgtcttctgcatacattcttactccagcacctttcctggggcctctctaactccaagcctatagagtctctcctattcaccttacaaaatattgttctgtgaagtccacactgaagtgattattcacatcatggtggtccacagaagagaccaacattcactttctttataaagtctctctcagttttaattaaatcatatcagcttagttttgtttattgaaactgcactgttagggacttgaacctgagtaccttcctggaagtcagtgaggagggggaaggggaggtttttgcagaatctgtgtatactggctaggttttacatcaacttgacccaagctgagggagcctcaattgagaaaatgcctccataagagcaatctgtaaggcattttcttaattagtgattgatggggaaaggcccagtccattgtgggtggggacaactgctggaactggtggtcctgggttctgtaggaaagcagtctgagcaagccaggaagcagcatccctccatggcctctgcctcagctcctgagtaccagcactgagttcaagtcattgtaaggaacgattatcttttcacacacagccatgactgtcatgagacttgaggcttttcacaagcttaaatctgaaaaccaagcaaaacgctattgattgtaaaatgtacctaagagatgccgcggggcttgccaactcttcacaccctccactctgtgggctctttgctcttcttaccttacatacctgtgagctcagttcagtaagttataggaaatgctgaatagaaggtctgcaaaatgcagggctgtgtggctctgtggatgaagggcttatccagcaagtaggaggacaaaagctcagattcctagaacccatggaaatgttgggcaggcatggctgcatacctctaatcccagcacttaggtggcagaaacagacagaggataactggaacaaactaagttagctacagaagctggtatcggaaagatccaaggtcagtaagagaccctgtctcagtgaagtggagaagagctgaagaagacacaaaacacctacttaaggcctccacacacatgtgagcctacccacatgcagacatacatacacacatgcatacacaccatacataaaacaccgaaactgcaaattatgatattccttggaatgtagcaatactgtgttgccgtgatttgtacatagctttcttccttctccagttaaaacaattagcatcatgtttaccatcaaaataagagtaattctaaatcttatgagacaaaagctgttactggctgccgtgcagttcagccctaggccagcgttccggctgaaaggcaaccgaaggcttcacttcatggaaagaatgagattatagaatcccagaccctttcactttaccagctgcctagtgggctgtaatttaagatgcagaattacctgcctcttccaatgtttctcaccatccccagagagagcagcagatgtgctcagcctgtcctttggccagtgagaaacactgtccctcggtctgctggtaacatttaaggtagtaactagaaaccctttctctgcttcacccaagttcaatttctgaggacagactctgactccttataccacttttctataccttacaaatctcaagtccttccctggggctttggtctgctgtccttgccttctcttcatctggagaaggcactgaggagatttcatagaacatacatcctttcacaagataaaaacagccctaccccaactgcaaaccaactgaaaagtcttgataactttaaattgtgccacggaaccctgctaagcacttgactttaccacaagcaacctctttcctcttctaccgcactgtaagcctacacacacagaaggagcctagcaacacgaccactgggaataataacagtcagaacgtgagtctagatcgtttttactgggacgatctatcagtgttctaaacaattttcattgaaaattgaagtctgaacagtcttggccattatgcggttttattaagagacaaggcattgcaggggtactacggttctgggggtccgatgcccatctcttactcccttccagcatcattaagtaatgataatcattcatttttacccctttagaaactaaccactaatgataggtgagttggaaaacatgacagtctctctgtcacacaattggaaagcttatgccactatcctaagtaattgaatgccattttttttaaaaaaatgaattaaaagtcatattgaaatgagcatctgagcagcttttggtggagatgagatcaaacctcactgactaatcccccagtagactgcagaccgagggacgatggggatcaggctgacagatggttgatacacagtgaaaagatgtctgaaattaactggacatgtctgtgtgttagggaaagttggagataatgccacagaagtataaacaagtgtatcaggagactggaggaagggacaggggaacctcaataggattcttgcagagaatggtgtgatactggttctggctggtcttggctggtcttggctggtcttggctggtcttggctggtcctggctggtcctggctggtcctggctggctctgtggagggaaagggatctttttctctgtttattttcttgttatattgtttggtttcacgtgtgtgtgtgtgtgtgtgtgtgtgtgtgtgtgtgtgtgtgtgtgtgtgtgtgtgtgtgatttctctgctcccacattttgatggctggagttacaggggtgtacctgactcgtagcctggaacttcttacacagagaaaaaaggaaaaatttcccagtcacaaggcactcgaaggcaccattgctacctgtgttctgtatgtccagtgctgttagacacaccacaaacgtggatttatgcaacgttgctaactcaaaggaaatattcatattcgctttacttcacccacttgaaagtgaagtgttgggctaggtgtctgggttctctgagggatctctggctcaaaaccacaaatcaccctacaaccaagcatcagattcaggtaatatctgaggtgtgcttcatggccagagactccagcattatacaagagccacattaatcaatccaccaatgttttgtgtctgtggaactctttgttggcagactcacaggtgagttcgttagccagtaccctgtggagagatgttcttggaagccatacatgccctgtgtcatgcctgtcttccccctccccccacaacaatgtcatgcagattggttccactcacaggcttccaggaggaaggacctggaactctttcacagtgtaaaaacagtatagtctgagctggagaattcacaaggggtaggcaggttctcatgggtgaaccttgagaaaaattcactacaaaggcagagggattaaagaattggaaaatacaggtgaaactgtgcagtcaacccttcccacacggaccctgttctaaactgacaactgaacacgagtgtgccctcgtataacaaatcacagcaagatgtcactcattaatcacttctgtgtctcctggttcaaactgaaagaggccagaaagcacatagcacacttttttatttcttgcagaaaaaaaattttttttaattctaaacaaagggaacaaggagcaaaacccagaaaggttattgaatgacagaaggctctaggccactaagcatgtaggaatgaaacatgggtgactcgtggtgtttcagaggcaggagggtctctacaagctcacggaacaagctcatggacagatgacaacagcccaacgagtgaaggaagaagggccgtgccaggaactgaggtgcttgagcaagctaggggagggagggaacgcttcaagcttgtgaggggaccctcttgcctcctgccgccagctctcaggtggaagacaagtgggggaaatgatttatttaaaatgtagggacagatctagcaggcaaatgctccatacagactccaggggtgggaacacacatctctatacagccaggagtgggaacacacatctctatacagccaggagtgtgaacacacatttgtaacctagaacttaggaggctgagagaagtatattacaagtttgaagacagcctaggctatatacctagatcctgtatcaaaaaataaataaattccatctactcatacataggcaaatgtatttatacacaaatacataatatatacatctattaaaggacaatataacgtgcaagtccctatctggtgggttagtttgtggcaggagaaggaagcacatgcattttttggtgtttgtgccctatgatctagctgcccttccatctaatatagcatctacagaaaggtaggcatttataaaaacagacccccaaatccttgaagtaggagttaacctgcccaaactcacacaccagtgtgaatggacttgaattcaagacaagtggttctcaaaactcagctggttctacagtaacagtttggagttgagggaatagagagagatactgtttcaaactattttgcagttccatggccgaacacacaatagaaaaaaatgattggcatgcttattttaatactgtaaatgttttccctggagagagagagagacagagagagagagagacagagagagagagagagagagagagagagagagatctggtgtggtgagattattaggagaatgttgctgtaggtttacagagccagctgggtagtctgcaaatcggaggtatactcccctggtgtttcacatttccaggaaccttacctagcacaacaacactggagtgattgaacatctttggtggcagtcctctgactgtctgccttctaagatgatttctgataagaaatgagaaactcactgtgaccctgacaagcagaattcaacaaatccaatgattgcctcaataattgcctttgcttgactcctgggccctctgcacagactcatggccgtgttcagctttgcagcatgggctctgagaatctttctgcctagagaatctgtgtgctcagtagactccgctgtcttcatagctgatgagacctcaggatatttagtcctttggcagaagtgctgttctgtcgatcaaagctccaacccttctggctccatgatgtgctctcaagcttatcttgagcacacaggctacctacaccataaaccgcatcgatggcttgtatttggtagttataatagagtctagacatggaagttaatttattacctttaattttcagagaagaacctaaagaagggaaataacacattcctgttctattagacacagtgagaaattctcttactccatatgagacggtaaggaaagttacaatagtataaccttacggtcctttcccatggggccattctctgtggtcattgtagttaccctgaggtcataggcagctttgcccacactggcctcaatgaaatcagagcaggtctttcctatggctctggaaatatgtaacaaacaataatgatgacaataactaagtgcttttgcacctacaggaatctcacctggatactcatagtagactttaaagatagctccgtcgctctgttttataaggaggaaattgagaatcactttctttctcgggaatatatactgtacacattggaacagaactcaaactcagacctggatgaatataaggcacaatatgatagtgtttcctttactgtcctcagactccagtatagacggtgccatgcttccttctttaggtcatgccataggctccttgggttactgtatctctcctcacttctggcacagtcacatgagcatcaaatcaactcagcttcaaagctcatctaaaacttaagagccagtagtctttctctagacatggacacacacacacacacacacacacacacacacacacacacacacacatgctcatattatatatatgatattcatattaaagaatcacttaagttgattggactctggagtatagacactttattaatctactatctctcatcctctttatttgtattctttccttttataaccttacactgttgtttttatcttcatgttcccaaacatttataccttctgtgccttatagcttttataagctatagcagagatcaaagggaaacaagtagctattcatcttctaccttttcacagacccacacttaacctcctcactctatctgaaccctgccttgccctggaatcctcgtgagtacagtttgtatgcatctgtgtacatctggatactgtggggtcagtagttactgcctttacctgctaaggaattcctgcatggagctttttattgtctttcattgcatctcctgactccttctcatctccaagaaatctacccacatgctggaggaggagccacacttcccctgtgctaatcctcatgcctgggagcctctcacttcacacttttccagcatgagtctcagagctacatttcctggttcccgaggcaaattaatagtccctcgcctgtgccaccaaacatctggttatatcagcttggtcacaccttttcattttcctgtttggagagatattaaatgttctctttgttggtccctttgtacccagtacacagaatatagtaggtattcattaactaacaaatgtttaaagaatgagcaatgagagtctgtagaattgtggaaaataaaaagtggagcccattcattttttgtcccagactatgacaacaactttctgtcta

SEQ ID NO: 140 - DNA, 1647 bp, Mus musculus
atggacctcactcttctgtgggttcttctgccactggtgaccacagcctggggccagtatggtggctacgggtacccataccagcagtaccaggactacggtgatgatggatgggtgaatcttaaccgccaaggcttcagctaccagtgtccccacgggcaagtggtggtagctgtgaggagcatctttagcaagaaggaaggctctgacagacaatggaactatgcctgcatgcctacaccccaaagcctgggggagcccactgagtgctggtgggaggagatcaacagggccggcatggaatggtaccagaagtgctccaacaatggattggtggcggggttccagagccgctacttcgaatcagtgctggatcgtgagtggcaattttactgctgccgctatagcaagaggtgtccatattcctgctggatgacaacagagtacccaagccactatggggaagacatggacatgatttcctatgactacgatttttatatgcgaggagcaacaaccactttctctgcagtggaaagggatcgccagtggaagttcatcatgtgccggatgactgactacgactgcgaattcgaaaacgtttaggctcgccgcgtacagaagtccgggtgaagggtcagggcccaggtgtcctgagggtgtcatatcacatatgttaatattgattagaacatctacacttctttcttttgctctcttccctgggatgggagctatggtgtcggctgcctaggcctttctcaccacgatcacacatataaataaactcacaattaagccatgtttctccctttcaacacattccaagacaatcatgtctagttgctgatggcagcttccttgcacagcacatgtacagagcctgcatgcttacagcctgccacccggagcacctgtcgcagccttgctgtgattcgcactataacttgagcttcagattcagcttcgtgaacttggagagaaagaaggagcttgagagaggtgggataaaggttctctgtagccaagtctgtttgagtgacagcacctagagacctcacctggggtggtggggggtcactctctgtcttgagggaacacgtctactctctccttccacaaaagccacatagacttagaagttcaagtaaagatctatgtgcttcagaagagaggggacttggaggtgaaagggggaggtgggagggtttgaggactgagctgaaagactttagacagaaagtacgtcctctattcaaagatatacaccagcagacccaacagtgagaatgaatatgagggccaggaaaacctgtgcgaatcagtctcaagacagaaacaatgaaagaaagataagtgaatgagattcacattgggaacctggggagacaagagtggtcagaggagaagagatcttgggttatcagcagcttgagacacacccagtattcatatgaagactgtaatatccctagaagccatagggacgccatctctggattggtcctgaaggataattctccctttcccatggcacttgaaagtgtattctgcagagatgacactgtaatatctctgtctctagccatttgatccttcttctttaaaaaaaaataaaagtatcaatattcactgtaaaaaaaaaaa

SEQ ID NO: 141 - DNA, 606 bp, Mus musculus
atggacctcactcttctgtgggttcttctgccactggtgaccacagcctggggccagtatggtggctacgggtacccataccagcagtaccaggactacggtgatgatggatgggtgaatcttaaccgccaaggcttcagctaccagtgtccccacgggcaagtggtggtagctgtgaggagcatctttagcaagaaggaaggctctgacagacaatggaactatgcctgcatgcctacaccccaaagcctgggggagcccactgagtgctggtgggaggagatcaacagggccggcatggaatggtaccagaagtgctccaacaatggattggtggcggggttccagagccgctacttcgaatcagtgctggatcgtgagtggcaattttactgctgccgctatagcaagaggtgtccatattcctgctggatgacaacagagtacccaagccactatggggaagacatggacatgatttcctatgactacgatttttatatgcgaggagcaacaaccactttctctgcagtggaaagggatcgccagtggaagttcatcatgtgccggatgactgactacgactgcgaattcgaaaacgtttag

(The sequence listing continues in the following parts.)
